United States Patent Application Publication US 2011/0182862 A1 - sequence listing, part 26

SEQ ID NO: 37904 - DNA, 357 bp, Muscodor strobelii
  misc_feature: SGI cDNA ID NO. 573163
  misc_feature: Elevated expression when VOC is produced
  misc_feature: Encodes the peptide sequence at SEQ ID NO 37905
atgttgatgcccgctacttgggctctagctgtgcaaagaggctccggcagtacattggctactgtcagtcgcgccatggtcgcagggacatctggagagaagcgtagccctgcgattgaaactgccgcagacactgacaacgacgatgatgacgccatcgcatatgcgtggtctactgaggagcagcctgaggatccgaacactgtcagacgcgctgtcaccactccggcatctggagtgaagcgtgcccctgcaattgagaccgcagcggacacagacaatgatgatgacgatgcgattgcatacgcatggtcaactgaggaagagcctgaaggccctgccaccaataagctctaa

SEQ ID NO: 37905 - protein, 118 aa, Muscodor strobelii
  misc_feature: SGI Peptide ID NO. 573163
  misc_feature: Useful for introducing or modulating the production of volatile compounds
MLMPATWALAVQRGSGSTLATVSRAMVAGTSGEKRSPAIETAADTDNDDDDAIAYAWSTEEQPEDPNTVRRAVTTPASGVKRAPAIETAADTDNDDDDAIAYAWSTEEEPEGPATNKL

SEQ ID NO: 37906 - DNA, 919 bp, Muscodor strobelii
  misc_feature: SGI EST ID NO. CUFF.90813.0
  misc_feature: Variant of the nucleotide sequence at SEQ ID NO 37904
cgaagatcgaaacttcgtggcttctatttgcgcgtggaaatttctagcccctatccctatttgaccttttgaaataatattaccaaccttcaaggcgtcgttgatcaacatgctcgtgtcaaccttggtagccacaatgttgatgcccgctacttgggctctagctgtgcaaagaggctccggcagtacattggctactgtcagtcgcgccatggtcgcagggacatctggagagaagcgtagccctgcgattgaaactgccgcagacactgacaacgacgatgatgacgccatcgcatatgcgtggtctactgaggagcagcctgaggatccgaacactgtcagacgcgctgtcaccactccggcatctggagtgaagcgtgcccctgcaattgagaccgcagcggacacagacaatgatgatgacgatgcgattgcatacgcatggtcaactgaggaagagcctgaaggccctgccaccaataagctctaagacttttgatggggttctgccatgctctattcacgcgtgggcaatttggcaccagcttagtagcctttgggggtcgacaatcgatcaagatcattctttgtcatttgttttcagaatcacattcgttatgcactgtatcctcatggatgaaaggatgggacaaggctatcttagcaacggttactctgtgtacttcattcaatgatcttagctttactcacattcatttgaaaactgatatattaatttttctgatgactctgcttaagtgaagacgtccagaccggaaatctgcgatacctcttcaattgacaatgaccttgtttggaaattggccttcccacttaaacactgattggatacgtggtgaacatgccgcgtaggtgtgcttgcgtacgattttgtaacatcaacatagtaaatgcc

SEQ ID NO: 37907 - DNA, 1281 bp, Muscodor strobelii
  misc_feature: SGI cDNA ID NO. 573164
  misc_feature: Elevated expression when VOC is produced
  misc_feature: Encodes the peptide sequence at SEQ ID NO 37908
atggcttctatccgtattattgagttgtctaacagaatcgcgaccaatacagcgaaagtacaggcatatctgacgacccacaacttgccttccccctcatttgacctaggcggtcccttagacaccctagtgcctaaaactgagactgaggtggaggcagcccgcattgaacttattgatgatactcaagagctgcgccgcctaatcctagggccacgtgagtatcttatgagctattcgcataatgaacttataagccagcaagccattgtccgatttggccttgcacatgcgctttctgttggaagcgaagcctccttcaatgagattgctcagcgttctggcttgagcgagagattcgttcgacaaatcatccgccatgcaatcacaaaagatatcttcgtggaaccccgtgagggtgtcattgcgcacaatgctgtgtcgcagttactagccaaggataaagatatgcatgactgggtcgcatctagcacagacgatctatggcaatcagctgcgcagacgtgtatgaggccccgcaatgctatacagaagttctccaactctgaagaggcaaacgaaacaggattcgccttggccaacaacacagataagagcatgtatgaggtcttttcccagttccctgaaagggcccggcgtttcggtaatgcgatgagggccttcaccgagggcactggttttgaactcagccacatcgttgacaactatccttgggcgaatttggataatggaacagttgtcgatgttggcggatcacacggttttgtctgcttcgcagtagcacgcaaattttcttctttgaccttcgttgtacaagatcttccgccagtgattaaggcagccgaagggaaagcgccaaaggatctcgctcattgcatcaaattcatggcccatgactttttgacagagcaaccggtcaggggcgctgacgtttatctatttcgctggatactgcacaattggtcccagaaatactgctgtatgatcctgcgaaacctgatacccgcactcaaagttggtgcgaagatcgtggtgaatgacaatgttttgccgaagcccggagtgttgtctacatatcaagaaggccgtcttcgatcaatggaccttactatgacagaaatccaaaatgctcacgagagagagcttgaggactgggcagaactcttcgagatggccgaccctcgctttgagtttaaaggaggtcaccagccagcaggtagtaatttgtggattatggaggccgaatggaagggcgactga

SEQ ID NO: 37908 - protein, 426 aa, Muscodor strobelii
  misc_feature: SGI Peptide ID NO. 573164
  misc_feature (137)..(397): Pfam Id: PF00891 Pfam Desc: O-methyltransferase
  misc_feature (252)..(397): Pfam Id: PF00891 Pfam Desc: O-methyltransferase
  misc_feature (5)..(425): NCBI GI: 116192635 Blast Desc: CHGG_06035 [Chaetomium globosum CBS 148.51] gi|88181948|gb|EAQ89416.1| CHGG_06035 [Chaetomium globosum CBS 148.51]
  misc_feature (5)..(424): NCBI GI: 212534482 Blast Desc: O-methyltransferase, [Penicillium marneffei ATCC 18224] gi|210069796|gb|EEA23886.1| O-methyltransferase, [Penicillium marneffei ATCC 18224]
  misc_feature (2)..(424): NCBI GI: 242800307 Blast Desc: O-methyltransferase, [Talaromyces stipitatus ATCC 10500] gi|218716905|gb|EED16326.1| O-methyltransferase, [Talaromyces stipitatus ATCC 10500]
  misc_feature (1)..(424): NCBI GI: 212536596 Blast Desc: O-methyltransferase, [Penicillium marneffei ATCC 18224] gi|210070853|gb|EEA24943.1| O-methyltransferase, [Penicillium marneffei ATCC 18224]
  misc_feature (5)..(426): NCBI GI: 154292573 Blast Desc: BC1G_14810 [Botryotinia fuckeliana B05.10] gi|150845891|gb|EDN21084.1| BC1G_14810 [Botryotinia fuckeliana B05.10]
  misc_feature (5)..(424): NCBI GI: 116206014 Blast Desc: CHGG_02300 [Chaetomium globosum CBS 148.51] gi|88182897|gb|EAQ90365.1| CHGG_02300 [Chaetomium globosum CBS 148.51]
  misc_feature (2)..(425): NCBI GI: 171681439 Blast Desc: protein product [Podospora anserina] gi|170940678|emb|CAP65906.1| protein product [Podospora anserina]
  misc_feature (1)..(425): NCBI GI: 154317924 Blast Desc: BC1G_02945 [Botryotinia fuckeliana B05.10] gi|150843603|gb|EDN18796.1| BC1G_02945 [Botryotinia fuckeliana B05.10]
  misc_feature (6)..(424): NCBI GI: 256733503 Blast Desc: NECHADRAFT_91826 [Nectria haematococca mpVI 77-13-4]
  misc_feature (5)..(424): NCBI GI: 189208266 Blast Desc: sterigmatocystin 8-O-methyltransferase precursor [Pyrenophora tritici-repentis Pt-1C-BFP] gi|187976559|gb|EDU43185.1| sterigmatocystin precursor Pt-1C-BFP]
  misc_feature (46)..(404): SWISSPROT Homolog: EC 2.1.1.110 Sterigmatocystin 8-O-methyltransferase
  misc_feature: Useful for introducing or modulating the production of volatile compounds
MASIRIIELSNRIATNTAKVQAYLTTHNLPSPSFDLGGPLDTLVPKTETEVEAARIELIDDTQELRRLILGPREYLMSYSHNELISQQAIVRFGLAHALSVGSEASFNEIAQRSGLSERFVRQIIRHAITKDIFVEPREGVIAHNAVSQLLAKDKDMHDWVASSTDDLWQSAAQTCMRPRNAIQKFSNSEEANETGFALANNTDKSMYEVFSQFPERARRFGNAMRAFTEGTGFELSHIVDNYPWANLDNGTVVDVGGSHGFVCFAVARKFSSLTFVVQDLPPVIKAAEGKAPKDLAHCIKFMAHDFLTEQPVRGADVYLFRWILHNWSQKYCCMILRNLIPALKVGAKIVVNDNVLPKPGVLSTYQEGRLRSMDLTMTEIQNAHERELEDWAELFEMADPRFEFKGGHQPAGSNLWIMEAEWKGD

SEQ ID NO: 37909 - DNA, 1188 bp, Muscodor strobelii
  misc_feature: SGI EST ID NO. CUFF.90819.0
  misc_feature: Variant of the nucleotide sequence at SEQ ID NO 37907
gcaatgctatacagaagttctccaactctgaagaggcaaacgaaacaggattcgccttggccaacaacacagataagagcatgtatgaggtcttttcccagttccctgaaagggcccggcgtttcggtaatgcgatgagggccttcaccgagggcactggttttgaactcagccacatcgttgacaactatccttgggcgaatttggataatggaacagttgtcgatgttggcggatcacacggttttgtctgcttcgcagtagcacgcaaattttcttctttgaccttcgttgtacaagatcttccgccagtgattaaggcagccgaagggaaagcgccaaaggatctcgctcattgcatcaaattcatggcccatgactttttgacagagcaaccggtcaggggcgctgacgtttatctatttcgctggatactgcacaattggtcccagaaatactgctgtatgatcctgcgaaacctgatacccgcactcaaagttggtgcgaagatcgtggtgaatgacaatgttttgccgaagcccggagtgttgtctacatatcaagaaggccgtcttcgatcaatggaccttactatgacagaaatccaaaatgctcacgagagagagcttgaggactgggcagaactcttcgagatggccgaccctcgctttgagtttaaaggaggtcaccagccagcaggtagtaatttgtggattatggaggccgaatggaagggcgactgaggcaaagccatgacacattaatgaacttttgatcatggctatgtggtattggttgttgatcgtctgaatttagattaaaatgctgcagtgacatatgtgtgaaccaccacaactcgaaattcgagtatcttatcaacagcaataacacgaagaagtattgatgatgaaacattgatcaataaaggtgcggatgataaagtaggaagtgcataatgcaataacgcgttctgcgccatttcgaataagaacaagagcagaggcagatcatgaagatacagttatgtataaatgtgtgtgtcaaggctaccggaacttgactctcagggggtttcaacagtacaaataaattcaagggaatcgggctgaacctagaagatgactaagcaatcatcagaaacaaacaaagccctcattactttagcgcaaatctgattgttgatcgtgc

SEQ ID NO: 37910 - DNA, 942 bp, Muscodor strobelii
  misc_feature: SGI cDNA ID NO. 573165
  misc_feature: Encodes the peptide sequence at SEQ ID NO 37911
atgaacacaatccacccggtgcgagagggcgaggttgattttccagccccaggggcggggaagccctgcttgacctggtacaaggtcattggagaattagatgtgcccccgctgatcgcgctgcacggcggaccgggcgccggacatgagtacatggagacactggtggacttgtatgagcagcacgggatccccattgtgctgtacgaccaggtggggtgcgggagatcgacacacttccgcgagaagcatggtgacggggacttttggacaatggacctcttcgtcgctgagcttgataacctcatcgaccatctacagctgcgcaacgtcggtttctccctcctcggccaaagctggggtggcatcctcggtggcgcctacgcctgtcgccgccctaatggcctgaggaagctcatcatcgccggcgggccggccagtcttccactttacatggaaggctgcaaacgcctgctagcccagcttcctcccgacgtgcgccggactatcgaagagtgcgaaagcaggggcgactacgacagcgatgagtttaataaggccagcgccgtattttacggccgccatttctgccggctcgaccctttcccagagcccattcaaatcgggttccagcacctcaaggaggatcctacggcttatctcactatgcagggcccttcggaatttaccatcgtaggtagcttcaaggactgggagccctacaaggaggcacatcacatagaggtacctactctgctcatcaatggcgagcacgatgaggccatggacctttgcatcgagcaatggttccggactatcccaaaggtgaagtgggccacgctgagtggcgcgagccatatgacccattgggaacaaaggaagcgattcaacgagctatgtggagactttctcaaatatcagcaccaccaaatacatacttaa

SEQ ID NO: 37911 - protein, 313 aa, Muscodor strobelii
  misc_feature: SGI Peptide ID NO. 573165
  misc_feature (64)..(302): Pfam Id: PF00561 Pfam Desc: alpha/beta hydrolase fold
  misc_feature (6)..(304): NCBI GI: 154314339 Blast Desc: BC1G_05263 [Botryotinia fuckeliana B05.10] gi|150848908|gb|EDN24101.1| BC1G_05263 [Botryotinia fuckeliana B05.10]
  misc_feature (7)..(304): NCBI GI: 145252800 Blast Desc: An16g06070 [Aspergillus niger] gi|134083468|emb|CAK46945.1| protein product [Aspergillus niger]
  misc_feature (6)..(304): NCBI GI: 254406800 Blast Desc: proline imino-peptidase [Streptomyces sviceus ATCC 29083] gi|197716230|gb|EDY60264.1| proline imino-peptidase [Streptomyces sviceus ATCC 29083]
  misc_feature (3)..(304): NCBI GI: 145595300 Blast Desc: proline-specific peptidase [Salinispora tropica CNB-440] gi|145304637|gb|ABP55219.1| proline-specific peptidase [Salinispora tropica CNB-440]
  misc_feature (25)..(305): NCBI GI: 260457388 Blast Desc: proline-specific peptidase [Streptomyces flavogriseus ATCC 33331] gi|260086610|gb|EEW70620.1| proline-specific peptidase [Streptomyces flavogriseus ATCC 33331]
  misc_feature (25)..(304): NCBI GI: 222106651 Blast Desc: hydrolases or acyltransferases (alpha/beta hydrolase superfamily) [Agrobacterium vitis S4] gi|221737830|gb|ACM38726.1| hydrolases or acyltransferases (alpha/beta hydrolase superfamily)
  misc_feature (4)..(304): NCBI GI: 271501435 Blast Desc: proline-specific peptidase [Dickeya dadantii Ech586] gi|270344990|gb|ACZ77755.1| proline-specific peptidase [Dickeya dadantii Ech586]
  misc_feature (25)..(304): NCBI GI: 271963655 Blast Desc: Prolyl aminopeptidase [Streptosporangium roseum DSM 43021] gi|270506830|gb|ACZ85108.1| Prolyl aminopeptidase [Streptosporangium roseum DSM 43021]
  misc_feature (6)..(304): NCBI GI: 256781407 Blast Desc: proline-specific peptidase [Streptomyces hygroscopicus ATCC 53653]
  misc_feature (25)..(305): NCBI GI: 41386594 Blast Desc: proline iminopeptidase [Streptomyces halstedii]
  misc_feature (38)..(304): SWISSPROT Homolog: EC 3.4.11.5 Prolyl aminopeptidase
MNTIHPVREGEVDFPAPGAGKPCLTWYKVIGELDVPPLIALHGGPGAGHEYMETLVDLYEQHGIPIVLYDQVGCGRSTHFREKHGDGDFWTMDLFVAELDNLIDHLQLRNVGFSLLGQSWGGILGGAYACRRPNGLRKLIIAGGPASLPLYMEGCKRLLAQLPPDVRRTIEECESRGDYDSDEFNKASAVFYGRHFCRLDPFPEPIQIGFQHLKEDPTAYLTMQGPSEFTIVGSFKDWEPYKEAHHIEVPTLLINGEHDEAMDLCIEQWFRTIPKVKWATLSGASHMTHWEQRKRFNELCGDFLKYQHHQIHT

SEQ ID NO: 37912 - DNA, 1053 bp, Muscodor strobelii
  misc_feature: SGI EST ID NO. CUFF.90825.0
  misc_feature: Variant of the nucleotide sequence at SEQ ID NO 37910
tatcctactcttgcatcactctccccttctctcttgtgcgcacgtacactcctcgtcatgaacacaatccacccggtgcgagagggcgaggttgattttccagccccaggggcggggaagccctgcttgacctggtacaaggtcattggagaattagatgtgcccccgctgatcgcgctgcacggcggaccgggcgccggacatgagtacatggagacactggtggacttgtatgagcagcacgggatccccattgtgctgtacgaccaggtggggtgcgggagatcgacacacttccgcgagaagcatggtgacggggacttttggacaatggacctcttcgtcgctgagcttgataacctcatcgaccatctacagctgcgcaacgtcggtttctccctcctcggccaaagctggggtggcatcctcggtggcgcctacgcctgtcgccgccctaatggcctgaggaagctcatcatcgccggcgggccggccagtcttccactttacatggaaggctgcaaacgcctgctagcccagcttcctcccgacgtgcgccggactatcgaagagtgcgaaagcaggggcgactacgacagcgatgagtttaataaggccagcgccgtattttacggccgccatttctgccggctcgaccctttcccagagcccattcaaatcgggttccagcacctcaaggaggatcctacggcttatctcactatgcagggcccttcggaatttaccatcgtaggtagcttcaaggactgggagccctacaaggaggcacatcacatagaggtacctactctgctcatcaatggcgagcacgatgaggccatggacctttgcatcgagcaatggttccggactatcccaaaggtgaagtgggccacgctgagtggcgcgagccatatgacccattgggaacaaaggaagcgattcaacgagctatgtggagactttctcaaatatcagcaccaccaaatacatacttaatctcgtgggaacataacaatgcgaccgatgttatagtacttttgttatcttggg

SEQ ID NO: 37913 - DNA, 1560 bp, Muscodor strobelii
  misc_feature: SGI cDNA ID NO. 573166
  misc_feature: Elevated expression when VOC is produced
  misc_feature: Encodes the peptide sequence at SEQ ID NO 37914
atgtggctatccgtcagtgacagttccggcgcgcttgtgcgaggagcaattgtgctatcggcgacgctttttattacttaccgcgtgttgctacacccactacgcttgtatcccggcccgtggctcgccaaacttacaaatgcgtataatggctatcatgcgtttcgccaacatctacatattcgtacttacttgaatcatcgaaaatacggttccgttgttcggcaaggtcccaataaactggtgttcaacacggtcacagctgtacgagacatataccgaacagacaagacgactaagcccaagccgtatatggcactgggaccggacttgaaaacgtacaatgtcttcaccgctacagataattcactccaccgacagcgtcgtcagctcgtcggacagatccttaccgacaagtcgatgcgagcgtttgagcctgtaatgatgcgcaaggtcgacgtactaatttccaacatactacactccgtacagcagggttcggatcttgacatatccgaagagtcacgacgacttggcttcgatattgctggcgagctggcattcggatacgatttgaaactccaaacggagcagacgaaccgatttatgctcacagtgctcacggaggggacattttggagcagcgtatttctacattatccctttgcccgaaatttcagcttcggactcattctggtcaagatattccgggtactcggagaggcatacctggcgctagtgcaaaaaatgattgactcgcgcatgattgagagagtcgacactaagcacgacttattctctcgcattgcgcctgcactgaaggttgatagtgcgaagggtggtctccgtgagagcgaactatgggccgaggcaaatttgttcttcacagcagcgggagatacagtcaagaccgcgattagtgctgtgtttttctaccttgctcgcaacgaaacagcgtatcagaagctcgcgacagagatccgaacatcattcaaaagtgcagccgacattaattcagtggcggtcgcaaaatgtccgtacctccgagcgtctatagacgaagctctacgcctgtcacctccggcacctggagttttgtggcgggagcagacctctccaggaccaccactcgttgttgatggctatgtgatcccaaatggcacaatggttggtgtgaacatatactctctacaccacaacgaagagtattttcccgagtcattcgaatacaggccagaacgctggctcgatgagcgaagcccggatgcgattcgagtcatgcgggatgcattcatgcctttctcgactggcccgcgaggatgcgcagggaaaacaatggcatatatagagaccagtcttgttgtcgccaaaatcctctggtatttcgacttccgaatgcctacaggtagtagaggtagggtcggggaagggagtccagatctcgaaccaggcagacagagacgtaacgagtttcagacatatgatgtcttctcctcgatgcatgaagggccgtacttgacgttcgaaacgcgcggtggctattggaacgagctgccatag

SEQ ID NO: 37914 - protein, 519 aa, Muscodor strobelii
  misc_feature: SGI Peptide ID NO. 573166
  misc_feature (33)..(489): Pfam Id: PF00067 Pfam Desc: Cytochrome P450
  misc_feature (294)..(470): Pfam Id: PF00067 Pfam Desc: Cytochrome P450
  misc_feature (19)..(511): NCBI GI: 255954725 Blast Desc: Pc21g10830 [Penicillium chrysogenum Wisconsin 54-1255] gi|211589826|emb|CAP95980.1| Pc21g10830 [Penicillium chrysogenum Wisconsin 54-1255]
  misc_feature (16)..(511): NCBI GI: 121710976 Blast Desc: benzoate 4-monooxygenase cytochrome P450 [Aspergillus clavatus NRRL 1] gi|119401254|gb|EAW11678.1| benzoate 4-monooxygenase cytochrome P450 [Aspergillus clavatus NRRL 1]
  misc_feature (11)..(511): NCBI GI: 145256217 Blast Desc: An10g00660 [Aspergillus niger CBS 513.88] gi|134078632|emb|CAK40505.1| protein product [Aspergillus niger]
  misc_feature (22)..(512): NCBI GI: 154313085 Blast Desc: BC1G_05544 [Botryotinia fuckeliana B05.10] gi|150849629|gb|EDN24822.1| BC1G_05544 [Botryotinia fuckeliana B05.10]
  misc_feature (28)..(511): NCBI GI: 121712150 Blast Desc: benzoate 4-monooxygenase cytochrome P450 [Aspergillus clavatus NRRL 1] gi|119401842|gb|EAW12264.1| benzoate 4-monooxygenase cytochrome P450 [Aspergillus clavatus NRRL 1]
  misc_feature (27)..(511): NCBI GI: 212529440 Blast Desc: benzoate 4-monooxygenase cytochrome P450, [Penicillium marneffei ATCC 18224] gi|210074275|gb|EEA28362.1| benzoate 4-monooxygenase cytochrome P450, [Penicillium marneffei ATCC
  misc_feature (25)..(511): NCBI GI: 242771379 Blast Desc: cytochrome P450, [Talaromyces stipitatus ATCC 10500] gi|218721449|gb|EED20867.1| cytochrome P450, [Talaromyces stipitatus ATCC 10500]
  misc_feature (16)..(511): NCBI GI: 169782556 Blast Desc: [Aspergillus oryzae RIB40] gi|83774484|dbj|BAE64607.1| protein product [Aspergillus oryzae]
  misc_feature (16)..(511): NCBI GI: 238492179 Blast Desc: cytochrome P450, [Aspergillus flavus NRRL3357] gi|220695820|gb|EED52162.1| cytochrome P450, [Aspergillus flavus NRRL3357]
  misc_feature (1)..(511): NCBI GI: 85092131 Blast Desc: NCU06895 [Neurospora crassa OR74A] gi|28920645|gb|EAA30006.1| conserved [Neurospora crassa OR74A]
  misc_feature (34)..(466): SWISSPROT Homolog: EC 1.14.13.12 Benzoate 4-monooxygenase
  misc_feature: Useful for introducing or modulating the production of volatile compounds
MWLSVSDSSGALVRGAIVLSATLFITYRVLLHPLRLYPGPWLAKLTNAYNGYHAFRQHLHIRTYLNHRKYGSVVRQGPNKLVFNTVTAVRDIYRTDKTTKPKPYMALGPDLKTYNVFTATDNSLHRQRRQLVGQILTDKSMRAFEPVMMRKVDVLISNILHSVQQGSDLDISEESRRLGFDIAGELAFGYDLKLQTEQTNRFMLTVLTEGTFWSSVFLHYPFARNFSFGLILVKIFRVLGEAYLALVQKMIDSRMIERVDTKHDLFSRIAPALKVDSAKGGLRESELWAEANLFFTAAGDTVKTAISAVFFYLARNETAYQKLATEIRTSFKSAADINSVAVAKCPYLRASIDEALRLSPPAPGVLWREQTSPGPPLVVDGYVIPNGTMVGVNIYSLHHNEEYFPESFEYRPERWLDERSPDAIRVMRDAFMPFSTGPRGCAGKTMAYIETSLVVAKILWYFDFRMPTGSRGRVGEGSPDLEPGRQRRNEFQTYDVFSSMHEGPYLTFETRGGYWNELP

SEQ ID NO: 37915 - DNA, 2083 bp, Muscodor strobelii
  misc_feature: SGI EST ID NO. CUFF.90862.1
  misc_feature: Variant of the nucleotide sequence at SEQ ID NO 37913
aacgaggcatcgccagatatttaagtagctatgattattggttattaaaatgcaacctccttgcttgggctcgctcctgataaccaattctaatttctgacgcccagctgcatgtttcacaccagccgatgtcgattaactggcaaactagtatgtggctatccgtcagtgacagttccggcgcgcttgtgcgaggagcaattgtgctatcggcgacgctttttattacttaccgcgtgttgctacacccactacgcttgtatcccggcccgtggctcgccaaacttacaaatgcgtataatggctatcatgcgtttcgccaacatctacatattcgtacttacttgaatcatcgaaaatacggttccgttgttcggcaaggtcccaataaactggtgttcaacacggtcacagctacatataccgaacagacaagacgactaagcccaagccgtatatggcactgggaccggacttgaaaacgtacaatgtcttcaccgctacagataattcactccaccgacagcgtcgtcagctcgtcggacagatccttaccgacaagtcgatgcgagcgtttgagcctgtaatgatgcgcaaggtcgacgtactaatttccaacatactacactccgtacagcagggttcggatcttgacatatccgaagagtcacgacgacttggcttcgatattgctggcgagctggcattcggatacgatttgaaactccaaacggagcagacgaaccgatttatgctcacagtgctcacggaggggacattttggagcagcgtatttctacattatccctttgcccgaaatttcagcttcggactcattctggtcaagatattccgggtactcggagaggcatacctggcgctagtgcaaaaaatgattgactcgcgcatgattgagagagtcgacactaagcacgacttattctctcgcattgcgcctgcactgaaggttgatagtgcgaagggtggtctccgtgagagcgaactatgggccgaggcaaatttgttcttcacagcagcgggagatacagtcaagaccgcgattagtgctgtgtttttctaccttgctcgcaacgaaacagcgtatcagaagctcgcgacagagatccgaacatcattcaaaagtgcagccgacattaattcagtggcggtcgcaaaatgtccgtacctccgagcgtctatagacgaagctctacgcctgtcacctccggcacctggagttttgtggcgggagcagacctctccaggaccaccactcgttgttgatggctatgtgatcccaaatggcacaatggttggtgtgaacatatactctctacaccacaacgaagagtattttcccgagtcattcgaatacaggccagaacgctggctcgatgagcgaagcccggatgcgattcgagtcatgcgggatgcattcatgcctttctcgactggcccgcgaggatgcgcagggaaaacaatggcatatatagagaccagtcttgttgtcgccaaaatcctctggtatttcgacttccgaatgcctacaggtagtagaggtagggtcggggaagggagtccagatctcgaaccaggcagacagagacgtaacgagtttcagacatatgatgtcttctcctcgatgcatgaagggccgtacttgacgttcgaaacgcgcggtggctattggaacgagctgccatagtgatccctgaaggcagttcggtattagccacgaatacggctgtccacttacttgatattttctcaaagcgccccagcggtgtcgccgtatttgcctagcctggagatgattgagagctgtacaagtgtagctgaaatggatgggccatccacggcactttatctctttatcataagtgatctaggccgatgtattctgatatacagggatcatgattgttagaccacgttggtcaactgtaacttccaagccatcaatctgtatacactgttacttgtcaattgtacccacttggcgttgtgtacgagacgactggaatgatcagaagctacttaggaacaatagcatccaatacagcttggagatgatgatactttc

SEQ ID NO: 37916 - DNA, 456 bp, Muscodor strobelii
  misc_feature: SGI cDNA ID NO. 573167
  misc_feature: Encodes the peptide sequence at SEQ ID NO 37917
atgagacttgcgaaggccgatgaaagcaatgtagaatccttctgctcgtccctgatcacggtgggcgacttcatcggaagctccttcaagaaggccggcgaatttctcgcggacgtggccaaagttgggctaccgctgcttctaggcaccgaggccgaggcattcgcgcctatcccgacgcctaagaccgacctggatcctctcgcccatagagccgtcgtcgacgaggcgtgcctgcagtcattcgtacagctgcgcactgaactcaatctgaagggcaaattcttcaaggacatgttgggcaaggttcgagatctaggtccgaagcttatcaacgtgggcccttatgcggtaaaattggtgggtccgattgtaggtgatatcctgcgcgagaacgatgaaaagaagagggcgtccgagaagaagcaggaatttttggacttcacctggaattaa

SEQ ID NO: 37917 - protein, 151 aa, Muscodor strobelii
  misc_feature: SGI Peptide ID NO. 573167
MRLAKADESNVESFCSSLITVGDFIGSSFKKAGEFLADVAKVGLPLLLGTEAEAFAPIPTPKTDLDPLAHRAVVDEACLQSFVQLRTELNLKGKFFKDMLGKVRDLGPKLINVGPYAVKLVGPIVGDILRENDEKKRASEKKQEFLDFTWN

SEQ ID NO: 37918 - DNA, 1482 bp, Muscodor strobelii
  misc_feature: SGI cDNA ID NO. 573168
  misc_feature: Encodes the peptide sequence at SEQ ID NO 37919
atgtatcaatcaatctttgaagacatgatcacatcattcctggtactgagcggtataatcttcgctcaggatgtgatggcaacaggtaacagagaaagccccaacgaagagattaaatatttcaaacagcgagtatatcacgaccgggctaccaacgacagccgcacattccaacaacgatataagctatctcttgaccactacaaggagggaggacccatattcttcgtccacagcccgcaaagcaatatcaccgatctctactattatgattttgccgaccacgccaaggagctagggggtattgttaccactctagagcaccgatattttggcgaaagcttccccgaaggtttcaaccacgacaaaccgagtgcggaagactatgaatcagtgactctggagaactacgtccaagatgtcgttgaattcatcaactgggtaaagaacaccgttccaggtgcacatgacagcaagattttcaatactggcgggtcctacggcggcttcattactatgatgtcaaagattctggcaccggataccttctacggatcattcgcatcatcgacacctgtgcaatcttgggggagtcagggtatcgagggcaacccgctcgcctacgccggtcaggatgcaatttcaaatgcctttttcgacgagtccttggaggcagcaaccaaaatcagagacgccttggctgtcttggacaaatgcgtcacagaatccaactgcgatgcagctataccggacatcaacttctgcggcaatgtcacagcagaacaatggctaaacatatatacgaccttgatcggcacctacgttatgcttcccgccttcaactacgctattcccggcgtcatctttcgcgacgccaagccaatgacagtggctgtcaataaaacattggctgctaagaccgttggcgagattctgcaaattcctttgttaataaggttgttggcgaatgatacggattgcgtcgatgccgacgacccagtaatcagcggaccgcagcagacgacaaacacaggagacgcattcgcatacattcagtgtcgctattacccctacaatcttaacggcgtccggccgggcggcctgtttactccttcaaacggcaccatttcatgtcccgtcgctgactgggcagcggaagacttcaacgcgacgagccagcattggaatgagaaatttcataccacgacagaggaactaaaccaggttcaacgcttgattattatccaaggctcatacgacagtgtctctggtattggctcgccggatctagagttgtccgcagatcgtgaccactcgaggctcctgttcatcgcgggcaacccgcatggcgaggatttgtactcgaatacttatcaaccacgtggtttgaaccctaataccgacagggttcgggatatcaagttgggctacattaaacactggctcgggcttgataatgcaacaaatgatacctgcccatag

SEQ ID NO: 37919 - protein, 493 aa, Muscodor strobelii
  misc_feature: SGI Peptide ID NO. 573168
  misc_feature (43)..(470): Pfam Id: PF05577 Pfam Desc: Serine carboxypeptidase S28
  misc_feature (52)..(116): Pfam Id: PF05577 Pfam Desc: Serine carboxypeptidase S28
  misc_feature (39)..(329): NCBI GI: 198425804 Blast Desc: : similar to Dipeptidyl-peptidase 2 precursor (Dipeptidyl-peptidase II) (DPP II) (Dipeptidyl aminopeptidase II) (Quiescent cell proline dipeptidase) (Dipeptidyl peptidase 7)
  misc_feature (37)..(482): NCBI GI: 195997817 Blast Desc: TRIADDRAFT_19181 [Trichoplax adhaerens] gi|190589553|gb|EDV29575.1| TRIADDRAFT_19181 [Trichoplax adhaerens]
  misc_feature (38)..(282): NCBI GI: 32967631 Blast Desc: Prcp protein [Mus musculus] gi|74147590|dbj|BAE38679.1| protein product [Mus musculus]
  misc_feature (38)..(282): NCBI GI: 33469015 Blast Desc: prolylcarboxypeptidase precursor [Mus musculus] gi|68565642|sp|Q7TMR0.2|PCP_MOUSE RecName: Full=Lysosomal Pro-X carboxypeptidase; AltName: Full=Prolylcarboxypeptidase; AltName:
  misc_feature (38)..(282): NCBI GI: 20072291 Blast Desc: Prcp protein [Mus musculus]
  misc_feature (38)..(282): NCBI GI: 166064014 Blast Desc: prolylcarboxypeptidase [Rattus norvegicus]
  misc_feature (38)..(193): NCBI GI: 194213387 Blast Desc: : prolylcarboxypeptidase (angiotensinase C) [Equus caballus]
  misc_feature (12)..(195): NCBI GI: 193577889 Blast Desc: : similar to prolylcarboxypeptidase, [Acyrthosiphon pisum]
  misc_feature (40)..(193): NCBI GI: 47209068 Blast Desc: protein product [Tetraodon nigroviridis]
  misc_feature (34)..(193): NCBI GI: 118404640 Blast Desc: prolylcarboxypeptidase [Xenopus (Silurana) tropicalis] gi|115313632|gb|AAI23913.1| prolylcarboxypeptidase (angiotensinase C) [Xenopus (Silurana) tropicalis]
  misc_feature (38)..(282): SWISSPROT Homolog: EC 3.4.16.2 Lysosomal Pro-Xaa carboxypeptidase
MYQSIFEDMITSFLVLSGIIFAQDVMATGNRESPNEEIKYFKQRVYHDRATNDSRTFQQRYKLSLDHYKEGGPIFFVHSPQSNITDLYYYDFADHAKELGGIVTTLEHRYFGESFPEGFNHDKPSAEDYESVTLENYVQDVVEFINWVKNTVPGAHDSKIFNTGGSYGGFITMMSKILAPDTFYGSFASSTPVQSWGSQGIEGNPLAYAGQDAISNAFFDESLEAATKIRDALAVLDKCVTESNCDAAIPDINFCGNVTAEQWLNIYTTLIGTYVMLPAFNYAIPGVIFRDAKPMTVAVNKTLAAKTVGEILQIPLLIRLLANDTDCVDADDPVISGPQQTTNTGDAFAYIQCRYYPYNLNGVRPGGLFTPSNGTISCPVADWAAEDFNATSQHWNEKFHTTTEELNQVQRLIIIQGSYDSVSGIGSPDLELSADRDHSRLLFIAGNPHGEDLYSNTYQPRGLNPNTDRVRDIKLGYIKHWLGLDNATNDTCP

SEQ ID NO: 37920 - DNA, 1071 bp, Muscodor strobelii
  misc_feature: SGI cDNA ID NO. 573169
  misc_feature: Encodes the peptide sequence at SEQ ID NO 37921
atggcacgacttgtgcacgaacccaatacgtcgaggcgtgcctctaatccggacaacatacacgatctcagccgcttgctgtccagattgcaggagaacatcctgcatgccaacgcggggagggaacgcaggttgcgccagagcgaatacgagcgcaacaaggccagcattaacctcgaatacgcccggacactccttacgaaactcgaacaggatgctctgtcaatcaagatccagtctaagcggcaggaacggcagatggatctcaatcagaagcgagaaatctacgagcaggtatcggaacgactgagagaactcgaggacctggcagatagcgacagtgacagcgacgagggcgaggatgtgcttgccggtatcgtcataaatacaccgagccagagctcaggagatatcggtgaacgagacgtcgaggcagagatcagcgatctagcagatgaggacgaaggcgagaccacagtgctctacagccctagaatacaggaagctgagcccgccacgtattcgagacctcccgagccgcgagccacgactacagcgacagccacaactaccgaaccctcacttcgctcccgcggtgtcgcgtcgcagtcacaggcccaaccaccacaccacacagacccatatcaagacacagcaacaacaaccggcacctcacagccccaaacccagtcccacctacgatcctcctacctcacaacaccccccacaactgccctgtcgaccgaaacaacagaagccattctcgacaaccagcgagaagaacaagaccagctcacactagagatggtcactatggcgcagcagctgaaagcagcatccaaggcattcgagaaatctttacaggaagatgccgatgcgcttaatgctgcgagccgcggcatagatcagagcggggatagcattggcagcgtgagcggtagcatgaagaccctcagtaaactgacggagggtaagggctggattggcagaatgttgctttatgcacagattgccgggctgagcgtgttcttggttctgcttgtttttgtttttcctaaattgaggttttag

SEQ ID NO: 37921 - protein, 356 aa, Muscodor strobelii
  misc_feature: SGI Peptide ID NO. 573169
  misc_feature (22)..(356): NCBI GI: 145602095 Blast Desc: MGG_12919 [Magnaporthe grisea 70-15] gi|145010537|gb|EDJ95193.1| MGG_12919 [Magnaporthe grisea 70-15]
  misc_feature (1)..(356): NCBI GI: 261358145 Blast Desc: synaptobrevin [Verticillium albo-atrum VaMs.102]
  misc_feature (31)..(356): NCBI GI: 171687040 Blast Desc: protein product [Podospora anserina] gi|170943481|emb|CAP69134.1| protein product [Podospora anserina]
  misc_feature (18)..(335): NCBI GI: 85079717 Blast Desc: NCU00184 [Neurospora crassa OR74A] gi|28917470|gb|EAA27171.1| [Neurospora crassa OR74A]
  misc_feature (1)..(356): NCBI GI: 46122323 Blast Desc: FG05539.1 [Gibberella zeae PH-1]
  misc_feature (23)..(356): NCBI GI: 240109727 Blast Desc: CPC735_032320 [Coccidioides posadasii C735 delta SOWgp]
  misc_feature (15)..(356): NCBI GI: 70995856 Blast Desc: conserved [Aspergillus fumigatus Af293] gi|42820716|emb|CAF32029.1| [Aspergillus fumigatus] gi|66850318|gb|EAL90645.1| conserved [Aspergillus fumigatus
  misc_feature (22)..(356): NCBI GI: 119183887 Blast Desc: CIMG_06819 [Coccidioides immitis RS]
  misc_feature (22)..(356): NCBI GI: 189207677 Blast Desc: synaptobrevin [Pyrenophora tritici-repentis Pt-1C-BFP] gi|187976265|gb|EDU42891.1| synaptobrevin [Pyrenophora tritici-repentis Pt-1C-BFP]
  misc_feature (15)..(356): NCBI GI: 119495320 Blast Desc: NFIA_012390 [Neosartorya fischeri NRRL 181] gi|119412609|gb|EAW22550.1| conserved [Neosartorya fischeri NRRL 181]
MARLVHEPNTSRRASNPDNIHDLSRLLSRLQENILHANAGRERRLRQSEYERNKASINLEYARTLLTKLEQDALSIKIQSKRQERQMDLNQKREIYEQVSERLRELEDLADSDSDSDEGEDVLAGIVINTPSQSSGDIGERDVEAEISDLADEDEGETTVLYSPRIQEAEPATYSRPPEPRATTTATATTTEPSLRSRGVASQSQAQPPHHTDPYQDTATTTGTSQPQTQSHLRSSYLTTPPTTALSTETTEAILDNQREEQDQLTLEMVTMAQQLKAASKAFEKSLQEDADALNAASRGIDQSGDSIGSVSGSMKTLSKLTEGKGWIGRMLLYAQIAGLSVFLVLLVFVFPKLRF

SEQ ID NO: 37922 - DNA, 1348 bp, Muscodor strobelii
  misc_feature: SGI EST ID NO. CUFF.90888.0
  misc_feature: Variant of the nucleotide sequence at SEQ ID NO 37920
ccactttccccaaatcgcatgcaccaaacagtcacctcgacatccgaaacatgcagaacatcccaaacaaacaaacctcatcctacgtcctacagacaccatctacagaccctgaaatattctgcgatggcacgacttgtgcacgaacccaatacgtcgaggcgtgcctctaatccggacaacatacacgatctcagccgcttgctgtccagattgcaggagaacatcctgcatgccaacgcggggagggaacgcaggttgcgccagagcgaatacgagcgcaacaaggccagcattaacctcgaatacgcccggacactccttacgaaactcgaacaggatgctctgtcaatcaagatccagtctaagcggcaggaacggcagatggatctcaatcagaagcgagaaatctacgagcaggtatcggaacgactgagagaactcgaggacctggcagatagcgacagtgacagcgacgagggcgaggatgtgcttgccggtatcgtcataaatacaccgagccagagctcaggagatatcggtgaacgagacgtcgaggcagagatcagcgatctagcagatgaggacgaaggcgagaccacagtgctctacagccctagaatacaggaagctgagcccgccacgtattcgagacctcccgagccgcgagccacgactacagcgacagccacaactaccgaaccctcacttcgctcccgcggtgtcgcgtcgcagtcacaggcccaaccaccacaccacacagacccatatcaagacacagcaacaacaaccggcacctcacagccccaaacccagtcccacctacgatcctcctacctcacaacaccccccacaactgccctgtcgaccgaaacaacagaagccattctcgacaaccagcgagaagaacaagaccagctcacactagagatggtcactatggcgcagcagctgaaagcagcatccaaggcattcgagaaatctttacaggaagatgccgatgcgcttaatgctgcgagccgcggcatagatcagagcggggatagcattggcagcgtgagcggtagcatgaagaccctcagtaaactgacggagggtaagggctggattggcagaatgttgctttatgcacagattgccgggctgagcgtgttcttggttctgcttgtttttgtttttcctaaattgaggttttagggtgggagagcgtggatatcatcgttgggggacgagatgagaaaggagccgggagggaatgggattgctagagtgtatgagttatgaatgaaatgcttgcatgaataaaacaaaaataatgacaatattgatatgaggcgtgagctttgat

SEQ ID NO: 37923 - DNA, 645 bp, Muscodor strobelii
  misc_feature: SGI cDNA ID NO. 573170
  misc_feature: Encodes the peptide sequence at SEQ ID NO 37924
atggatgccagtcaaggactcgcgctcgatcggcgttatgatggcgaagaccctactaccatcgcagctgtcggagttatcgtggtcgtgatcgctttgcttgccgtagcgctgcgattctacacgagatattacgtcaaagtcaggttccaatgggacgactggttcatactgttggcattatttggtacccttgggtcggaagccctggtgtttgtcgctgctgcgggacaggacaatgtgacgttcgtcgccgaactcgggtggatcgcatctgtgaactacttcttcgtcatatgcgccattaagctatcgttactatgtctataccatcgcatcttctcagttgatgatgcgttccgacgtcaagtcatcattgtttccgtggcagtcgttgggttttggatagggtcaactgttgccaaccttaccagctgcattccgattaggtaccagtggattaatcacgacctcgacccgaggtactgcttcaacttcaattacttctggcttgcgactggcataatcgaggtcatatttgacgtcatactacttatcatgcctatgaggatggtcaagaagctgcagatgaacgagacgaagaaagttgccgtgggattggtcttcttcgtcggtattttgtag

SEQ ID NO: 37924 - protein, 214 aa, Muscodor strobelii
  misc_feature: SGI Peptide ID NO. 573170
  misc_feature (19)..(213): NCBI GI: 156032776 Blast Desc: SS1G_13793 [Sclerotinia sclerotiorum 1980] gi|154699196|gb|EDN98934.1| SS1G_13793 [Sclerotinia sclerotiorum 1980]
  misc_feature (8)..(214): NCBI GI: 115491041 Blast Desc: [Aspergillus terreus NIH2624] gi|114197008|gb|EAU38708.1| [Aspergillus terreus NIH2624]
  misc_feature (1)..(212): NCBI GI: 261358818 Blast Desc: conserved [Verticillium albo-atrum VaMs.102]
  misc_feature (19)..(212): NCBI GI: 154301684 Blast Desc: BC1G_10169 [Botryotinia fuckeliana B05.10] gi|150855831|gb|EDN31023.1| BC1G_10169 [Botryotinia fuckeliana B05.10]
  misc_feature (16)..(214): NCBI GI: 169596064 Blast Desc: SNOG_00781 [Phaeosphaeria nodorum SN15] gi|111071156|gb|EAT92276.1| SNOG_00781 [Phaeosphaeria nodorum SN15]
  misc_feature (19)..(212): NCBI GI: 154311957 Blast Desc: BC1G_06012 [Botryotinia fuckeliana B05.10] gi|150850662|gb|EDN25855.1| BC1G_06012 [Botryotinia fuckeliana B05.10]
  misc_feature (3)..(212): NCBI GI: 256724727 Blast Desc: NECHADRAFT_84327 [Nectria haematococca mpVI 77-13-4]
  misc_feature (31)..(212): NCBI GI: 256719955 Blast Desc: NECHADRAFT_89467 [Nectria haematococca mpVI 77-13-4]
  misc_feature (21)..(212): NCBI GI: 115395874 Blast Desc: conserved [Aspergillus terreus NIH2624] gi|114193145|gb|EAU34845.1| conserved [Aspergillus terreus NIH2624]
  misc_feature (15)..(212): NCBI GI: 239612727 Blast Desc: conserved [Ajellomyces dermatitidis ER-3]
MDASQGLALDRRYDGEDPTTIAAVGVIVVVIALLAVALRFYTRYYVKVRFQWDDWFILLALFGTLGSEALVFVAAAGQDNVTFVAELGWIASVNYFFVICAIKLSLLCLYHRIFSVDDAFRRQVIIVSVAVVGFWIGSTVANLTSCIPIRYQWINHDLDPRYCFNFNYFWLATGIIEVIFDVILLIMPMRMVKKLQMNETKKVAVGLVFFVGIL

SEQ ID NO: 37925 - DNA, 1503 bp, Muscodor strobelii
  misc_feature: SGI cDNA ID NO. 573171
  misc_feature: Elevated expression when VOC is produced
  misc_feature: Encodes the peptide sequence at SEQ ID NO 37926
atgactgagcgaaaacttccaaagacgacatcaacaacgtacctgaacggaataagaggcttggcgtgttggatcgtcttcaacgagcatatgactatggagaaataccgttcattcatattcaagccatacggagcagttgacgatggcaagaagctcgaacactttattcagttacctttcgtacgagccttgatagccgggaaaggcatggtatgcgtattcttcgtattatcgggattcgtattgtcgtactcgtccctgcgcaagatcaacgatcccgacagggcgaataaacaagagaaaaccggcaatgacctgctaacgagtgtttcatcaatgacactgcgtcgcgctatacgtctatttggacctatgttggcactggctttcatcacggcattggtcacgaagtacataccttggggcgatggcgacccaaaagcgccgaatctcttccgccatctttggaaattctggctctctgcgacaaccgtcatggatccttaccattggccaaaactcaggcccctaccacgccattatgcacaggcctggactctaggtgtagagtaccgactatcattagtcatgttcctgatgatagctacgacttcaacgctgtctacaatcggccgaaagacagtcatcatcttcgtcgcattctggtctgtctattgtgctcgccgatgggatgtggcgtgcgcaatgggtggtatgctactagccgaactacgatttgcacctttggcagatgatatatctcgagttttcaaccgaccggttcgtctgagcagatggttcactctcataccagccgtagtctgcgtgctcctcggcatcttgttttgcagctggccggaatcgaagccgcatggtgcaaacccgtacacgttcttctggcagttcactcccaagacctggcgccccgattctggtcacggttctcctgagcctgttgggggatgggtttggtggtggggcaccataggtgctttcatgttgctctgggggcttgaacaactgccaacattgcaaaagcctctatctatcgctcctctcaagtaccttggcgagattagttatgcatattatttattgcaaggcctcggacgcacacatgtggccgatcctgtctacaacgttttacaggacaactggggctattccaaaactagcgctttcgtcattgcatatatcattggcaacgtttttaacataatagcatcagactacttctggcgggtcattgacgagtcattcatccgtctagcacgattcgtcgttgtggactttctgggtgtaggaaagccagttggtactcgttccagaaatggtccacatccagctgtcacctatgcgccagtgccgaccaccgtgccaaccgccaacaacgagctctctgcacccgaaagctttgctctagaggacgacaacatcgctatgaaagagtttgccgatggtgagaatgatagcgggtatatgagacatagaagccattga

SEQ ID NO: 37926 - protein, 500 aa, Muscodor strobelii
  misc_feature: SGI Peptide ID NO. 573171
  misc_feature (8)..(428): NCBI GI: 238491494 Blast Desc: acyltransferase, [Aspergillus flavus NRRL3357] gi|220697397|gb|EED53738.1| acyltransferase, [Aspergillus flavus NRRL3357]
  misc_feature (8)..(428): NCBI GI: 169773507 Blast Desc: [Aspergillus oryzae RIB40] gi|83769083|dbj|BAE59220.1| protein product [Aspergillus oryzae]
  misc_feature (8)..(428): NCBI GI: 70994264 Blast Desc: acyltransferase [Aspergillus fumigatus Af293] gi|66849608|gb|EAL89936.1| acyltransferase, [Aspergillus fumigatus Af293] gi|159125113|gb|EDP50230.1| acyltransferase,
  misc_feature (8)..(428): NCBI GI: 119500826 Blast Desc: acyltransferase, [Neosartorya fischeri NRRL 181] gi|119415335|gb|EAW25273.1| acyltransferase, [Neosartorya fischeri NRRL 181]
  misc_feature (15)..(428): NCBI GI: 145241818 Blast Desc: An09g02410 [Aspergillus niger] gi|134078096|emb|CAK40178.1| protein product [Aspergillus niger]
  misc_feature (8)..(434): NCBI GI: 67522479 Blast Desc: AN1696.2 [Aspergillus nidulans FGSC A4] gi|40745660|gb|EAA64816.1| AN1696.2 [Aspergillus nidulans FGSC A4] gi|259487037|tpe|CBF85387.1| TPA: acyltransferase, nidulans
  misc_feature (8)..(426): NCBI GI: 255940642 Blast Desc: Pc16g07650 [Penicillium chrysogenum Wisconsin 54-1255] gi|211585713|emb|CAP93435.1| Pc16g07650 [Penicillium chrysogenum Wisconsin 54-1255]
  misc_feature (8)..(434): NCBI GI: 115397867 Blast Desc: conserved [Aspergillus terreus NIH2624] gi|114192716|gb|EAU34416.1| conserved [Aspergillus terreus NIH2624]
  misc_feature (5)..(428): NCBI GI: 121707144 Blast Desc: acyltransferase, [Aspergillus clavatus NRRL 1] gi|119399893|gb|EAW10319.1| acyltransferase, [Aspergillus clavatus NRRL 1]
  misc_feature (3)..(426): NCBI GI: 85117484 Blast Desc: NCU08366 [Neurospora crassa OR74A] gi|28927075|gb|EAA36033.1| conserved [Neurospora crassa OR74A]
  misc_feature: Useful for introducing or modulating the production of volatile compounds
MTERKLPKTTSTTYLNGIRGLACWIVFNEHMTMEKYRSFIFKPYGAVDDGKKLEHFIQLPFVRALIAGKGMVCVFFVLSGFVLSYSSLRKINDPDRANKQEKTGNDLLTSVSSMTLRRAIRLFGPMLALAFITALVTKYIPWGDGDPKAPNLFRHLWKFWLSATTVMDPYHWPKLRPLPRHYAQAWTLGVEYRLSLVMFLMIATTSTLSTIGRKTVIIFVAFWSVYCARRWDVACAMGGMLLAELRFAPLADDISRVFNRPVRLSRWFTLIPAVVCVLLGILFCSWPESKPHGANPYTFFWQFTPKTWRPDSGHGSPEPVGGWVWWWGTIGAFMLLWGLEQLPTLQKPLSIAPLKYLGEISYAYYLLQGLGRTHVADPVYNVLQDNWGYSKTSAFVIAYIIGNVFNIIASDYFWRVIDESFIRLARFVVVDFLGVGKPVGTRSRNGPHPAVTYAPVPTTVPTANNELSAPESFALEDDNIAMKEFADGENDSGYMRHRSH

SEQ ID NO: 37927 - DNA, 3944 bp, Muscodor strobelii
  misc_feature: SGI EST ID NO. CUFF.90853.0
  misc_feature: Variant of the nucleotide sequence at SEQ ID NO 37925
agaaatggtaccgttttgctactctaaccaaatggttgagtgtcgaggtgagacaagaaaacagtgacaaattccgactccgaacactacgaaattcagtaccgaagttgtgtcactattttcttgacccgccttgaatgtttcctgcattcggtcttattccgcgatcagtctttcttggcgaaccccatcaactgcgcttggcgttggcgccataatcaaagcagctgaaggacagtgatcgcagttaccgagcagatggatcatcccagtcgttctcattggccatatttcacgtcagcgggcgagcgaggttcgatagggcaggccgtggcttgcctcgaccctagcctgaggggcttggaacaagggacccatcaaaggatcttactgcgaaatgttttccttgctgcctcagctacctcgagtatatcgacatcacgcaatttcatatatcggtgcaacaccgcaatcatgggttccgagagacgtttctcgtatagacggtacacctttcgctaggcattttgccaatagtgagcgcggcgagttcaatgcgacgcctgcgcaattgtccaccagtagacctacacgtggccacgatgtcttattctcgtccccacttcccacagatagatcatctgacatcatttccgtgaatatctcaacacgagccatcataaggaattttctggtacaaatctcacaggactgacccgcgcttagcttgtcctccatcaggggtcatgatgcgagaattatttgacgacagggagtcgggtgacaaaccggcgtaacagtagatctgcaggcatatttgctttaaaggacgtatccgcatagtgatgatcgctcgtaggtactgtcatgtctgacttggtcctcgggttagtctctggcctaacgtttgacggttctgcggagttggctttgtctaagccgagctgaaatcgcgggctgagaccgacgtctattactgagtatagcaatccgccaagcaagccatcatttcttatggttgttgatgagttgcctatgccagtaaaatcttcttagttttgatttcttttgcttctcttctcccaattctctccccgggtttcttgtctctcgttaactaccgggctctctcattccatgatacaatctctcacaatggaccgtataagacgatgggtaaagagcttcggtggccaaaaccgtcgatatgaggaggccttgcccctcaccggatgcgaaccacagtcaatgagtgatgtttggatacgccgatcccgcgaaaacacatgggtacgatggttgatatttctaactccgttctgcattgcccggccactggatatgactgagcgaaaacttccaaagacgacatcaacaacgtacctgaacggaataagaggcttggcgtgttggatcgtcttcaacgagcatatgactatggagaaataccgttcattcatattcaagccatacggagcagttgacgatggcaagaagctcgaacactttattcagttacctttcgtacgagccttgatagccgggaaaggcatggtatgcgtattcttcgtattatcgggattcgtattgtcgtactcgtccctgcgcaagatcaacgatcccgacagggcgaataaacaagagaaaaccggcaatgacctgctaacgagtgtttcatcaatgacactgcgtcgcgctatacgtctatttggacctatgttggcactggctttcatcacggcattggtcacgaagtacataccttggggcgatggcgacccaaaagcgccgaatctcttccgccatctttggaaattctggctctctgcgacaaccgtcatggatccttaccattggccaaaactcaggcccctaccacgccattatgcacaggcctggactctaggtgtagagtaccgactatcattagtcatgttcctgatgatagctacgacttcaacgctgtctacaatcggccgaaagacagtcatcatcttcgtcgcattctggtctgtctattgtgctcgccgatgggatgtggcgtgcgcaatgggtggtatgctactagccgaactacgatttgcacctttggcagatgatatatctcgagttttcaaccgaccggttcgtctgagcagatggttcactctcataccagccgtagtctgcgtgctcctcggcatcttgttttgcagctggccggaatcgaagccgcatggtgcaaacccgtacacgttcttctggcagttcactcccaagacctggcgccccgattctggtcacggttctcctgagcctgttgggggatgggtttggtggtggggcaccataggtgctttcatgttgctctgggggcttgaacaactgccaacattgcaaaagcctctatctatcgctcctctcaagtaccttggcgagattagttatgcatattatttattgcaaggcctcggacgcacacatgtggccgatcctgtctacaacgttttacaggacaactggggctattccaaaactagcgctttcgtcattgcatatatcattggcaacgtttttaacataatagcatcagactacttctggcgggtcattgacgagtcattcatccgtctagcacgattcgtcgttgtggactttctgggtgtaggaaagccagttggtactcgttccagaaatggtccacatccagctgtcacctatgcgccagtgccgaccaccgtgccaaccgccaacaacgagctctctgcacccgaaagctttgctctagaggacgacaacatcgctatgaaagagtttgccgatggtgagaatgatagcgggtatatgagacatagaagccattgaagatattcacgacacagactatcatcttatagtgtacttctgtcttgataccccctatgaagtctttcccggccgatgtgaacactaatgcagcatcatgccttcagatcacgcatgaatcgacttactagtcgggcataccgcgttcactcctctctagactacatatgaagattccataagctacaaaggaagagcttggagggatcggggagcggtgggggagtggtagacgtatcataccaggggtaatgcagatgcggatgttattcggcaaggcatcgttcggattaggaggtgtagcatgaccgaccgatatgatcttaaattcttcattgcgctgcttggtggactcaacatctcgatggcggaaccgagacatgatgatagcgagaaacgtagcagagcctgcaagacagcaagatggcttaccacgaagtccttcgatgccgccatgtacagtcaaatagtgtcgacgcaaccgattgaatgcgacagctattgttggacttcatacctacgcaacctggagtgtgcaaggattagaaaggatttggcgttgcggaaaaattcggcatgatagaaggctatagaggtagatgtatccaggcactctgcaatagaagatacagttggaagatcaatgttttgtattaaccgattcgctatctcaaccaaaatctcgctgttgaacagctacactcgccgaccaacccttcgccgttgatttcgtcctgtaactcgaagcatcatcatcgtgtgtatttttcctcacctcatctgtgtgacttgcttccgcctcagccgacgcactccgatattgaagttcaaacccgccttcaatccctgtctcgctccgagaagatgccggcgtcgcattccccaactccgcgtttcgcccgctcccactctggccactcttatccaccgaacgccatcccgcgcgatgattccagggtgtcgatttcgcggctcgcgggaatatccaccacaaggtcggaagacatgcacagatgatgcctgtgcccgtatgcactgtcgtccatatcttcgacccctctgctgccactgatcgctctccaggcgcgtagctcaacact

SEQ ID NO: 37928 - DNA, 1194 bp, Muscodor strobelii
  misc_feature: SGI cDNA ID NO. 573172
  misc_feature: Encodes the peptide sequence at SEQ ID NO 37929
atggcacccagccccgcccagccctatgtggcgaaggactcatccgcattgatgttcgcgccaaggtccattcaaaagagagcagtaaagccagaaactgcagtagattcgggcatcaatccttcgggctccagcgatgacaaaaggccggataaagccatgggagacgcccagaaaaatggccataagacagttgctatcgactctggaatcacattcccggacttggaccgctcgctcgccgttcagcttaacgcagacataacatcctctttgtactcttccaaccgaccaacagccatcatctatacgcacgccacggtaacatcgcctgccaagtatgccggtattgcactcgctattcaactattcaacggcttgcaagaggattgggctggaggcacttatcaggtctttgctattgctgcacctttaagtagagatgccggccaaaccattgcgcattattgcgcatatcgcgttgcttggagcatttcccagcagtggttcgcccgccacaagcgtcacgatacaccattccgcccaattcgattcgaagttgtttcgaactcgaaaacaacccagcagagattcaagaggctttttgagaatccaaaggggaacttatacggcagcctgcctgatgttttccacgggcccctcctcgatccgctacacctcttagagcggccttttggatatcagaagaagattccccttgctagcgagttcacaacgcgaagcccagaagtacggaccttgtgggggcctttagacgcgaatatagagggattagtgagggcaagctaccttggacactttggtgtagagtttgccaagcgtctagctaatacccacggcatcccacctgtccccgagattataccgctgtcttcgttcttgtctgagggaaagctcgacaggctcgacatgaaaatcgacaaaacacgagtcgaacccgcgagcatactccgcaccgtaggtgtacagtcggcatacaaagagttcctaacgtctattcacgcttccccggaggatcaaaccaagcatcgtaatgagactggcgataatcttgaagcagctctgaaagaggtacgagatggaagacgcgaatatactcccgaatatgattccgaaaacgatacccttatgcacgacaaagatgcccggaatgctccagaccttgtactatag

SEQ ID NO: 37929 - protein, 397 aa, Muscodor strobelii
  misc_feature: SGI Peptide ID NO. 573172
MAPSPAQPYVAKDSSALMFAPRSIQKRAVKPETAVDSGINPSGSSDDKRPDKAMGDAQKNGHKTVAIDSGITFPDLDRSLAVQLNADITSSLYSSNRPTAIIYTHATVTSPAKYAGIALAIQLFNGLQEDWAGGTYQVFAIAAPLSRDAGQTIAHYCAYRVAWSISQQWFARHKRHDTPFRPIRFEVVSNSKTTQQRFKRLFENPKGNLYGSLPDVFHGPLLDPLHLLERPFGYQKKIPLASEFTTRSPEVRTLWGPLDANIEGLVRASYLGHFGVEFAKRLANTHGIPPVPEIIPLSSFLSEGKLDRLDMKIDKTRVEPASILRTVGVQSAYKEFLTSIHASPEDQTKHRNETGDNLEAALKEVRDGRREYTPEYDSENDTLMHDKDARNAPDLVL

SEQ ID NO: 37930 - DNA, 1038 bp, Muscodor strobelii
  misc_feature: SGI cDNA ID NO. 573173
  misc_feature: Encodes the peptide sequence at SEQ ID NO 37931
atgatattgaacttggccactacgagctcagccagtctcttactacttcctagcctaaccgttgcacttcctcaccacccaaaccatgcgaaacgacagtccagtggcaagactgttgtctattggggccggggagccgacaatgacatatccaaatattgtacttctgatgctggcatagacatctttgttctttcgtttctgaacacgttcggcgatggagtgacgatcccaacgggcaacttcggagagtcctgtgttgttagtgctgcaggcgaaggacaaaattgcgacgccctatcctcatccatttccaactgccaagaagccggcatcgaggttttcttgtcgcttggtggcggtggtagtagagactacactgttagctcgcatgacgaggctgtctccattggcacctacctctggcaagcctatggtaacggtggcgcctacactgaaggcattccaagaccatttggtagcgtcgcagtagacggcttcgacttggatatcgaatatcacaccgactctagcgaagagcactatattactctcgtctcgactcttcgaagtgcttttagttcagacccgaacaaaacatatcgtgtctccgctgcaccagtatgtccaattcctgaccccagcatgggtgacataatccaaaatgcagagttcgactacatctggccgcagttctacaacagcaactacggtaacgcatgtgccttgcccgtcaatggcaatccgcctctcaattacgatgaatgggccgacttcaccaccggtactccttcagctaacgtggcgcttttcatgggtgtacccgcatcagaagaagcagcaactggcgaccagaccggtgcgcattactacgccacccccgatgagcttgccgagatcgtcagcgactacacgtcccacgagcggttcgccggtgtcatgatgtggagctcagattggtcaaataagaatgttgtaaacggctgcaccgtgcgagtgaaagaccgtgtcgtaccggaacgtagctatctacaatag

SEQ ID NO: 37931 - protein, 345 aa, Muscodor strobelii
  misc_feature: SGI Peptide ID NO. 573173
  misc_feature (36)..(321): Pfam Id: PF00704 Pfam Desc: Glycosyl hydrolases family 18
  misc_feature (32)..(338): NCBI GI: 9971103 Blast Desc: endochitinase CHI2 [Metarhizium anisopliae var. acridum]
  misc_feature (39)..(338): NCBI GI: 255709229 Blast Desc: chitinase [Metarhizium anisopliae]
  misc_feature (27)..(330): NCBI GI: 242799554 Blast Desc: chitinase 3 precursor, [Talaromyces stipitatus ATCC 10500] gi|218716750|gb|EED16171.1| chitinase 3 precursor, [Talaromyces stipitatus ATCC 10500]
  misc_feature (7)..(329): NCBI GI: 242811823 Blast Desc: class III chitinase ChiA2 [Talaromyces stipitatus ATCC 10500] gi|218714169|gb|EED13592.1| class III chitinase ChiA2 [Talaromyces stipitatus ATCC 10500]
  misc_feature (32)..(338): NCBI GI: 63148160 Blast Desc: chitinase [Metarhizium anisopliae]
  misc_feature (39)..(338): NCBI GI: 255709231 Blast Desc: chitinase [Metarhizium anisopliae]
  misc_feature (11)..(330): NCBI GI: 212531861 Blast Desc: class III chitinase ChiA2 [Penicillium marneffei ATCC 18224] gi|210071451|gb|EEA25540.1| class III chitinase ChiA2 [Penicillium marneffei ATCC 18224]
  misc_feature (7)..(330): NCBI GI: 212544236 Blast Desc: endochitinase precursor, [Penicillium marneffei ATCC 18224] gi|210065241|gb|EEA19335.1| endochitinase precursor, [Penicillium marneffei ATCC 18224]
  misc_feature (7)..(329): NCBI GI: 126032267 Blast Desc: TPA: TPA_inf: chitinase 18-14 [Hypocrea jecorina]
  misc_feature (12)..(330): NCBI GI: 212541148 Blast Desc: chitinase 3 precursor, [Penicillium marneffei ATCC 18224] gi|210068028|gb|EEA22120.1| chitinase 3 precursor, [Penicillium marneffei ATCC 18224]
  misc_feature (32)..(328): SWISSPROT Homolog: EC 3.2.1.14 Chitinase
MILNLATTSSASLLLLPSLTVALPHHPNHAKRQSSGKTVVYWGRGADNDISKYCTSDAGIDIFVLSFLNTFGDGVTIPTGNFGESCVVSAAGEGQNCDALSSSISNCQEAGIEVFLSLGGGGSRDYTVSSHDEAVSIGTYLWQAYGNGGAYTEGIPRPFGSVAVDGFDLDIEYHTDSSEEHYITLVSTLRSAFSSDPNKTYRVSAAPVCPIPDPSMGDIIQNAEFDYIWPQFYNSNYGNACALPVNGNPPLNYDEWADFTTGTPSANVALFMGVPASEEAATGDQTGAHYYATPDELAEIVSDYTSHERFAGVMMWSSDWSNKNVVNGCTVRVKDRVVPERSYLQ

SEQ ID NO: 37932 - DNA, 460 bp, Muscodor strobelii
  misc_feature: SGI EST ID NO. CUFF.90892.0
  misc_feature: Variant of the nucleotide sequence at SEQ ID NO 37930
cgaggctgtctccattggcacctacctctggcaagcctatggtaacggtggcgcctacactgaaggcattccaagaccatttggtagcgtcgcagtagacggcttcgacttggatatcgaatatcacaccgactctagcgaagagcactatattactctcgtctcgactcttcgaagtgcttttagttcagacccgaacaaaacatatcgtgtctccgctgcaccagtatgtccaattcctgaccccagcatgggtgacataatccaaaatgcagagttcgactacatctggccgcagttctacaacagcaactacggtaacgcatgtgccttgcccgtcaatggcaatccgcctctcaattacgatgaatgggccgacttcaccaccggtactccttcagctaacgtggcgcttttcatgggtgtacccgcatcagaagaagcagcaactggcgaccag

SEQ ID NO: 37933 - DNA, 513 bp, Muscodor strobelii
  misc_feature: SGI cDNA ID NO. 573174
  misc_feature: Encodes the peptide sequence at SEQ ID NO 37934
atgatcacagactatgcggccaagaattcagagctgctctccgcacccggaccaatcatatctcaagacaccgcgaaaaaggccgaaagctcaagcaacctagaggtcacaccagagttgatggagttcatcaatagcttaccgcaacttattcggtcgcatcccgtcagtatgctaaatctgctcgcattcaatgagggtatgcacagcagctatgttgaatacgggaaacagtttagtgagcgcgttggcaagaggtttggagggcaagtgaagatcgttggaaaagttgtgagtgcggagacgggaggaactggcctgggttgggaagagctcgcgttcgtgcattacccgagcatccagaactttgcttccatggcgagtgatgaagcgtatcaagacgtgaacaagaagtacaggttgggcgcgcttagagacacatttattctttgtgtgatggaggttggcgacgacggagagcttgccgggcagccgacgaggggaaaattgtga

SEQ ID NO: 37934 - protein, 170 aa, Muscodor strobelii
  misc_feature: SGI Peptide ID NO. 573174
  misc_feature (1)..(155): NCBI GI: 156046240 Blast Desc: SS1G_09379 [Sclerotinia sclerotiorum 1980] gi|154693774|gb|EDN93512.1| SS1G_09379 [Sclerotinia sclerotiorum 1980]
  misc_feature (1)..(159): NCBI GI: 169624064 Blast Desc: SNOG_15282 [Phaeosphaeria nodorum SN15] gi|111056095|gb|EAT77215.1| SNOG_15282 [Phaeosphaeria nodorum SN15]
  misc_feature (21)..(164): NCBI GI: 261191378 Blast Desc: conserved [Ajellomyces dermatitidis SLH14081] gi|239589863|gb|EEQ72506.1| conserved [Ajellomyces dermatitidis SLH14081]
  misc_feature (21)..(164): NCBI GI: 239612730 Blast Desc: conserved [Ajellomyces dermatitidis ER-3]
  misc_feature (1)..(155): NCBI GI: 154319698 Blast Desc: BC1G_02330 [Botryotinia fuckeliana B05.10] gi|150855988|gb|EDN31180.1| BC1G_02330 [Botryotinia fuckeliana B05.10]
  misc_feature (1)..(154): NCBI GI: 115388159 Blast Desc: conserved [Aspergillus terreus NIH2624] gi|114195669|gb|EAU37369.1| conserved [Aspergillus terreus NIH2624]
  misc_feature (23)..(154): NCBI GI: 258563262 Blast Desc: conserved [Uncinocarpus reesii 1704] gi|237907883|gb|EEP82284.1| conserved [Uncinocarpus reesii 1704]
  misc_feature (33)..(162): NCBI GI: 67516217 Blast Desc: AN0390.2 [Aspergillus nidulans FGSC A4] gi|40747333|gb|EAA66489.1| [Aspergillus nidulans FGSC A4] gi|259489367|tpe|CBF89579.1| TPA: conserved [Aspergillus nidulans
  misc_feature (25)..(154): NCBI GI: 119481959 Blast Desc: NFIA_090690 [Neosartorya fischeri NRRL 181] gi|119409162|gb|EAW19111.1| conserved [Neosartorya fischeri NRRL 181]
  misc_feature (1)..(160): NCBI GI: 212533533 Blast Desc: conserved [Penicillium marneffei ATCC 18224] gi|210072287|gb|EEA26376.1| conserved [Penicillium marneffei ATCC 18224]
MITDYAAKNSELLSAPGPIISQDTAKKAESSSNLEVTPELMEFINSLPQLIRSHPVSMLNLLAFNEGMHSSYVEYGKQFSERVGKRFGGQVKIVGKVVSAETGGTGLGWEELAFVHYPSIQNFASMASDEAYQDVNKKYRLGALRDTFILCVMEVGDDGELAGQPTRGKL

SEQ ID NO: 37935 - DNA, 1195 bp, Muscodor strobelii
  misc_feature: SGI EST ID NO. CUFF.90897.0
  misc_feature: Variant of the nucleotide sequence at SEQ ID NO 37933
atcgactgatgagactgcactcatcgcgatggcgaacataggattcgaggtgagtgtgcaagctccagaaaacttcccaaatcggccatcgcctcggtgatcggcaccatatgcatgcactccaatctcagaacacttgacaccagatgtatttgaaccacatcggaacgatcctcgccaatcctcgccatctcttagttcatcatggcgatctgtaccgtccacatcatctcgctgaaaaccggtgtcacacttgcatcgctgcttgcggctcttcgggttgccggcatcaagcccatcgcgcaagcgcgcgtcctacgatggatggtcttaccaacaatcctttcagccggcaacctgcttgcgcgaaacattcactgggacgcaattgtcatcctacctgagtccgcagcttctctttcggcattctcaaaaggcttcatcaccgcagaatggattgcatcggtcggcacttccttaaggatgatcacagactatgcggccaagaattcagagctgctctccgcacccggaccaatcatatctcaagacaccgcgaaaaaggccgaaagctcaagcaacctagaggtcacaccagagttgatggagttcatcaatagcttaccgcaacttattcggtcgcatcccgtcagtatgctaaatctgctcgcattcaatgagggtatgcacagcagctatgttgaatacgggaaacagtttagtgagcgcgttggcaagaggtttggagggcaagtgaagatcgttggaaaagttgtgagtgcggagacgggaggaactggcctgggttgggaagagctcgcgttcgtgcattacccgagcatccagaactttgcttccatggcgagtgatgaagcgtatcaagacgtgaacaagaagtacaggttgggcgcgcttagagacacatttattctttgtgtgatggaggttggcgacgacggagagcttgccgggcagccgacgaggggaaaattgtgacccggtcccaattggtgcttaaggcattctgagtcgatcgacatggagccccagatgccaagaagcaaatacagttccgaaacattgtcacggctgcgaactgctgtgttcggtttagcaatatccacaaccattctacaattccatatgtaaaaaccaagatggttgcactgccattcaacacatcgttacattgact

SEQ ID NO: 37936 - DNA, 792 bp, Muscodor strobelii
  misc_feature: SGI cDNA ID NO. 573175
  misc_feature: Encodes the peptide sequence at SEQ ID NO 37937
atggcgatctgtaccgtccacatcatctcgctgaaaaccggtgtcacacttgcatcgctgcttgcggctcttcgggttgccggcatcaagcccatcgcgcaagcgcgcgtcctacgatggatggtcttaccaacaatcctttcagccggcaacctgcttgcgcgaaacattcactgggacgcaattgtcatcctacctgagtccgcagcttctctttcggcattctcaaaaggcttcatcaccgcagaatggattgcatcggtcggcacttccttaaggatgatcacagactatgcggccaagaattcagagctgctctccgcacccggaccaatcatatctcaagacaccgcgaaaaaggccgaaagctcaagcaacctagaggtcacaccagagttgatggagttcatcaatagcttaccgcaacttattcggtcgcatcccgtcagtatgctaaatctgctcgcattcaatgagggtatgcacagcagctatgttgaatacgggaaacagtttagtgagcgcgttggcaagaggtttggagggcaagtgaagatcgttggaaaagttgtgagtgcggagacgggaggaactggcctgggttgggaagagctcgcgttcgtgcattacccgagcatccagaactttgcttccatggcgagtgatgaagcgtatcaagacgtgaacaagaagtacaggttgggcgcgcttagagacacatttattctttgtgtgatggaggttggcgacgacggagagcttgccgggcagccgacgaggggaaaattgtga

SEQ ID NO: 37937 - protein, 263 aa, Muscodor strobelii
  misc_feature: SGI Peptide ID NO. 573175
  misc_feature (1)..(248): NCBI GI: 156046240 Blast Desc: SS1G_09379 [Sclerotinia sclerotiorum 1980] gi|154693774|gb|EDN93512.1| SS1G_09379 [Sclerotinia sclerotiorum 1980]
  misc_feature (1)..(252): NCBI GI: 169624064 Blast Desc: SNOG_15282 [Phaeosphaeria nodorum SN15] gi|111056095|gb|EAT77215.1| SNOG_15282 [Phaeosphaeria nodorum SN15]
  misc_feature (1)..(248): NCBI GI: 154319698 Blast Desc: BC1G_02330 [Botryotinia fuckeliana B05.10] gi|150855988|gb|EDN31180.1| BC1G_02330 [Botryotinia fuckeliana B05.10]
  misc_feature (1)..(248): NCBI GI: 189190378 Blast Desc: conserved [Pyrenophora tritici-repentis Pt-1C-BFP] gi|187973134|gb|EDU40633.1| conserved [Pyrenophora tritici-repentis Pt-1C-BFP]
  misc_feature (25)..(257): NCBI GI: 239612730 Blast Desc: conserved [Ajellomyces dermatitidis ER-3]
  misc_feature (25)..(257): NCBI GI: 261191378 Blast Desc: conserved [Ajellomyces dermatitidis SLH14081] gi|239589863|gb|EEQ72506.1| conserved [Ajellomyces dermatitidis SLH14081]
  misc_feature (1)..(247): NCBI GI: 146323036 Blast Desc: conserved [Aspergillus fumigatus Af293] gi|129558584|gb|EAL93842.2| conserved [Aspergillus fumigatus Af293] gi|159129936|gb|EDP55050.1| conserved [Aspergillus A1163]
  misc_feature (1)..(247): NCBI GI: 119481959 Blast Desc: NFIA_090690 [Neosartorya fischeri NRRL 181] gi|119409162|gb|EAW19111.1| conserved [Neosartorya fischeri NRRL 181]
  misc_feature (25)..(255): NCBI GI: 67516217 Blast Desc: AN0390.2 [Aspergillus nidulans FGSC A4] gi|40747333|gb|EAA66489.1| [Aspergillus nidulans FGSC A4] gi|259489367|tpe|CBF89579.1| TPA: conserved [Aspergillus nidulans
  misc_feature (18)..(247): NCBI GI: 115388159 Blast Desc: conserved [Aspergillus terreus NIH2624] gi|114195669|gb|EAU37369.1| conserved [Aspergillus terreus NIH2624]
MAICTVHIISLKTGVTLASLLAALRVAGIKPIAQARVLRWMVLPTILSAGNLLARNIHWDAIVILPESAASLSAFSKGFITAEWIASVGTSLRMITDYAAKNSELLSAPGPIISQDTAKKAESSSNLEVTPELMEFINSLPQLIRSHPVSMLNLLAFNEGMHSSYVEYGKQFSERVGKRFGGQVKIVGKVVSAETGGTGLGWEELAFVHYPSIQNFASMASDEAYQDVNKKYRLGALRDTFILCVMEVGDDGELAGQPTRGKL

SEQ ID NO: 37938 - DNA, 1195 bp, Muscodor strobelii; identical to SEQ ID NO: 37935
  misc_feature: SGI EST ID NO. CUFF.90897.0
  misc_feature: Variant of the nucleotide sequence at SEQ ID NO 37936

SEQ ID NO: 37939 - DNA, 441 bp, Muscodor strobelii
  misc_feature: SGI cDNA ID NO. 573176
  misc_feature: Encodes the peptide sequence at SEQ ID NO 37940
atgattccttatagttttgcttctacaagtcattttgtattaacatttgccctaagttttactatagttttaggtgctactattttaggattccaaaaacatggtttagttttcttttctcttttagtcccagctggttgtcctttagctttattacctttattagttttaattgagtttatttcatacttagcccgtaatatctcattaggtttaagattagctgctaacattttatcaggtcacatgttgttaaatatattagcaggttttacttacaatattatgacaagtggtataatctttttctttttaggtttggtacctttatcttttattatcgctttttcaggtttagaattagggatcgcctttatacaagcacaagtatttgtggttctgtcatcagggtacataaaagatggattagaccttcattaa

SEQ ID NO: 37940 - protein, 146 aa, Muscodor strobelii
  misc_feature: SGI Peptide ID NO. 573176
  misc_feature (1)..(141): Pfam Id: PF00119 Pfam Desc: ATP synthase A chain
  misc_feature (1)..(146): NCBI GI: 148358089 Blast Desc: ATP synthase subunit 6 [Gibberella zeae] gi|86142488|gb|ABC86603.1| ATP synthase subunit 6 [Gibberella zeae]
  misc_feature (1)..(146): NCBI GI: 58219952 Blast Desc: ATP synthase subunit 6 [Fusarium oxysporum]
  misc_feature (1)..(146): NCBI GI: 12408589 Blast Desc: ATP synthase F0 subunit 6 [Podospora anserina] gi|114453|sp|P15994.1|ATP6_PODAN RecName: Full=ATP synthase subunit a; AltName: Full=F-ATPase protein 6 ATPase 6 [Podospora 6
  misc_feature (1)..(146): NCBI GI: 805071 Blast Desc: ATPase subunit 6 [Neurospora crassa]
  misc_feature (1)..(146): NCBI GI: 584800 Blast Desc: ATP6_NEUCR RecName: Full=ATP synthase subunit a; AltName: Full=F-ATPase protein 6; Flags: Precursor gi|7145097|gb|AAA31964.2| ATPase subunit 6 [Neurospora crassa]
  misc_feature (1)..(146): NCBI GI: 18640457 Blast Desc: ATP synthase protein 6 [Hypocrea jecorina] gi|18496638|gb|AAL74171.1|AF447590_8 ATP synthase protein 6 [Hypocrea jecorina]
  misc_feature (1)..(146): NCBI GI: 110578639 Blast Desc: ATP synthase F0 subunit 6 [Verticillium dahliae] gi|84682166|gb|ABC60425.1| ATP synthase F0 subunit 6 [Verticillium dahliae]
  misc_feature (1)..(146): NCBI GI: 261361699 Blast Desc: ATP synthase F0 subunit 6 [Verticillium albo-atrum VaMs.102]
  misc_feature (1)..(146): NCBI GI: 81230397 Blast Desc: ATP synthase subunit 6 [Aspergillus tubingensis] gi|77157985|gb|ABA62013.1| ATP synthase subunit 6 [Aspergillus tubingensis]
  misc_feature (1)..(146): NCBI GI: 60499213 Blast Desc: ATP synthase F0 subunit 6 [Fusarium oxysporum]
MIPYSFASTSHFVLTFALSFTIVLGATILGFQKHGLVFFSLLVPAGCPLALLPLLVLIEFISYLARNISLGLRLAANILSGHMLLNILAGFTYNIMTSGIIFFFLGLVPLSFIIAFSGLELGIAFIQAQVFVVLSSGYIKDGLDLH

SEQ ID NO: 37941 - DNA, 1423 bp, Muscodor strobelii
  misc_feature: SGI EST ID NO. CUFF.90933.0
  misc_feature: Variant of the nucleotide sequence at SEQ ID NO 37939
ttttatattaataaataacttgattggaatgattccttatagttttgcttctacaagtcattttgtattaacatttgccctaagttttactatagttttaggtgctactattttaggattccaaaaacatggtttagttttcttttctcttttagtcccagctggttgtcctttagctttattacctttattagttttaattgagtttatttcatacttagcccgtaatatctcattaggtttaagattagctgctaacattttatcaggtcacatgttgttaaatatattagcaggttttacttacaatattatgacaagtggtataatctttttctttttaggtttggtacctttatcttttattatcgctttttcaggtttagaattagggatcgcctttatacaagcacaagtatttgtggttctgtcatcagggtacataaaagatggattagaccttcattaaaaaataaattaattaaagataagtttaatatttttttaatcttcaagtttaaaagtctttaacgaaaaggatatttataactaggatgtttcgcgacaagtgtgtattaaaagtaataatataaaataaaaattttttgcttttcgtaggggagcgaaccgggttaaaaaaatctaattttttttttagggaagcagtgagataatttaataaaaaacttggacaaatttaattaacctgtacgaacatcattaggggagaaatttaagcttaggtttaagtttaaggaaagttataataaactaaattaatgtaaaatattactttaagcgaaaggtttaggttttctatagaaaatgatataaattaatagataatttatcgtagtatataatttacttgctagccttgcaaagcctacatattattctaatttagtgatagagtggctgctactacaggtctggtttataaagtcgctgggagtgtgttaaacacactcccagggatggacttgttccgagtcccagattttgcgtactagcccccttctcatcagggccccttctcataggaagttaagagggcctccccctttgcaggtaggcgaggtaagagggcctctcccttttgcaggtaggcgagggctgaggtggttcgacttatgtgacgcaaattaccctacgatttccgttcagggaagtcgtaggtttatatcttagttactcacgggatattggttttgcgcgggtttatgtattagttattcacaggatcttaatttgcgcttggtccctgtaggattaggtagcagatttcctgtaacttaatcttttataggactaggagggctacataatatagcttaaggttatgcttgttcaaaaacgataacaaaaaagatgtagtgatggagacaaccatttaaaaaacgaacttgatagtaaaaaaact

SEQ ID NO: 37942 - DNA, 936 bp, Muscodor strobelii
  misc_feature: SGI cDNA ID NO. 573177
  misc_feature: Reduced expression when VOC is produced
  misc_feature: Encodes the peptide sequence at SEQ ID NO 37943
atggatgcgcacgatcaagtcgaccctgacaaccctgcgcaatgggacgtcgaccgcgtcgtgcgagaactctgcatggccagaggctcacacgggctgtacaaggacggtgcactgcctgccgatttcgagcaacgtttgcgccatcatgacatcgacggtagccacctggtccgcgagacccgaacccccgaacgacgagacctctttctcaaggcaatgggcatcgacaaatttgcacagcagacattcctgctcaacattatcgacaagctacaggccgagagcaaaagaaagcaggacgaaaggcaatcactctctaacacaccagcttcgaaaaagcgcaggatccagccacaaccgatgacctcgccaaatgcacctacccaccaacggcagtgggatcccgacggttacttgcgaggtgatggcctccacagctacgacattctctacggtgattccgattcgccgacagcagatgaagtgtgcggattcagctctttccacgaagatgctgcacgctatgtgggacaccagctacaggtcagtcgcctcctcaagcgcgcctggcttgcgcgctccgacagactgcctaaggctccacgtaggcaagaacagccagcagatactatcatccccctcaacgatcctctgaacgacccggtgctcccgatctacggcgagtcagatcaagaatacgacacgaacacatgggacgagatccaaaacgagatagaggaccgcagacattcatcgtctcagcacaagtgtctcgcgactggagagattgatgccgttcttaataatatcctcggccgatacgaatcagaatggcgggatgagaagatgccaatactgcgatacaaagcaccttcaacgtggcgagcgctacaaagagattcctcaagtaccattcgcgagctctcacaacat

SEQ ID NO: 37943 - protein, 312 aa, Muscodor strobelii
  misc_feature: SGI Peptide ID NO. 573177
  misc_feature (221)..(302): NCBI GI: 225678359 Blast Desc: XNP-1 [Paracoccidioides brasiliensis Pb03]
  misc_feature (224)..(302): NCBI GI: 226290585 Blast Desc: conserved [Paracoccidioides brasiliensis Pb18]
  misc_feature (204)..(295): NCBI GI: 242793636 Blast Desc: SNF2 family helicase/ATPase, [Talaromyces stipitatus ATCC 10500] gi|218718792|gb|EED18212.1| SNF2 family helicase/ATPase, [Talaromyces stipitatus ATCC 10500]
  misc_feature (224)..(302): NCBI GI: 226280572 Blast Desc: conserved [Paracoccidioides brasiliensis Pb01]
  misc_feature (10)..(311): NCBI GI: 39977089 Blast Desc: MGG_06447 [Magnaporthe grisea 70-15] gi|145016135|gb|EDK00625.1| MGG_06447 [Magnaporthe grisea 70-15]
  misc_feature (223)..(286): NCBI GI: 119181856 Blast Desc: CIMG_06003 [Coccidioides immitis RS]
  misc_feature (223)..(286): NCBI GI: 240109079 Blast Desc: SNF2 family N-terminal domain containing protein [Coccidioides posadasii C735 delta SOWgp]
  misc_feature (223)..(311): NCBI GI: 115438126 Blast Desc: [Aspergillus terreus NIH2624] gi|114188801|gb|EAU30501.1| [Aspergillus terreus NIH2624]
  misc_feature (195)..(295): NCBI GI: 212535646 Blast Desc: SNF2 family helicase/ATPase, [Penicillium marneffei ATCC 18224] gi|210070378|gb|EEA24468.1| SNF2 family helicase/ATPase, [Penicillium marneffei ATCC 18224]
  misc_feature (220)..(300): NCBI GI: 70998502 Blast Desc: SNF2 family helicase/ATPase [Aspergillus fumigatus Af293] gi|66851609|gb|EAL91935.1| SNF2 family helicase/ATPase, [Aspergillus fumigatus Af293]
  misc_feature: Useful for introducing or modulating the production of volatile compounds
MDAHDQVDPDNPAQWDVDRVVRELCMARGSHGLYKDGALPADFEQRLRHHDIDGSHLVRETRTPERRDLFLKAMGIDKFAQQTFLLNIIDKLQAESKRKQDERQSLSNTPASKKRRIQPQPMTSPNAPTHQRQWDPDGYLRGDGLHSYDILYGDSDSPTADEVCGFSSFHEDAARYVGHQLQVSRLLKRAWLARSDRLPKAPRRQEQPADTIIPLNDPLNDPVLPIYGESDQEYDTNTWDEIQNEIEDRRHSSSQHKCLATGEIDAVLNNILGRYESEWRDEKMPILRYKAPSTWRALQRDSSSTIRELSQH

SEQ ID NO: 37944 - DNA, 1506 bp, Muscodor strobelii
  misc_feature: SGI EST ID NO. CUFF.90981.1
  misc_feature: Variant of the nucleotide sequence at SEQ ID NO 37942
cctcattctttatcctctttttgttgcttccttcatcgtaacaataacctggccaacccttacttataaattgaaatctttgcttttgctttttatatagataatttcatatagatagactggcctacacgatgggttgccaggcgcgacaaacgacggaaggcagtcggtcgcctggtctatggggggatcggttgctggtgcagacgagcgccttcccaatcaccatagccatcaccatcaacccaactacttgtacacgcaacacccaacgcgctccttcctcgatattctttttcatcccctaatcccctgaccccctcccacaggacatcgacacctgcatcgacacctacatcgacgcttctgtacacacagtccccctgccgttgaagctacttcgtcgagcacctgcgctgggtgactcgcagacaactgcacaccctactcctgcccgaccgatctaatccacctcgatttcgccccgcggcgagaccgcaagagtgaggccatggatgcgcacgatcaagtcgaccctgacaaccctgcgcaatgggacgtcgaccgcgtcgtgcgagaactctgcatggccagaggctcacacgggctgtacaaggacggtgcactgcctgccgatttcgagcaacgtttgcgccatcatgacatcgacggtagccacctggtccgcgagacccgaacccccgaacgacgagacctctttctcaaggcaatgggcatcgacaaatttgcacagcagacattcctgctcaacattatcgacaagctacaggccgagagcaaaagaaagcaggacgaaaggcaatcactctctaacacaccagcttcgaaaaagcgcaggatccagccacaaccgatgacctcgccaaatgcacctacccaccaacggcagtgggatcccgacggttacttgcgaggtgatggcctccacagctacgacattctctacggtgattccgattcgccgacagcagatgaagtgtgcggattcagctctttccacgaagatgctgcacgctatgtgggacaccagctacaggtcagtcgcctcctcaagcgcgcctggcttgcgcgctccgacagactgcctaaggctccacgtaggcaagaacagccagcagatactatcatccccctcaacgatcctctgaacgacccggtgctcccgatctacggcgagtcagatcaagaatacgacacgaacacatgggacgagatccaaaacgagatagaggaccgcagacattcatcgtctcagcacaagtgtctcgcgactggagagattgatgccgttcttaataatatcctcggccgatacgaatcagaatggcgggatgagaagatgccaatactgcgatacaaagcaccttcaacgtggcgagcgctacaaagagattcctcaagtaccattcgcgagctctcacaacatgtacgcaagatggacgaacgcatcacggcgatgcggtgcggaattaccacggcagggcc

SEQ ID NO: 37945 - DNA, 177 bp, Muscodor strobelii
  misc_feature: SGI cDNA ID NO. 573178
  misc_feature: Elevated expression when VOC is produced
  misc_feature: Encodes the peptide sequence at SEQ ID NO 37946
ctcaagaagtccgctgcgccgcttgtcatcagccagcccattctccttgggccagctatcgtacttgcctacgcacgagaaatcgcaggggcacaagtccaggcgccacgaccagagtccggaatcaacgatactctcggttccgagagctcccaagagctgtcgggtggacaatag

SEQ ID NO: 37946 - protein, 58 aa, Muscodor strobelii
  misc_feature: SGI Peptide ID NO. 573178
  misc_feature: Useful for introducing or modulating the production of volatile compounds
LKKSAAPLVISQPILLGPAIVLAYAREIAGAQVQAPRPESGINDTLGSESSQELSGGQ

SEQ ID NO: 37947 - DNA, 540 bp, Muscodor strobelii
  misc_feature: SGI cDNA ID NO. 573179
  misc_feature: Reduced expression when VOC is produced
  misc_feature: Encodes the peptide sequence at SEQ ID NO 37948
atgccgccgcctcctcgagtggaattggagcccatattctatcattatccggctttgactcagcgcgagatcgtagagatagaagccatcattctgcagcaacacttatcccttctcaaaaatgaggcgcacaccgaaaaggcacaggagagcatacagaaagcaatcgatctcatcttggagcttaaggaagaccagaacagcgctggttctgatgatcaaataaacgtacccgcccaattcaaagatgaagaactgaacaaaaaccggtcgccaagtctatctgccgtggatccaagtatcgtctccgacgacctgtcagatgtttccgactcgttcctggccgagcttagtgcccttgttgacacaaatcttacatctgccgaacccagaggggtggaacgcgactgcaacctccagcctccatctctgacaaggacgcggccgacaccgaatctatttaattccggatcaatagaccacctttggtcgagtgaagtgcaacaggtcctcagagaccgatttcagatgtctggattc

SEQ ID NO: 37948 - protein, 180 aa, Muscodor strobelii
  misc_feature: SGI Peptide ID NO. 573179
  misc_feature: Useful for introducing or modulating the production of volatile compounds
MPPPPRVELEPIFYHYPALTQREIVEIEAIILQQHLSLLKNEAHTEKAQESIQKAIDLILELKEDQNSAGSDDQINVPAQFKDEELNKNRSPSLSAVDPSIVSDDLSDVSDSFLAELSALVDTNLTSAEPRGVERDCNLQPPSLTRTRPTPNLFNSGSIDHLWSSEVQQVLRDRFQMSGF

SEQ ID NO: 37949 - DNA, 558 bp, Muscodor strobelii
  misc_feature: SGI EST ID NO. CUFF.90937.0
  misc_feature: Variant of the nucleotide sequence at SEQ ID NO 37947
cccatcacaagatgccgccgcctcctcgagtggaattggagcccatattctatcattaatgcaaagtccggctttgactcagcgcgagatcgtagagatagaagccatcattctgcagcaacacttatcccttctcaaaaatgaggcgcacaccgaaaaggcacaggagagcatacagaaagcaatcgatctcatcttggagcttaaggaagaccagaacagcgctggttctgatgatcaaataaacgtacccgcccaattcaaagatgaagaactgaacaaaaaccggtcgccaagtctatctgccgtggatccaagtatcgtctccgacgacctgtcagatgtttccgactcgttcctggccgagcttagtgcccttgttgacacaaatcttacatctgccgaacccagaggggtggaacgcgactgcaacctccagcctccatctctgacaaggacgcggccgacaccgaatctatttaattccggatcaatagaccacctttggtcgagtgaagtgcaacaggtcctcagagaccgatttcagatgtctggatt

SEQ ID NO: 37950 - DNA, 2148 bp, Muscodor strobelii
  misc_feature: SGI cDNA ID NO. 573180
  misc_feature: Encodes the peptide sequence at SEQ ID NO 37951
ttggcagaaatagaggcaagcatcctgcgccaacacgcctcgcgtctacgtcgcaaaattcaagagctgtcaagcaaggacaaagctcaggaagtcctgcacaacttgaaacaagcaacagacttcatcctggacaacaccgccattctcactgcccagcctgttgactcggcggaagtagagacacggattgagcattctgcaacgagacaaagtcattattccgtcaatgtaaatgcagatctcggacttctatctggggatctgtcagatgtttcggaaaactttgaaacgcagctcagtgcccttcttgatgtgggccagccggtcaagaaagaagaacagatggcggatagaggatctgtccatacttatacagatcgctcagtatccatatccactcaacccctcgcctccaaagaacatccttggtcggccgacgtggagaaggcactccacgaccggttttgcatgaaagggttcaggcataatcaactagattccatctacgcaacgctcgcggggaaggacgcctttgtgcttatgccaacgggcggtgggaagtctctctgttaccaactccctgcagtcgtcgagagcggtaaaacaggcagcgtcacactcgtcgtctccccgttacttagcttgatacacgatcaactagaacacctaaaagcactccatattccggccgcagcgttaactggcgagacaacactcgaggatagatgtcgaatcttggcgtcgctcaagaaagatccacatatgtctctgctatatgtcacccctgagatgatcaatcaaagcacagccttccaggaatgtctagagaagctgtaccagaaccagaagcttgcgcggcttgtcatcgacgaggcgcattgcgttagccaatggggtcacgacttccgcccgggctataaagagctaggcaatttcaagaagcaatttcctcgcgttccattaatggctctaactgcaacagcaacgagcaacgttatcgtcgacgtgaaaagcaacctgggcatggacgcatgccagctcttcacccagagctttgaccgtcctaacctacgctatgcggtacataaaaaggacaggaacaatattaacactattgctgagctcatcaaagcagaatactcgggcttgaccggtatcgtctacaccctctctcgcagatcggcagaaacgatcgcgaggaaattccgggacgaccacggcatcgcagcctgccactaccacgcattagtcaccgccgaatacaaggcatacatccagacaagatggcaagaaggcgagatcaaagttgtcgtcgctacgattgcgttcggtatgggcatcgacaaggcagatgtgcgtttcgtcattcatcaatcagtacctcagagcctggaaggctactaccaggagactggtcgtgccggcagagatggcaagccttcggattgtcacttgtatttcagctacagtgacgtaattgcgctccgaaagatgattggtgacggtgatggtagtcaacagctgaagaagagacaaggagccctattggagaaggttgttggcttctgcaacaatcatatcgactgtcgccgcgttcaactcctccgctactttggagaaacgattccccgagatagatgccgtatgacatgtgacaactgtagaaagaatgtcggcaaagcaaccacagaccataccagacatgcagtggccttgcttacgcttgtgaagctttacggcaagctcacatcaagccagtgcatcaatttcttgagaggaaaacagacaaagcttcgcggggagggactcgagtactatggcatagccaggcatatcgctaaacatgacatgcatcgcatcatcgatgacctgctaactaaaggggaattgaaagaactcaacattgttggtagcacagacggaatggcagtgccgtacttgcaactcggacaggaagcaggggcatttttggcgggcaagcgaaaactcaccttagagcggggacgtcatgtccgattcgtgtcaccggaaacccagctgaatgatgcctatactgatgagggtgagaggtcgagatacttcacgcgtagtgatactgctggagaaatatttgcttcggtatctaggtatttcacgagagcatag

SEQ ID NO: 37951 - protein, 715 aa, Muscodor strobelii
  misc_feature: SGI Peptide ID NO. 573180
  misc_feature (162)..(337): Pfam Id: PF00270 Pfam Desc: DEAD/DEAH box helicase
  misc_feature (403)..(479): Pfam Id: PF00271 Pfam Desc: Helicase conserved C-terminal domain
  misc_feature (565)..(670): Pfam Id: PF09382 Pfam Desc: RQC domain
  misc_feature (110)..(666): NCBI GI: 39941578 Blast Desc: MGG_05700 [Magnaporthe grisea 70-15] gi|145022394|gb|EDK06414.1| MGG_05700 [Magnaporthe grisea 70-15]
  misc_feature (141)..(666): NCBI GI: 261356227 Blast Desc: ATP-dependent helicase SGS1 [Verticillium albo-atrum VaMs.102]
  misc_feature (129)..(666): NCBI GI: 256735226 Blast Desc: NECHADRAFT_30968 [Nectria haematococca mpVI 77-13-4]
  misc_feature (129)..(666): NCBI GI: 256725172 Blast Desc: NECHADRAFT_64925 [Nectria haematococca mpVI 77-13-4]
  misc_feature (136)..(666): NCBI GI: 46107336 Blast Desc: FG00551.1 [Gibberella zeae PH-1]
  misc_feature (130)..(666): NCBI GI: 256721447 Blast Desc: NECHADRAFT_88354 [Nectria haematococca mpVI 77-13-4]
  misc_feature (134)..(666): NCBI GI: 6934278 Blast Desc: AF205407_1 QDE3 protein [Neurospora crassa]
  misc_feature (134)..(666): NCBI GI: 164423365 Blast Desc: NCU08598 [Neurospora crassa OR74A] gi|157070060|gb|EAA34794.2| conserved [Neurospora crassa OR74A]
  misc_feature (142)..(677): NCBI GI: 238487580 Blast Desc: RecQ family helicase MusN [Aspergillus flavus NRRL3357] gi|220699907|gb|EED56246.1| RecQ family helicase MusN [Aspergillus flavus NRRL3357]
  misc_feature (139)..(666): NCBI GI: 226282600 Blast Desc: ATP-dependent DNA helicase Q1 [Paracoccidioides brasiliensis Pb01]
LAEIEASILRQHASRLRRKIQELSSKDKAQEVLHNLKQATDFILDNTAILTAQPVDSAEVETRIEHSATRQSHYSVNVNADLGLLSGDLSDVSENFETQLSALLDVGQPVKKEEQMADRGSVHTYTDRSVSISTQPLASKEHPWSADVEKALHDRFCMKGFRHNQLDSIYATLAGKDAFVLMPTGGGKSLCYQLPAVVESGKTGSVTLVVSPLLSLIHDQLEHLKALHIPAAALTGETTLEDRCRILASLKKDPHMSLLYVTPEMINQSTAFQECLEKLYQNQKLARLVIDEAHCVSQWGHDFRPGYKELGNFKKQFPRVPLMALTATATSNVIVDVKSNLGMDACQLFTQSFDRPNLRYAVHKKDRNNINTIAELIKAEYSGLTGIVYTLSRRSAETIARKFRDDHGIAACHYHALVTAEYKAYIQTRWQEGEIKVVVATIAFGMGIDKADVRFVIHQSVPQSLEGYYQETGRAGRDGKPSDCHLYFSYSDVIALRKMIGDGDGSQQLKKRQGALLEKVVGFCNNHIDCRRVQLLRYFGETIPRDRCRMTCDNCRKNVGKATTDHTRHAVALLTLVKLYGKLTSSQCINFLRGKQTKLRGEGLEYYGIARHIAKHDMHRIIDDLLTKGELKELNIVGSTDGMAVPYLQLGQEAGAFLAGKRKLTLERGRHVRFVSPETQLNDAYTDEGERSRYFTRSDTAGEIFASVSRYFTRA

SEQ ID NO: 37952 - DNA, 2162 bp, Muscodor strobelii
  misc_feature: SGI EST ID NO. CUFF.90950.0
  misc_feature: Variant of the nucleotide sequence at SEQ ID NO 37950
cgcgtctacgtcgcaaaattcaagagctgtcaagcaaggacaaagctcaggaagtcctgcacaacttgaaacaagcaacagacttcatcctggacaacaccgccattctcactgcccagcctgttgactcggcggaagtagagacacggattgagcattctgcaacgagacaaagtcattattccgtcaatgtaaatgcagatctcggacttctatctggggatctgtcagatgtttcggaaaactttgaaacgcagctcagtgcccttcttgatgtgggccagccggtcaagaaagaagaacagatggcggatagaggatctgtccatacttatacagatcgctcagtatccatatccactcaacccctcgcctccaaagaacatccttggtcggccgacgtggagaaggcactccacgaccggttttgcatgaaagggttcaggcataatcaactagattccatctacgcaacgctcgcggggaaggacgcctttgtgcttatgccaacgggcggtgggaagtctctctgttaccaactccctgcagtcgtcgagagcggtaaaacaggcagcgtcacactcgtcgtctccccgttacttagcttgatacacgatcaactagaacacctaaaagcactccatattccggccgcagcgttaactggcgagacaacactcgaggatagatgtcgaatcttggcgtcgctcaagaaagatccacatatgtctctgctatatgtcacccctgagatgatcaatcaaagcacagccttccaggaatgtctagagaagctgtaccagaaccagaagcttgcgcggcttgtcatcgacgaggcgcattgcgttagccaatggggtcacgacttccgcccgggctataaagagctaggcaatttcaagaagcaatttcctcgcgttccattaatggctctaactgcaacagcaacgagcaacgttatcgtcgacgtgaaaagcaacctgggcatggacgcatgccagctcttcacccagagctttgaccgtcctaacctacgctatgcggtacataaaaaggacaggaacaatattaacactattgctgagctcatcaaagcagaatactcgggcttgaccggtatcgtctacaccctctctcgcagatcggcagaaacgatcgcgaggaaattccgggacgaccacggcatcgcagcctgccactaccacgcattagtcaccgccgaatacaaggcatacatccagacaagatggcaagaaggcgagatcaaagttgtcgtcgctacgattgcgttcggtatgggcatcgacaaggcagatgtgcgtttcgtcattcatcaatcagtacctcagagcctggaaggctactaccaggagactggtcgtgccggcagagatggcaagccttcggattgtcacttgtatttcagctacagtgacgtaattgcgctccgaaagatgattggtgacggtgatggtagtcaacagctgaagaagagacaaggagccctattggagaaggttgttggcttctgcaacaatcatatcgactgtcgccgcgttcaactcctccgctactttggagaaacgattccccgagatagatgccgtatgacatgtgacaactgtagaaagaatgtcggcaaagcaaccacagaccataccagacatgcagtggccttgcttacgcttgtgaagctttacggcaagctcacatcaagccagtgcatcaatttcttgagaggaaaacagacaaagcttcgcggggagggactcgagtactatggcatagccaggcatatcgctaaacatgacatgcatcgcatcatcgatgacctgctaactaaaggggaattgaaagaactcaacattgttggtagcacagacggaatggcagtgccgtacttgcaactcggacaggaagcaggggcatttttggcgggcaagcgaaaactcaccttagagcggggacgtcatgtccgattcgtgtcaccggaaacccagctgaatgatgcctatactgatgagggtgagaggtcgagatacttcacgcgtagtgatactgctggagaaatatttgcttcggtatctaggtatttcacgagagcatagttgtagacatgggtaataataaacttagacaggtgcaatagtactaacaaaaag

SEQ ID NO: 37953 - DNA, 240 bp, Muscodor strobelii
  misc_feature: SGI cDNA ID NO. 573181
  misc_feature: Elevated expression when VOC is produced
  misc_feature: Encodes the peptide sequence at SEQ ID NO 37954
atgaatcctacttctcgacgctcatcaagcatctactccgatagctttgagctccaggatctcgtcgatcggctcgatcagacgacgtgggaacaagaagtgcttacagtctacgccctggaaggagagcgagatatgtggcagcaggaactgatgagggagcaggtgctgattgaggagcacaaaggccgggcagagacagagcggcggaaatggatggccaacagcaccgtaatctga

SEQ ID NO: 37954 - protein, 79 aa, Muscodor strobelii
  misc_feature: SGI Peptide ID NO. 573181
  misc_feature: Useful for introducing or modulating the production of volatile compounds
MNPTSRRSSSIYSDSFELQDLVDRLDQTTWEQEVLTVYALEGERDMWQQELMREQVLIEEHKGRAETERRKWMANSTVI

SEQ ID NO: 37955 - DNA, 1347 bp, Muscodor strobelii
  misc_feature: SGI cDNA ID NO. 573182
  misc_feature: Reduced expression when VOC is produced
  misc_feature: Encodes the peptide sequence at SEQ ID NO 37956
atggcgtcacaaagagtgttgatgctcggcgccggcttcgtcacacggccgacgctcgacatcctgtgcgcgtctggagtcgccgtcaccgtcgcttgccgcacgctcgactcggccaagacgctctcggccggggtgcgcaacgcggtgcccatctcgctggacgtgacggacgacgcggcgctcgacgcgcaggtggcgcagcacgacgtcgtcatcagcctgatcccctacaccttccacgcggccgtgatccgcgcggcgatccggcagaagaagcacgtcgtcaccaccagctacgtctcgcccgccatgctggccctcgaccagcagtgcaaggacgccggcatcaccgtcatgaacgagatcggcctcgacccgggcatcgaccacctctacgccgtcaagaccatcgaggacgtccaccgcgccggcggcaaggtcacctccttcctgtcctactgcggcggcctgcccgcccccgagtgctccggcaaccccctcggctacaagttctcctggtccccccgcggtgtcttgctggccctgagaaacgccgccagcttctaccaagacggcaacgtcgtcaatgtcgccggccccgatctgatggccactgccaagccctaccatatctacccaggcttcgccttcgtcgcctaccccaacagggattcgactggttacaaggagcgctacaatatcccagaggcccagaccataatcaggggaaccttgagatatgctgggtttccggagttcgtcaaagttctcgttgacattggcttcctaagcgacgaagtccagccctactgccaggagcccgttgcctggaagcatgtcacgcagcagcttctggccgcgccttcctctactgagaccgacctcattgccaccatcacctccaagactaggtttcaggatgagcagcaaaaatcccacatcttggctggcatgagatggctgggaatgttttcctcggagcagatcattccccgaggcaacccgttggacacgatttgcgccactcttgagaagaagatgcagtacggcgagggagagcgcgatctcgtcatgctgcagcacaagttcgaggtggaactgcaggacggcactaaacagacccggctctcgacgctctgtgactacggtagcactgagcctggcggttactccgccatggccaaacttgttggcgttccatgtgccgttgccgtgcaacaagttctgaatggaaccttatccgacaaaggtgttctcgcgcccatgagcagcaaaatcaacgatgccttgatcaaggaactgaaggagaaatatggcatctactgtaaggaggaaattgtttaa

SEQ ID NO: 37956 - protein, 448 aa, Muscodor strobelii
  misc_feature: SGI Peptide ID NO. 573182
  misc_feature (6)..(444): Pfam Id: PF03435 Pfam Desc: Saccharopine dehydrogenase
  misc_feature (1)..(448): NCBI GI: 115491065 Blast Desc: ATEG_00074 [Aspergillus terreus NIH2624] gi|114197020|gb|EAU38720.1| ATEG_00074 [Aspergillus terreus NIH2624]
  misc_feature (1)..(448): NCBI GI: 39946672 Blast Desc: saccharopine dehydrogenase [Magnaporthe grisea 70-15] gi|148887395|sp|Q9P4R4.2|LYS9_MAGGR RecName: Full=Saccharopine dehydrogenase [NADP+, L-glutamate-forming]; AltName: reductase A,
  misc_feature (1)..(448): NCBI GI: 9651162 Blast Desc: AF144424_1 saccharopine reductase [Magnaporthe grisea]
  misc_feature (3)..(448): NCBI GI: 154291780 Blast Desc: saccharopine reductase [Botryotinia fuckeliana B05.10] gi|150846628|gb|EDN21821.1| saccharopine reductase [Botryotinia fuckeliana B05.10]
  misc_feature (3)..(448): NCBI GI: 156034557 Blast Desc: SS1G_13213 [Sclerotinia sclerotiorum 1980] gi|154698617|gb|EDN98355.1| SS1G_13213 [Sclerotinia sclerotiorum 1980]
  misc_feature (1)..(448): NCBI GI: 116206498 Blast Desc: conserved [Chaetomium globosum CBS 148.51] gi|88183139|gb|EAQ90607.1| conserved [Chaetomium globosum CBS 148.51]
  misc_feature (1)..(448): NCBI GI: 256731324 Blast Desc: NECHADRAFT_101578 [Nectria haematococca mpVI 77-13-4]
  misc_feature (1)..(448): NCBI GI: 164426869 Blast Desc: saccharopine dehydrogenase [Neurospora crassa OR74A] gi|12718328|emb|CAC28679.1| saccharopine reductase [Neurospora crassa] gi|157071510|gb|EAA31859.2| saccharopine dehydrogenase
  misc_feature (1)..(441): NCBI GI: 145257925 Blast Desc: An04g05260 [Aspergillus niger] gi|134074494|emb|CAK38788.1| protein product [Aspergillus niger]
  misc_feature (4)..(441): NCBI GI: 226285151 Blast Desc: saccharopine dehydrogenase [Paracoccidioides brasiliensis Pb01]
  misc_feature (1)..(448): SWISSPROT Homolog: EC 1.5.1.10 Saccharopine dehydrogenase (NADP(+), L-glutamate-forming)
  misc_feature: Useful for introducing or modulating the production of volatile compounds
MASQRVLMLGAGFVTRPTLDILCASGVAVTVACRTLDSAKTLSAGVRNAVPISLDVTDDAALDAQVAQHDVVISLIPYTFHAAVIRAAIRQKKHVVTTSYVSPAMLALDQQCKDAGITVMNEIGLDPGIDHLYAVKTIEDVHRAGGKVTSFLSYCGGLPAPECSGNPLGYKFSWSPRGVLLALRNAASFYQDGNVVNVAGPDLMATAKPYHIYPGFAFVAYPNRDSTGYKERYNIPEAQTIIRGTLRYAGFPEFVKVLVDIGFLSDEVQPYCQEPVAWKHVTQQLLAAPSSTETDLIATITSKTRFQDEQQKSHILAGMRWLGMFSSEQIIPRGNPLDTICATLEKKMQYGEGERDLVMLQHKFEVELQDGTKQTRLSTLCDYGSTEPGGYSAMAKLVGVPCAVAVQQVLNGTLSDKGVLAPMSSKINDALIKELKEKYGIYCKEEIV

SEQ ID NO: 37957 - DNA, 3493 bp, Muscodor strobelii
  misc_feature: SGI EST ID NO. CUFF.91609.4
  misc_feature (2179)..(2179): n is a, c, g, t, or other
  misc_feature: Variant of the nucleotide sequence at SEQ ID NO 37955
gcatgttgcaatatggaggggcagcatagctctggaggggcaaagctgtctgctcgtccgagttccaactgtcgtgctatgttcatgaccactttgctgcccagcttcacctgtgcacgttaaccgtcaagtctcgggtcaattgacaagtcgacgagcagccagacgtgttcgagtgcatcgcagactagcagcgcagagccgagccgcttggggccggggaaatccagcaaacatggcgtcacaaagagtgttgatgctcggcgccggcttcgtcacacggccgacgctcgacatcctgtgcgcgtctggagtcgccgtcaccgtcgcttgccgcacgctcgactcggccaagacgctctcggccggggtgcgcaacgcggtgcccatctcgctggacgtgacggacgacgcggcgctcgacgcgcaggtggcgcagcacgacgtcgtcatcagcctgatcccctacaccttccacgcggccgtgatccgcgcggcgatccggcagaagaagcacgtcgtcaccaccagctacgtctcgcccgccatgctggccctcgaccagcagtgcaaggacgccggcatcaccgtcatgaacgagatcggcctcgacccgggcatcgaccacctctacgccgtcaagaccatcgaggacgtccaccgcgccggcggcaaggtcacctccttcctgtcctactgcggcggcctgcccgcccccgagtgctccggcaaccccctcggctacaagttctcctggtccccccgcggtgtcttgctggccctgagaaacgccgccagcttctaccaagacggcaacgtcgtcaatgtcgccggccccgatctgatggccactgccaagccctaccatatctacccaggcttcgccttcgtcgcctaccccaacagggattcgactggttacaaggagcgctacaatatcccagaggcccagaccataatcaggggaaccttgagatatgctgggtttccggagttcgtcaaagttctcgttgacattggcttcctaagcgacgaagtccagccctactgccaggagcccgttgcctggaagcatgtcacgcagcagcttctggccgcgccttcctctactgagaccgacctcattgccaccatcacctccaagactaggtttcaggatgagcagcaaaaatcccacatcttggctggcatgagatggctgggaatgttttcctcggagcagatcattccccgaggcaacccgttggacacgatttgcgccactcttgagaagaagatgcagtacggcgagggagagcgcgatctcgtcatgctgcagcacaagttcgaggtggaactgcaggacggcactaaacagacccggctctcgacgctctgtgactacggtagcactgagcctggcggttactccgccatggccaaacttgttggcgttccatgtgccgttgccgtgcaacaagttctgaatggaaccttatccgacaaaggtgttctcgcgcccatgagcagcaaaatcaacgatgccttgatcaaggaactgaaggagaaatatggcatctactgtaaggaggaaattgtttaaacgtgcaccgagcatgaccaacgcagcatcactattggtttggaagtcatcgcccaaacagacgagtttgaaacaacgaaatgaaatggcttcagcatttgtccgctactgctagactcaaaaatcgaactgaaccggggttttccccagtccacgtgatcagtctcagcaaactatatgccacctcgaaggttgctcgtgataaggcagtggcctcctctgatcgcccaatttccgccacacgggatcccggcattcagatcttaccagaacacaaaactgaatgagagcacgccttcgctggacacaaaaggagatcgggtacaacaatggtgataggtaggcgacagcagatgtccggcaaattccccccttgccatccaatgcattcgaacctgtcatgtgaagtgagtctttccaaaattatagaaatcccgcttaccgatcggattgcaaccccgtccatattccagcgtccttgggaaaccaaacctaatctgtgatgtcatatcacatctctcgatcatgccgtgttgtaccgtcacactatccacagctggaccaatcttgtaatactaattattacgaagtacgganacaagcgctctggatgactttcagagaatacgacgtgcgatataattgcctcaattgacacaggccgctgatgaatcctcccaactctggacatggataacaaattgtacggggtagtatcgcacaactgtgatatgaactcatgacgtgatgcccaatgaatgcaaatgtgacgaaaatcaacacaacggaaacgtgggcgcgacggtataccattataccgttcgctggacagtgtaccacatttgcatattgattaccaaaggacgctgtttggcagcactagtggaacacatgccctgatcagaataaccgattctaaagcaaacgccgatctgaccactacaccctcatccactgaatccatcacacgctttgattgatgcaagctggagcgagagtgaagcgcgactgggagatatagcattatgatcaagcctccgaactgcaatcaaacgcgtggcttcaacgatacggaccaacgcgtgtcttgttaccctgaatgccgggcaggtgtcgcgttagttattgctcacaacaccgcgcctcggggcccgggactttggttctgatatctgacaattcagattacttactaccgaaaagttagtacggtgtcttagagatacggtcagaaaatgagtcacccgtcagctttccagacataccgtagtgaccgaagcaaccaagtgagccattcgagttccatataatttggtctagtgctgcgttgtcagcagtacgtaccttttgccgtgggtagtaacttaactcaggtcgtatgttgcagttctcacccttccaggggcccacaagcaggtgcagttgagcatgaagtcgacttggctcccgcggacggcgcagcctttacaggaggtccaatagtcaccgctgagatacactatcagcacctcttccaccgcggcggccggcgaaaggaatcaacctatcatgaggggtgagctggcccccattgtttgcgaggcaatacccagtgtcgagcctaaacgcatcaagtaagttgtctcgcgggctccggggggatagagggcaggcccgagacgggtgggagtgagaatccataccacctgcatatccaagtcaattctggtaacatcgaaacctggaacaagcaaagatgttggcacatctctttttcttgagaggaacaggggccaaaaactctcagagcaaaactcgcaggaccgctgagaggaggagcaggtgaacgcaagaaataactcacgaccattcgtagtcatacgatgcccactgcaaatcagagtcagcaattgctttatagcttgttttggc

SEQ ID NO: 37958 - DNA, 1050 bp, Muscodor strobelii
  misc_feature: SGI cDNA ID NO. 573183
  misc_feature: Encodes the peptide sequence at SEQ ID NO 37959
atggcgcagcttatccccgctagtagctgggtcggtcataacggcgctgccgcatttgatcttcgtagtgacaccatgaccactcctacagccgccatgttgtctgccatccaggccactaccttgctggacgatgtgtttgaggaagataccactactaacgacctcgaggcgcatgtgtcagctcttgctggtaaagaagccggcctgttcgttctctccggcaccatgggcaaccaggtggctttgcgcgctttggcacgtacacataacccgcccccctctcctctgatctatttgcctccaaacaatgagctaaagacgactttatctaaaggcactatgctaattcatgtttcatacgaagccgggggtgttgcatcgctctgcggagccatgttaacagctttactgcccagcaacggtcgctaccttaccctcgaggatatccaagagaatgttgttcttggcgacgagattcatggctgcccgacgagggtcatcagtcttgtacagcgcatcgccaatttcgcgcggtcgcatggcattcttatgcattgcgatggtgctcggctgtgggaggcagctgcggccggtgcaggatctctgacagatttctgtgctcaattcgatacaattagcttgtgtttttccaaaggtctcggagctccaattggcagcatcgttgtcggtcggaagcccgttatcaaacaagcccggtgggtgcggaaatcaatcgggggtggtcttcgacagtccggcgtcgtcacagcagcggcccgcgtcgccgttgatatgacctttggctcatcgccagacggtcgaaatggcctcctgcccgctacgcatgacacggcccagagagtggcaaaattatggactgatctcggtggacggatggcgaaaccggtagagacgaacatgtgctggttagaccttccgtccatgggctgcagcgtggcgcggttccaggaactcggtcgcgaagcgggcctgaagctgctctcgggccgccttatcactcattgtaagtacattgcttcattctag

SEQ ID NO: 37959 - protein, 349 aa, Muscodor strobelii
  misc_feature: SGI Peptide ID NO. 573183
  misc_feature (20)..(314): Pfam Id: PF01212 Pfam Desc: Beta-eliminating lyase
  misc_feature (121)..(314): Pfam Id: PF01212 Pfam Desc: Beta-eliminating lyase
  misc_feature (20)..(91): Pfam Id: PF01212 Pfam Desc: Beta-eliminating lyase
  misc_feature (6)..(344): NCBI GI: 261357338 Blast Desc: threonine aldolase [Verticillium albo-atrum VaMs.102]
  misc_feature (8)..(342): NCBI GI: 256729648 Blast Desc: [Nectria haematococca mpVI 77-13-4]
  misc_feature (8)..(342): NCBI GI: 171694952 Blast Desc: protein product [Podospora anserina] gi|170947718|emb|CAP59880.1| protein product [Podospora anserina]
  misc_feature (6)..(344): NCBI GI: 46122491 Blast Desc: FG05623.1 [Gibberella zeae PH-1]
  misc_feature (8)..(344): NCBI GI: 156062644 Blast Desc: SS1G_01438 [Sclerotinia sclerotiorum 1980] gi|154696774|gb|EDN96512.1| SS1G_01438 [Sclerotinia sclerotiorum 1980]
  misc_feature (8)..(344): NCBI GI: 154308906 Blast Desc: BC1G_07981 [Botryotinia fuckeliana B05.10] gi|150852607|gb|EDN27799.1| BC1G_07981 [Botryotinia fuckeliana B05.10]
  misc_feature (1)..(340): NCBI GI: 164428706 Blast Desc: NCU00944 [Neurospora crassa OR74A] gi|157072248|gb|EAA35901.2| NCU00944 [Neurospora crassa OR74A]
  misc_feature (8)..(342): NCBI GI: 145614608 Blast Desc: MGG_11389 [Magnaporthe grisea 70-15] gi|145021511|gb|EDK05640.1| MGG_11389 [Magnaporthe grisea 70-15]
  misc_feature (8)..(344): NCBI GI: 115401732 Blast Desc: conserved [Aspergillus terreus NIH2624] gi|114190395|gb|EAU32095.1| conserved [Aspergillus terreus NIH2624]
  misc_feature (8)..(344): NCBI GI: 121716078 Blast Desc: l-allo-threonine aldolase [Aspergillus clavatus NRRL 1] gi|119403805|gb|EAW14222.1| l-allo-threonine aldolase [Aspergillus clavatus NRRL 1]
  misc_feature (3)..(342): SWISSPROT Homolog: EC 5.1.1.1 Alanine racemase
MAQLIPASSWVGHNGAAAFDLRSDTMTTPTAAMLSAIQATTLLDDVFEEDTTTNDLEAHVSALAGKEAGLFVLSGTMGNQVALRALARTHNPPPSPLIYLPPNNELKTTLSKGTMLIHVSYEAGGVASLCGAMLTALLPSNGRYLTLEDIQENVVLGDEIHGCPTRVISLVQRIANFARSHGILMHCDGARLWEAAAAGAGSLTDFCAQFDTISLCFSKGLGAPIGSIVVGRKPVIKQARWVRKSIGGGLRQSGVVTAAARVAVDMTFGSSPDGRNGLLPATHDTAQRVAKLWTDLGGRMAKPVETNMCWLDLPSMGCSVARFQELGREAGLKLLSGRLITHCKYIASF

SEQ ID NO: 37960 - DNA, 3990 bp, Muscodor strobelii
  misc_feature: SGI EST ID NO. CUFF.91901.0
  misc_feature: Variant of the nucleotide sequence at SEQ ID NO 37958
gcggaacacaggcatcgaaacgcgaggaacagtgccggtaggtagaaatgaagcacctatatctcatgagcagggcctggctcattcccctagctgcaccacgccgtctgccgtggcgcggcatagctgctccgagccaggaccggcgcccggtccggacatggtgcctctcgcagggcgcacgtcaacgtcgacatccgaattgctataccccgcccacagtatatagtcatcactcggccgccgtgaaagcgacctcgatttcttcgcacttgaattattctgctttctcttctactctcttcaccactcccatcgctcccatcgctcccacaactgccaccatggcgcagcttatccccgctagtagctgggtcggtcataacggcgctgccgcatttgatcttcgtagtgacaccatgaccactcctacagccgccatgttgtctgccatccaggccactaccttgctggacgatgtgtttgaggaagataccactactaacgacctcgaggcgcatgtgtcagctcttgctggtaaagaagccggcctgttcgttctctccggcaccatgggcaaccaggtggctttgcgcgctttggcacgtacacataacccgcccccctctcctctgatctatttgcctccaaacaatgagctaaagacgactttatctaaaggcactatgctaattcatgtttcagtaagtataactggcttggacaaaaagacccggtagtgccagggtagattccaaaatataagattctggttcttgattgtggcgtaagataaaatactaacttggttcaatacactaggcttacccaacctccccatagcgtgctctgtgatcggcgatcacacatcgtcaagtacgaagccgggggtgttgcatcgctctgcggagccatgttaacagctttactgcccagcaacggtcgctaccttaccctcgaggatatccaagagaatgttgttcttggcgacgagattcatggctgcccgacgagggtcatcagtcttggtaggaactgcagctcggctcgacatcagcaccagcatcccaataggcactgacatctcggctcagtaggttgaggcctccacttccttggtcgcaaatgaagcaaggctttggggatttcgaatcgagcctgtagcgctaacccatcatgttttgttgcttcctttttaggagaatactctcgacgggttgatcatgcctcttgccgaagtacagcgcatcgccaatttcgcgcggtcgcatggcattcttatgcattgcgatggtgctcggctgtgggaggcagctgcggccggtgcaggatctctgacagatttctgtgctcaattcgatacaattagcttgtgtttttccaaaggtctcggagctccaattggcagcatcgttgtcggtcggaagcccgttatcaaacaagcccggtgggtgcggaaatcaatcgggggtggtcttcgacagtccggcgtcgtcacagcagcggcccgcgtcgccgttgatatgacctttggctcatcgccagacggtcgaaatggcctcctgcccgctacgcatgacacggcccagagagtggcaaaattatggactgatctcggtggacggatggcgaaaccggtagagacgaacatgtgctggttagaccttccgtccatgggctgcagcgtggcgcggttccaggaactcggtcgcgaagcgggcctgaagctgctctcgggccgccttatcactcattgtaagtacattgcttcattctagagcaaaggatttgataacggccgaaaatgtgctgtcggagccattcgactccggaccataatgagcagagattcggattaacacgtttttatgcaccagatcaaatcggagaggaggctatcacgaggttgagtcatgtcttcaaccggatagcgcgggagcaaggagtcgatacccaaaaagaaggggatgttagccagggacgtggaccgtatggggggtgaatcgtctcgggataaagcaagaaactatgtcaatcgtggtagtcattacgaactgcgcctcgcgatatcgaggttgggttatagatatgagtacaagcctcatctttcgggtgttaaatacatggctttttggtgcccaaaattttatgccaagacaggacgcctcgttcccaagcccaacgccgttttcgccgtcacctgctgatgaagatggaatggattgaatgaatcaacgggcaagtgcaacctgcggacgagggaagagtccaggatcgactccatggcggcaaaactatatcactacctttttcagtcctagtctttccctcttacctgctctcttcgacttgtacgatggtcgtgctcgattccggcaaatgcttaagcccgttagtttttttgatgtaatagaagcaagattcaatgcgtggctggagattgtccgtaagcactctttccatctattcgctcctgaaggcgtcgctgccgtcaatgttatccgagtctctcatactgatggatggtgacattgcagcaatatacacaactcagacgtgttaattacatggcaacagatcgtcactcgggcgctgtgggttggaagtatcgcgtgtccatagtatatggatgagagcctgtaccgtatcgtaccaacccatggggttattcaagctggagcatcctttggtttcttgtggaagaatgcccctctacttttggacttgcttctcgccttggttgaggacgaggcggcatcgtcattgtatttcgccttgtatatcctagtcgcagatttgagattaagttttcttctggaaaatgaagagagagcgggcaacataccagctgtttccgggcatgctcatgcctttggcttcggccatgcggtagaacttggcgctcttctttagatctttcttgcagccgacaccttgcgcataacagaagcccgcctctgtcagggcgtcgacatccccccaatctgtctcctcattagcaaacggaagcgagaagaccgaggcaggaattcagctcacttccggatatctcgaagcaccggagagccagcgccttgtcctgttcgatgccccagccgttcatgtgactgacgcccagctcgtagatgctcaaggcaaactgggctttgcgggccttcttgtcggcgaagtccatggtcttgccttccttggcctggttctcatcgtcggcgatttcggcgctcgcaatgtcagccgccttacgaagccactcgacgccttctcgttggttgggtcgcatgccccagccatgtctgcatgccaaagcatacaggagcatgccggtggcatcgcctcccatggcggccaggcggaggtggtaggtggattccttgacggagccttcctcgtggcacttgatgcctttgttcaggtgttcttcggcggtcatgtccccagtggtgggcgcgttggaatgctgtgacttgggcggccggatcgtgctggcggaatcgcttgtcgccaccgacatgggggttcgagccctcgccgtggtctgatcgtggaaaggctggctcacggtgcgacccctgggtgcgtcgatggagtggatatcgaaggatggccggctgtcggcggtcgagggcctactggcttcaggggatcgttcgccgtcggccgtcatctcggtggatagcttgctccgttccatagatgggcggcctaggagcgggtcagccacgatgggagcatcctggttgcgcgacgaggagctggagggccgggtaggaggagacgggggcgtctggctgcgttttggctgatgtattgggggcacgaccggcggctcccaggctagcgaggacgaggaggggctgttgcgctgcaacgacttgccccgtggaagggaatacttggagtaaacataagaggcgccccttccgtcctcggacgcgccctcggcaaaggcgtcgctgtgcatgctgacaggcgtgttggccgtgtcatcgg

SEQ ID NO: 37961 - DNA, 1176 bp, Muscodor strobelii
  misc_feature: SGI cDNA ID NO. 573184
  misc_feature: Reduced expression when VOC is produced
  misc_feature: Encodes the peptide sequence at SEQ ID NO 37962
atgcacagcgacgcctttgccgagggcgcgtccgaggacggaaggggcgcctcttatgtttactccaagtattcccttccacggggcaagtcgttgcagcgcaacagcccctcctcgtcctcgctagcctgggagccgccggtcgtgcccccaatacatcagccaaaacgcagccagacgcccccgtctcctcctacccggccctccagctcctcgtcgcgcaaccaggatgctcccatcgtggctgacccgctcctaggccgcccatctatggaacggagcaagctatccaccgagatgacggccgacggcgaacgatcccctgaagccagtaggccctcgaccgccgacagccggccatccttcgatatccactccatcgacgcacccaggggtcgcaccgtgagccagcctttccacgatcagaccacggcgagggctcgaacccccatgtcggtggcgacaagcgattccgccagcacgatccggccgcccaagtcacagcattccaacgcgcccaccactggggacatgaccgccgaagaacacctgaacaaaggcatcaagtgccacgaggaaggctccgtcaaggaatccacctaccacctccgcctggccgccatgggaggcgatgccaccggcatgctcctgtatgctttggcatgcagacatggctggggcatgcgacccaaccaacgagaaggcgtcgagtggcttcgtaaggcggctgacattgcgagcgccgaaatcgccgacgatgagaaccaggccaaggaaggcaagaccatggacttcgccgacaagaaggcccgcaaagcccagtttgccttgagcatctacgagctgggcgtcagtcacatgaacggctggggcatcgaacaggacaaggcgctggctctccggtgcttcgagatatccggaaattggggggatgtcgacgccctgacagaggcgggcttctgttatgcgcaaggtgtcggctgcaagaaagatctaaagaagagcgccaagttctaccgcatggccgaagccaaaggcatgagcatgcccggaaacagctggatatacaaggcgaaatacaatgacgatgccgcctcgtcctcaaccaaggcgagaagcaagtccaaaagtagaggggcattcttccacaagaaaccaaaggatgctccagcttga

SEQ ID NO: 37962 - protein, 391 aa, Muscodor strobelii
  misc_feature: SGI Peptide ID NO. 573184
  misc_feature (312)..(347): Pfam Id: PF08238 Pfam Desc: Sel1 repeat
  misc_feature (276)..(311): Pfam Id: PF08238 Pfam Desc: Sel1 repeat
  misc_feature (212)..(247): Pfam Id: PF08238 Pfam Desc: Sel1 repeat
  misc_feature (1)..(381): NCBI GI: 261356176 Blast Desc: conserved [Verticillium albo-atrum VaMs.102]
  misc_feature (1)..(384): NCBI GI: 256734593 Blast Desc: [Nectria haematococca mpVI 77-13-4]
  misc_feature (1)..(369): NCBI GI: 46105480 Blast Desc: FG00368.1 [Gibberella zeae PH-1]
  misc_feature (1)..(391): NCBI GI: 39950745 Blast Desc: MGG_01244 [Magnaporthe grisea 70-15] gi|145020950|gb|EDK05079.1| MGG_01244 [Magnaporthe grisea 70-15]
  misc_feature (12)..(356): NCBI GI: 116181582 Blast Desc: CHGG_01419 [Chaetomium globosum CBS 148.51] gi|88185716|gb|EAQ93184.1| CHGG_01419 [Chaetomium globosum CBS 148.51]
  misc_feature (24)..(361): NCBI GI: 171696248 Blast Desc: protein product [Podospora anserina] gi|170948366|emb|CAP60530.1| protein product [Podospora anserina]
  misc_feature (19)..(385): NCBI GI: 145229311 Blast Desc: An01g05390 [Aspergillus niger] gi|134055067|emb|CAK43708.1| protein product [Aspergillus niger]
  misc_feature (17)..(385): NCBI GI: 119497225 Blast Desc: cell cycle inhibitor Nif1, [Neosartorya fischeri NRRL 181] gi|119413536|gb|EAW23477.1| cell cycle inhibitor Nif1, [Neosartorya fischeri NRRL 181]
  misc_feature (18)..(385): NCBI GI: 154280122 Blast Desc: [Ajellomyces capsulatus NAm1] gi|150412817|gb|EDN08204.1| [Ajellomyces capsulatus NAm1]
  misc_feature (18)..(385): NCBI GI: 225562896 Blast Desc: conserved [Ajellomyces capsulatus G186AR]
  misc_feature: Useful for introducing or modulating the production of volatile compounds
MHSDAFAEGASEDGRGASYVYSKYSLPRGKSLQRNSPSSSSLAWEPPVVPPIHQPKRSQTPPSPPTRPSSSSSRNQDAPIVADPLLGRPSMERSKLSTEMTADGERSPEASRPSTADSRPSFDIHSIDAPRGRTVSQPFHDQTTARARTPMSVATSDSASTIRPPKSQHSNAPTTGDMTAEEHLNKGIKCHEEGSVKESTYHLRLAAMGGDATGMLLYALACRHGWGMRPNQREGVEWLRKAADIASAEIADDENQAKEGKTMDFADKKARKAQFALSIYELGVSHMNGWGIEQDKALALRCFEISGNWGDVDALTEAGFCYAQGVGCKKDLKKSAKFYRMAEAKGMSMPGNSWIYKAKYNDDAASSSTKARSKSKSRGAFFHKKPKDAPA

SEQ ID NO: 37963 - DNA, 2133 bp, Muscodor strobelii
  misc_feature: SGI EST ID NO. CUFF.91902.1
  misc_feature: Variant of the nucleotide sequence at SEQ ID NO 37961
atgacacggccaacacgcctgtcagcatgcacagcgacgcctttgccgagggcgcgtccgaggacggaaggggcgcctcttatgtttactccaagtattcccttccacggggcaagtcgttgcagcgcaacagcccctcctcgtcctcgctagcctgggagccgccggtcgtgcccccaatacatcagccaaaacgcagccagacgcccccgtctcctcctacccggccctccagctcctcgtcgcgcaaccaggatgctcccatcgtggctgacccgctcctaggccgcccatctatggaacggagcaagctatccaccgagatgacggccgacggcgaacgatcccctgaagccagtaggccctcgaccgccgacagccggccatccttcgatatccactccatcgacgcacccaggggtcgcaccgtgagccagcctttccacgatcagaccacggcgagggctcgaacccccatgtcggtggcgacaagcgattccgccagcacgatccggccgcccaagtcacagcattccaacgcgcccaccactggggacatgaccgccgaagaacacctgaacaaaggcatcaagtgccacgaggaaggctccgtcaaggaatccacctaccacctccgcctggccgccatgggaggcgatgccaccggcatgctcctgtatgctttggcatgcagacatggctggggcatgcgacccaaccaacgagaaggcgtcgagtggcttcgtaaggcggctgacattgcgagcgccgaaatcgccgacgatgagaaccaggccaaggaaggcaagaccatggacttcgccgacaagaaggcccgcaaagcccagtttgccttgagcatctacgagctgggcgtcagtcacatgaacggctggggcatcgaacaggacaaggcgctggctctccggtgcttcgagatatccggaaattggggggatgtcgacgccctgacagaggcgggcttctgttatgcgcaaggtgtcggctgcaagaaagatctaaagaagagcgccaagttctaccgcatggccgaagccaaaggcatgagcatgcccggaaacagctggatatacaaggcgaaatacaatgacgatgccgcctcgtcctcaaccaaggcgagaagcaagtccaaaagtagaggggcattcttccacaagaaaccaaaggatgctccagcttgaataaccccatgggttggtacgatacggtacaggctctcatccatatactatggacacgcgatacttccaacccacagcgcccgagtgacgatctgttgccatgtaattaacacgtctgagttgtgtatattgctgcaatgtcaccatccatcagtatgagagactcggataacattgacggcagcgacgccttcaggagcgaatagatggaaagagtgcttacggacaatctccagccacgcattgaatcttgcttctattacatcaaaaaaactaacgggcttaagcatttgccggaatcgagcacgaccatcgtacaagtcgaagagagcaggtaagagggaaagactaggactgaaaaaggtagtgatatagttttgccgccatggagtcgatcctggactcttccctcgtccgcaggttgcacttgcccgttgattcattcaatccattccatcttcatcagcaggtgacggcgaaaacggcgttgggcttgggaacgaggcgtcctgtcttggcataaaattttgggcaccaaaaagccatgtatttaacacccgaaagatgaggcttgtactcatatctataacccaacctcgatatcgcgaggcgcagttcgtaatgactaccacgattgacatagtttcttgctttatcccgagacgattcaccccccatacggtccacgtccctggctaacatccccttctttttgggtatcgactccttgctcccgcgctatccggttgaagacatgactcaacctcgtgatagcctcctctccgatttgatctggtgcataaaaacgtgttaatccgaatctctgctcattatggtccggagtcgaatggctccgacagcacattttcggccgttatcaaatcctttgctctagaatgaagcaatgtacttactgcgaaaccaattagca

SEQ ID NO: 37964 - DNA, 1476 bp, Muscodor strobelii
  misc_feature: SGI cDNA ID NO. 573185
  misc_feature: Encodes the peptide sequence at SEQ ID NO 37965
atggtcatgcccacttcctcagcactgacggggattcaaaaggagtcttctctatacgtggagcgtgacggatcggacgtgctcgaaccattcttcatcaagccaggctgggtgataatagatgaggcccacaatcaggtcaccgagaccacaatagtctggcaattcatcgaaaagttgctctgtcgagcaacgtcatctacccatctgatttctgcaagtgggacaccgatccgacgcagtccgtgggctttgaagccctttattaatatcgtcacgtcgcgagcggtgcggcactggagagaccctccccgatacgatccacgaaaatacttcgacctatgggcgagggaaagtgactggctcgttgcacataggtcagatgccgactccgctgacgagggaagacggaatgcatatcagaaacgctttcatgacagtaagctactcggcagaaaggttttgaaaccctacatgatccagcgacatagtcattacaggtttcttgggtttccagtcgtcccgctgcctatgatgagcgtggagcttattcagtgttctaaatttcctgctgcttatttcgaagaaatcaggaacctcatcagcatgtcgagacgacaattaaacgagcggctggagaagaagctaatgtcctggcgagctttgcactctagcagccgtagtcctgagcctactatggagcatgtcatttcggaaatggacaaaggtttcggccgcttctacgacttgggcctgtgcgctacctttccagccctcgccaagatgctactctctggccggccactacgctttcggtctcaagatatcgactgcgacttgaacgccatgtcaaatgccgacctccgcagtcatccgctctggccgcataaggacataatcaaaaccggcagccagaaaatggacttcatcatacagaaaattcaagatatgcaaaacgatgatgagcgacacaaggacgtagcaagtgatcgcaatgtcttgaggaagaaaatgatcatatttgctctctcgcccgttactgccttcctcattgccttcatactacggcacgagctgcctcgtacacgccaaaaattggtcctcgccagaaaccctccatcaaagcgtggtgtgctttatggcccattttgtcgttcaaccgacgaggaggtcctagaagaccgagatcccaatgacccccttatcctagtaacaaccactggcgttgctggagagggcttcaatctgacgcgagccaactatgtgattctggccgaacccgctttttcgaagcaagttgaggaccaagcgtttcatcggatccatcgatacggccagcaggcaacgactcacctcttcagcctgtacagctcgtggaatcccgccgagaggatcgtgcgaagccgccaggacgtacgctccagcctgtttctagacgagagtgtttggatgcttcctggcgcagaggtcgaatga

SEQ ID NO: 37965 - protein, 491 aa, Muscodor strobelii
  misc_feature: SGI Peptide ID NO. 573185
  misc_feature (35)..(483): NCBI GI: 116200880 Blast Desc: CHGG_10985 [Chaetomium globosum CBS 148.51] gi|88175699|gb|EAQ83167.1| CHGG_10985 [Chaetomium globosum CBS 148.51]
  misc_feature (212)..(483): NCBI GI: 116208558 Blast Desc: [Chaetomium globosum CBS 148.51] gi|88184169|gb|EAQ91637.1| [Chaetomium globosum CBS 148.51]
  misc_feature (35)..(466): NCBI GI: 171680072 Blast Desc: protein product [Podospora anserina] gi|170939662|emb|CAP64889.1| protein product [Podospora anserina]
  misc_feature (232)..(483): NCBI GI: 145610480 Blast Desc: [Magnaporthe grisea 70-15] gi|145017755|gb|EDK02118.1| [Magnaporthe grisea 70-15]
  misc_feature (232)..(483): NCBI GI: 149209377 Blast Desc: MGCH7_ch7g180 [Magnaporthe grisea 70-15] gi|86196135|gb|EAQ70773.1| MGCH7_ch7g180 [Magnaporthe grisea 70-15]
  misc_feature (378)..(471): NCBI GI: 96979867 Blast Desc: global transactivator [Antheraea pernyi nucleopolyhedrovirus] gi|94983400|gb|ABF50340.1| global transactivator [Antheraea pernyi nucleopolyhedrovirus]
  misc_feature (378)..(471): NCBI GI: 146229770 Blast Desc: global transactivator-like protein [Antheraea pernyi nucleopolyhedrovirus]
  misc_feature (399)..(481): NCBI GI: 19115158 Blast Desc: ATP-dependent DNA helicase [Schizosaccharomyces pombe] gi|74675924|sp|O13762.1|YF2C_SCHPO RecName: Full=Uncharacterized ATP-dependent helicase C17A2.12 gi|2414584|emb|CAB16565.1| DNA ()
  misc_feature (336)..(447): NCBI GI: 119493735 Blast Desc: SNF2 family N-terminal domain protein [Neosartorya fischeri NRRL 181] gi|119412115|gb|EAW22057.1| SNF2 family N-terminal domain protein [Neosartorya fischeri NRRL 181]
  misc_feature (390)..(477): NCBI GI: 145532411 Blast Desc: [Paramecium tetraurelia strain d4-2] gi|124419638|emb|CAK84564.1| protein product [Paramecium tetraurelia]
MVMPTSSALTGIQKESSLYVERDGSDVLEPFFIKPGWVIIDEAHNQVTETTIVWQFIEKLLCRATSSTHLISASGTPIRRSPWALKPFINIVTSRAVRHWRDPPRYDPRKYFDLWARESDWLVAHRSDADSADEGRRNAYQKRFHDSKLLGRKVLKPYMIQRHSHYRFLGFPVVPLPMMSVELIQCSKFPAAYFEEIRNLISMSRRQLNERLEKKLMSWRALHSSSRSPEPTMEHVISEMDKGFGRFYDLGLCATFPALAKMLLSGRPLRFRSQDIDCDLNAMSNADLRSHPLWPHKDIIKTGSQKMDFIIQKIQDMQNDDERHKDVASDRNVLRKKMIIFALSPVTAFLIAFILRHELPRTRQKLVLARNPPSKRGVLYGPFCRSTDEEVLEDRDPNDPLILVTTTGVAGEGFNLTRANYVILAEPAFSKQVEDQAFHRIHRYGQQATTHLFSLYSSWNPAERIVRSRQDVRSSLFLDESVWMLPGAEVE

SEQ ID NO: 37966 - DNA, 1945 bp, Muscodor strobelii
  misc_feature: SGI EST ID NO. CUFF.90963.0
  misc_feature: Variant of the nucleotide sequence at SEQ ID NO 37964
aaagagggagacacaagtcacattatcatggtcatgcccacttcctcagcactgacggggattcaaaaggagtcttctctatacgtggagcgtgacggatcggacgtgctcgaaccattcttcatcaagccaggctgggtgataatagatgaggcccacaatcaggtcaccgagaccacaatagtctggcaattcatcgaaaagttgctctgtcgagcaacgtcatctacccatctgatttctgcaagtgggacaccgatccgacgcagtccgtgggctttgaagccctttattaatatcgtcacgtcgcgagcggtgcggcactggagagaccctccccgatacgatccacgaaaatacttcgacctatgggcgagggaaagtgactggctcgttgcacataggtcagatgccgactccgctgacgagggaagacggaatgcatatcagaaacgctttcatgacagtaagctactcggcagaaaggttttgaaaccctacatgatccagcgacatagtcattacaggtttcttgggtttccagtcgtcccgctgcctatgatgagcgtggagcttattcagtgttctaaatttcctgctgcttatttcgaagaaatcaggaacctcatcagcatgtcgagacgacaattaaacgagcggctggagaagaagctaatgtcctggcgagctttgcactctagcagccgtagtcctgagcctactatggagcatgtcatttcggaaatggacaaaggtttcggccgcttctacgacttgggcctgtgcgctacctttccagccctcgccaagatgctactctctggccggccactacgctttcggtctcaagatatcgactgcgacttgaacgccatgtcaaatgccgacctccgcagtcatccgctctggccgcataaggacataatcaaaaccggcagccagaaaatggacttcatcatacagaaaattcaagatatgcaaaacgatgatgagcgacacaaggacgtagcaagtgatcgcaatgtcttgaggaagaaaatgatcatatttgctctctcgcccgttactgccttcctcattgccttcatactacggcacgagctgcctcgtacacgccaaaaattggtcctcgccagaaaccctccatcaaagcgtggtgtgctttatggcccattttgtcgttcaaccgacgaggaggtcctagaagaccgagatcccaatgacccccttatcctagtaacaaccactggcgttgctggagagggcttcaatctgacgcgagccaactatgtgattctggccgaacccgctttttcgaagcaagttgaggaccaagcgtttcatcggatccatcgatacggccagcaggcaacgactcacctcttcagcctgtacagctcgtggaatcccgccgagaggatcgtgcgaagccgccaggacgtacgctccagcctgtttctagacgagagtgtttggatgcttcctggcgcagaggtcgaatgatgaccatattgcacccatgtagccatactccatttccagcatatgtttcggccatggctaattgctatgctgtatgtgaggaatttggttttctattataggtcgctttgtcgggtgtcgttgttcctgaacaagattatcgtttcgacataccgaatatgcggagtagccctgaatctgggaaaggtttgtatgacgaatgtctttgtcgttggtcttgtcgagcaatcgtgctgtcatattgttgtgagataattttgtcgctgtttcgcatctgcagtggcctactgccattagcttgaattgccgcatataaaagataaggttgttcttggagaaggactacggcgtaaggcaaatcataaaataaagacttggagctagtatcgaggagtgaacccatgttttaacaaactatagcttctaaatcactataccaagt

SEQ ID NO: 37967 - DNA, 1485 bp, Muscodor strobelii
  misc_feature: SGI cDNA ID NO. 573186
  misc_feature: Reduced expression when VOC is produced
  misc_feature: Encodes the peptide sequence at SEQ ID NO 37968
atggcattcttccgtcaaatgtcagcttttcttgcggcggcttcgcctgtcgttggccttctaggacatcgcgacgcagcggcaacagcatgtcaaagcttgaccgtcgccctggggtccgacaaaatcgctaccccgggtctattggcacaggagtacgactcgagccgcaaagactactggaatacacggttagcgaaaaatgcgccgacctgcgttgtctacactgccaatgcgcaggacgtctcaaccgctctcaccatcatccgacagaccggttcattgttcgcggtcaagtctcaaggacacaacactaacgactacttcgccactgtcgacgatggtgttcttatcgacttgacgaaaatgaccggcaagtcctatgatgcgactactacactcgcgacgtatgagcctggaagcaactggggcgagctatatgattactatattgactacggtgtcactgtcgttggtgggcgtattgctggtgtcggcaccggccttgcgcttctcggcggcatgagttttatttcgccccagtacggaatggcttgtgacagcttcagggaactcgagatagtcttacccaatggcaccatcacaacagcctcgagcactacaaatcccgacctgttctttggtctaaaggctggtggaggtaacgcctacggtgtggtcaccaagtacactacacaagcccgagctattgggacattttatgctggaaacgtcatatatgtcttcgatcagcacgaggcaattctgaacgcaacacgagacttcatcctctacaacacagacccaaaggcggcgatcctcatgaacgccaacatcctcacaacgcccgatgtggaccttggactcgatgaggctgtcgtcatgttcctggtctacgatggcgaggatcccggtgatgttttctccaacttcaccacaattccctatctcatcaacaccctggggcccaagcagtacaccgatgtagccaatttgcctgtccctggagtagccaagttgagcgcagggtacaactatttccgtatcggtgtacactacgccgacgatcaaagttatctgacagccttcaacgccttccgtcaatgggcgctggacaacaagggcaaatacactttcatccatcttgactacaaccctgtcgccaagagtctcacagacgctagcgcagcgcagggcggcaacgcgatggagatgcctaatggcccttggttttgggccgagtacactcttgcccagcctgagcttactaccgacgcacaatacaatgccacgcaggaaagttttaaggcgctcgttgaaagcacaccaaatgctgcaaacttacctttctttctaaacgaggcggcatatgatcaagatccgctcaagactttcgcgagctatagtcggttgcagcagatcaaggctaaatatgatcccgatggtttcttttctagcaagactggaggctggtcatttagctga

SEQ ID NO: 37968 - protein, 494 aa, Muscodor strobelii
  misc_feature: SGI Peptide ID NO. 573186
  misc_feature (70)..(205): Pfam Id: PF01565 Pfam Desc: FAD binding domain
  misc_feature (468)..(484): Pfam Id: PF08031 Pfam Desc: Berberine and berberine like
  misc_feature (10)..(493): NCBI GI: 255933688 Blast Desc: Pc12g14170 [Penicillium chrysogenum Wisconsin 54-1255] gi|211582842|emb|CAP81044.1| Pc12g14170 [Penicillium chrysogenum Wisconsin 54-1255]
  misc_feature (28)..(494): NCBI GI: 212534030 Blast Desc: conserved [Penicillium marneffei ATCC 18224] gi|210069570|gb|EEA23660.1| conserved [Penicillium marneffei ATCC 18224]
  misc_feature (3)..(486): NCBI GI: 67541274 Blast Desc: AN6807.2 [Aspergillus nidulans FGSC A4] gi|40739016|gb|EAA58206.1| AN6807.2 [Aspergillus nidulans FGSC A4] gi|259480403|tpe|CBF71501.1| TPA: conserved [Aspergillus FGSC
  misc_feature (20)..(490): NCBI GI: 39960153 Blast Desc: MGG_09376 [Magnaporthe grisea 70-15] gi|145014333|gb|EDJ98901.1| MGG_09376 [Magnaporthe grisea 70-15]
  misc_feature (7)..(493): NCBI GI: 46138233 Blast Desc: FG10631.1 [Gibberella zeae PH-1]
  misc_feature (49)..(491): NCBI GI: 171677732 Blast Desc: protein product [Podospora anserina] gi|170936934|emb|CAP61593.1| protein product [Podospora anserina]
  misc_feature (8)..(493): NCBI GI: 115386972 Blast Desc: [Aspergillus terreus NIH2624] gi|114191025|gb|EAU32725.1| [Aspergillus terreus NIH2624]
  misc_feature (7)..(493): NCBI GI: 169616666 Blast Desc: SNOG_11508 [Phaeosphaeria nodorum SN15] gi|160703237|gb|EAT81216.2| SNOG_11508 [Phaeosphaeria nodorum SN15]
  misc_feature (27)..(493): NCBI GI: 145229953 Blast Desc: An01g08630 [Aspergillus niger] gi|134055398|emb|CAK43952.1| protein product [Aspergillus niger]
  misc_feature (53)..(493): NCBI GI: 154286082 Blast Desc: [Ajellomyces capsulatus NAm1] gi|150407477|gb|EDN03018.1| [Ajellomyces capsulatus NAm1]
  misc_feature: Useful for introducing or modulating the production of volatile compounds
MAFFRQMSAFLAAASPVVGLLGHRDAAATACQSLTVALGSDKIATPGLLAQEYDSSRKDYWNTRLAKNAPTCVVYTANAQDVSTALTIIRQTGSLFAVKSQGHNTNDYFATVDDGVLIDLTKMTGKSYDATTTLATYEPGSNWGELYDYYIDYGVTVVGGRIAGVGTGLALLGGMSFISPQYGMACDSFRELEIVLPNGTITTASSTTNPDLFFGLKAGGGNAYGVVTKYTTQARAIGTFYAGNVIYVFDQHEAILNATRDFILYNTDPKAAILMNANILTTPDVDLGLDEAVVMFLVYDGEDPGDVFSNFTTIPYLINTLGPKQYTDVANLPVPGVAKLSAGYNYFRIGVHYADDQSYLTAFNAFRQWALDNKGKYTFIHLDYNPVAKSLTDASAAQGGNAMEMPNGPWFWAEYTLAQPELTTDAQYNATQESFKALVESTPNAANLPFFLNEAAYDQDPLKTFASYSRLQQIKAKYDPDGFFSSKTGGWSFS

SEQ ID NO: 37969 - DNA, 2649 bp, Muscodor strobelii
  misc_feature: SGI EST ID NO. CUFF.91005.0
  misc_feature: Variant of the nucleotide sequence at SEQ ID NO 37967
cagccaacgacgtcgcttccaagatttcctcgtacagtatcatcctgcggacctgtataacctggtttcctgaccgcctaggtatgcaagatttgtctggacgcaatcacgaacaatgccttaattgcggggagtattcgtctatgaccaatttgttccaaacttgacatattgaacatacgagcaccgggtaggctccagcgttgttcgggctggtcggcgatttggtagacggtctgactgtgtcaaatcttcgcttgcggcgagtttcgacctcttgactcgccattggaccacttactttcagctccctctcttctcccaatcacatgatgtttttgactccagaataacccaatttagatgaatgcgaacggaatggaagcaccgcatcgcgatggatccacatgcaccggcatgtcggttaacgcttcttgaggccaaatttaacaacgcccaggtagcgaagcgaggaattccaagtttttcgttctgcggcgatccgttcgagatcatagcctgctgtcaaagctgttagccccatggctgctcccgacattacatgcactatctcgggcactatcgcggatgctagtgtagccgatgacctaggtggcttgctagtggtcaataattcgagacagcatcactagcatcgacaatttcaagtctagcggctcgaaaagtgctttgccgaccctgttggactcgtggccaccccctttgcggtatggcttcatggagttgcttcctgctcccgaggagaagtcttatataatcgccatgggcttcttcctgccgctcaatggtttggcgccaccggcgttggacgtcaacatcgtggcttttaggtcttgagcgatcgtgagcttcttcggagatggcattcttccgtcaaatgtcagcttttcttgcggcggcttcgcctgtcgttggccttctaggacatcgcgacgcagcggcaacagcatgtcaaagcttgaccgtcgccctggggtccgacaaaatcgctaccccgggtctattggcacaggagtacgactcgagccgcaaagactactggaatacacggttagcgaaaaatgcgccgacctgcgttgtctacactgccaatgcgcaggacgtctcaaccgctctcaccatcatccgacagaccggttcattgttcgcggtcaagtctcaaggacacaacactaacgactacttcgccactgtcgacgatggtgttcttatcgacttgacgaaaatgaccggcaagtcctatgatgcgactactacactcgcgacgtatgagcctggaagcaactggggcgagctatatgattactatattgactacggtgtcactgtcgttggtgggcgtattgctggtgtcggcaccggccttgcgcttctcggcggcatgagttttatttcgccccagtacggaatggcttgtgacagcttcagggaactcgagatagtcttacccaatggcaccatcacaacagcctcgagcactacaaatcccgacctgttctttggtctaaaggctggtggaggtaacgcctacggtgtggtcaccaagtacactacacaagcccgagctattgggacattttatgctggaaacgtcatatatgtcttcgatcagcacgaggcaattctgaacgcaacacgagacttcatcctctacaacacagacccaaaggcggcgatcctcatgaacgccaacatcctcacaacgcccgatgtggaccttggactcgatgaggctgtcgtcatgttcctggtctacgatggcgaggatcccggtgatgttttctccaacttcaccacaattccctatctcatcaacaccctggggcccaagcagtacaccgatgtagccaatttgcctgtccctggagtagccaagttgagcgcagggtacaactatttccgtatcggtgtacactacgccgacgatcaaagttatctgacagccttcaacgccttccgtcaatgggcgctggacaacaagggcaaatacactttcatccatcttgactacaaccctgtcgccaagagtctcacagacgctagcgcagcgcagggcggcaacgcgatggagatgcctaatggcccttggttttgggccgagtacactcttgcccagcctgagcttactaccgacgcacaatacaatgccacgcaggaaagttttaaggcgctcgttgaaagcacaccaaatgctgcaaacttacctttctttctaaacgaggcggcatatgatcaagatccgctcaagactttcgcgagctatagtcggttgcagcagatcaaggctaaatatgatcccgatggtttcttttctagcaagactggaggctggtcatttagctgattgatgaatggaagagaggagacatactgatctactgtttcttttcatgcttaataggcaatacatttagcgtagcggagatatgatgacactgttgaatacgacatatgaacttataagtgcttcagatcgtcaagttgtaaggttgttaaaaagcgacccgaacaaaatatttggcttcaagagactcatgactgcaagtatttctctttctatgtggtggtcgcctttatttgcgtacgtagatgtaccgttaataatataaggtttttaatagtacggaa

SEQ ID NO: 37970 - DNA, 1404 bp, Muscodor strobelii
  misc_feature: SGI cDNA ID NO. 573187
  misc_feature: Reduced expression when VOC is produced
  misc_feature: Encodes the peptide sequence at SEQ ID NO 37971
atggaggcagagaaagaaccgccggctaccatggaggaagcaagagcgccacatgatgaagtaacccctacgaaacccattcattccttggtcctggatgccggacctctcatcaagaatgaccctccagtcagcagtctgctcgcccaagcgcacgagctctacacactgccctcagtcgtatcagaaatcaaagacgcagcgacgagatcccgagtggaaactacattactaccattcttgaaactacggaatccacgacccgagagtgtcaagtttgtctcagactttgcacggcgcactggtgatctcgaggttttgagcaggcctgatattcacttaatggccttggcttacgagctggagtgtgagaggaatggtggtgattggagattacgcaagaccccaggtcagaagactgtgaatgggaagtctcctgccgcaatagaacgggaaaaggaggcggaggcgaatgcgaatgagacacctcgtcctgaggtcacagaggaagctccgagagaggaatcgactatcaacggagggacctcgggtatagtagaagagactcttgacgagaaaccttcaattccagaatccactgaggcgccagtggatacaggtcctgaagagactctgcccgtcgtaccacaagaaagtatcacacaggctcttgactctttgagcatagagccttcagagataccagcaatcgacttcgttgaagataaggcgaaagagggagagaagagaggccatgacgaagatgatgacgatgcaggctggatcacgccgtctaatctcaagaaacaccaagcgaaagatcaggtcggagcacctgaacaacccatccagcgggttctacaagccgcaattctcacatcagattacgcaatgcagaatgtgctgttacgcatgaacatcaatctcattagctctggcctgtcgcgcataacacgggtcaagacatgggtccttcgatgccacggttgcttccagatcacacgcgacacatccaagcagttctgccccaggtgcggacaggccactctgacgcgcgtcagttgctcaacggaccaggcgggcaacttcaccgtccatctgaagaagaatttccagtggaataacagaggtaatgtctacagtgtgccgaaaccagtccacggctcgccaagtggaaaagcaagagggccgggaggtggcaagaatggatggggccgcgagttgattttcgctgaggatcaaaaggaatacctgaagaagtcgacagaacagaagagggcgaagcagacggacttaatggatgaggattacctgccaagtatcttgactggaaacaggcagtctggtccaggcagggtaaaggttggcgcgggacggaatgtcaactcgaggaaacggttttag

SEQ ID NO: 37971 - protein, 467 aa, Muscodor strobelii
  misc_feature: SGI Peptide ID NO. 573187
  misc_feature (316)..(388): Pfam Id: PF08772 Pfam Desc: Nin one binding (NOB1) Zn-ribbon like
  misc_feature (7)..(466): NCBI GI: 39958407 Blast Desc: MGG_09254 [Magnaporthe grisea 70-15] gi|145013299|gb|EDJ97940.1| MGG_09254 [Magnaporthe grisea 70-15]
  misc_feature (25)..(466): NCBI GI: 46133795 Blast Desc: FG09037.1 [Gibberella zeae PH-1]
  misc_feature (22)..(466): NCBI GI: 171693061 Blast Desc: protein product [Podospora anserina] gi|170946479|emb|CAP73280.1| protein product [Podospora anserina]
  misc_feature (25)..(466): NCBI GI: 256727829 Blast Desc: NECHADRAFT_46258 [Nectria haematococca mpVI 77-13-4]
  misc_feature (25)..(466): NCBI GI: 164423211 Blast Desc: NCU08904 [Neurospora crassa OR74A] gi|157069993|gb|EAA28740.2| conserved [Neurospora crassa OR74A]
  misc_feature (25)..(466): NCBI GI: 28950375 Blast Desc: related to art-4 protein [Neurospora crassa]
  misc_feature (24)..(466): NCBI GI: 156050571 Blast Desc: SS1G_07873 [Sclerotinia sclerotiorum 1980] gi|154692273|gb|EDN92011.1| SS1G_07873 [Sclerotinia sclerotiorum 1980]
  misc_feature (25)..(465): NCBI GI: 261357890 Blast Desc: 20S-pre-rRNA D-site endonuclease NOB1 [Verticillium albo-atrum VaMs.102]
  misc_feature (24)..(466): NCBI GI: 154308765 Blast Desc: BC1G_07805 [Botryotinia fuckeliana B05.10] gi|150852756|gb|EDN27948.1| BC1G_07805 [Botryotinia fuckeliana B05.10]
  misc_feature (25)..(466): NCBI GI: 115432990 Blast Desc: conserved [Aspergillus terreus NIH2624] gi|114189484|gb|EAU31184.1| conserved [Aspergillus terreus NIH2624]
  misc_feature: Useful for introducing or modulating the production of volatile compounds
MEAEKEPPATMEEARAPHDEVTPTKPIHSLVLDAGPLIKNDPPVSSLLAQAHELYTLPSVVSEIKDAATRSRVETTLLPFLKLRNPRPESVKFVSDFARRTGDLEVLSRPDIHLMALAYELECERNGGDWRLRKTPGQKTVNGKSPAAIEREKEAEANANETPRPEVTEEAPREESTINGGTSGIVEETLDEKPSIPESTEAPVDTGPEETLPVVPQESITQALDSLSIEPSEIPAIDFVEDKAKEGEKRGHDEDDDDAGWITPSNLKKHQAKDQVGAPEQPIQRVLQAAILTSDYAMQNVLLRMNINLISSGLSRITRVKTWVLRCHGCFQITRDTSKQFCPRCGQATLTRVSCSTDQAGNFTVHLKKNFQWNNRGNVYSVPKPVHGSPSGKARGPGGGKNGWGRELIFAEDQKEYLKKSTEQKRAKQTDLMDEDYLPSILTGNRQSGPGRVKVGAGRNVNSRKRF

SEQ ID NO: 37972 - DNA, 204 bp, Muscodor strobelii
  misc_feature: SGI cDNA ID NO. 573188
  misc_feature: Encodes the peptide sequence at SEQ ID NO 37973
atgcatctgatgtacacaatgaacgacgacggtcgccggacctacaccctcaagaaggtcctcagcggcaccgtcacccggtccgcacaccccgcgcgcttctcccccgacgacaagtggtcgcgccagcgtgtcacgctgaagaagcgcttcggtcttctgttgacgcagcaaaagaacaaggtcgccgagaacaaccagtga

SEQ ID NO: 37973 - protein, 67 aa, Muscodor strobelii
  misc_feature: SGI Peptide ID NO. 573188
  misc_feature (3)..(52): Pfam Id: PF04135 Pfam Desc: Nucleolar RNA-binding protein, Nop10p family
  misc_feature (1)..(63): NCBI GI: 212535398 Blast Desc: ribosome biogenesis protein nop10, [Penicillium marneffei ATCC 18224] gi|210070254|gb|EEA24344.1| ribosome biogenesis protein nop10, [Penicillium marneffei ATCC 18224]
  misc_feature (1)..(63): NCBI GI: 242792928 Blast Desc: ribosome biogenesis protein nop10, [Talaromyces stipitatus ATCC 10500] gi|218718645|gb|EED18065.1| ribosome biogenesis protein nop10, [Talaromyces stipitatus ATCC 10500]
  misc_feature (1)..(58): NCBI GI: 238844267 Blast Desc: H/ACA ribonucleoprotein complex subunit 3 [Microsporum canis CBS 113480]
  misc_feature (1)..(62): NCBI GI: 240109589 Blast Desc: nucleolar RNA-binding family protein [Coccidioides posadasii C735 delta SOWgp]
  misc_feature (1)..(63): NCBI GI: 121718206 Blast Desc: Nop10 family nucleolar RNA-binding protein [Aspergillus clavatus NRRL 1] gi|119404330|gb|EAW14706.1| Nop10 family nucleolar RNA-binding protein [Aspergillus clavatus NRRL
  misc_feature (1)..(64): NCBI GI: 255949112 Blast Desc: Pc22g13990 [Penicillium chrysogenum Wisconsin 54-1255] gi|211592340|emb|CAP98687.1| Pc22g13990 [Penicillium chrysogenum Wisconsin 54-1255]
  misc_feature (1)..(58): NCBI GI: 225557178 Blast Desc: Nop10 family nucleolar RNA-binding protein [Ajellomyces capsulatus G186AR]
  misc_feature (1)..(58): NCBI GI: 258570959 Blast Desc: H/ACA ribonucleoprotein complex subunit 3 [Uncinocarpus reesii 1704] gi|237904553|gb|EEP78954.1| H/ACA ribonucleoprotein complex subunit 3 [Uncinocarpus reesii 1704]
  misc_feature (1)..(61): NCBI GI: 119498753 Blast Desc: Nop10 family nucleolar RNA-binding protein [Neosartorya fischeri NRRL 181] gi|119414298|gb|EAW24237.1| Nop10 family nucleolar RNA-binding protein [Neosartorya fischeri NRRL
  misc_feature (1)..(61): NCBI GI: 225683509 Blast Desc: H/ACA ribonucleoprotein complex subunit 3 [Paracoccidioides brasiliensis Pb03]
MHLMYTMNDDGRRTYTLKKVLSGTVTRSAHPARFSPDDKWSRQRVTLKKRFGLLLTQQKNKVAENNQ

SEQ ID NO: 37974 - DNA, 2336 bp, Muscodor strobelii
  misc_feature: SGI EST ID NO. CUFF.91034.0
  misc_feature: Variant of the nucleotide sequence at SEQ ID NO 37972
tcacaactacgaccgccacttcctcgtcgacgacccaactccgtccgctccttcttccagctacaccgcttcctccaaaatctgtatctcaagcagaaacataaaacataccgtcaaaatgcatctgatgtacacaatgaacgacgacggtcgccggacctacaccctcaagaaggtcctcagcggcaccgtcacccggtccgcacaccccgcgcgcttctcccccgacgacaagtggtcgcgccagcgtgtcacgctgaagaagcgcttcggtcttctgttgacgcagcaaaagaacaaggtcgccgagaacaaccagtgatcaatggctgtaaccgatgatcgactcaacattagcgcttcattcaagcaatctgaaacaaggatgtcgtagtcaattctccacagggtcgccgcattatgtttccgggcgggacggcgttttggcgtgatagggaaaaggaggaccacattgtggaaaatacaatagggcaatgagcaacgtcttgctcgttttacatgacaagtcatcagtctcgagatcctgttctggtgtcatcagcattagatcctcgtcgtgtgtgctacaattgcctacaacgttggactgcttcttggtcgtaggaggatagatgtcacgaaaagtcagtgatcaaatacaaaaaaaactctgagaagtaaaattggtatcactctattttgtcattgtctcgtgtgctctaaaaccgtttcctcgagttgacattccgtcccgcgccaacctttaccctgcctggaccagactgcctgtttccagtcaagatacttggcaggtaatcctcatccattaagtccgtctgcttcgccctcttctgttctgtcgacttcttcaggtattccttttgatcctcagcgaaaatcaactcgcggccccatccattcttgccacctcccggccctcttgcttttccacttggcgagccgtggactggtttcggcacactgtagacattacctctgttattccactggaaattcttcttcagatggacggtgaagttgcccgcctggtccgttgagcaactgacgcgcgtcagagtggcctgtccgcacctggggcagaactgcttggatgtgtcgcgtgtgatctggaagcaaccgtggcatcgaaggacccatgtcttgacccgtgttatgcgcgacaggccagagctaatgagattgatgttcatgcgtaacagcacattctgcattgcgtaatctgatgtgagaattgcggcttgtagaacccgctggatgggttgttcaggtgctccgacctgatctttcgcttggtgtttcttgagattagacggcgtgatccagcctgcatcgtcatcatcttcgtcatggcctctcttctctccctctttcgccttatcttcaacgaagtcgattgctggtatctctgaaggctctatgctcaaagagtcaagagcctgtgtgatactttcttgtggtacgacgggcagagtctcttcaggacctgtatccactggcgcctcagtggattctggaattgaaggtttctcgtcaagagtctcttctactatacccgaggtccctccgttgatagtcgattcctctctcggagcttcctctgtgacctcaggacgaggtgtctcattcgcattcgcctccgcctccttttcccgttctattgcggcaggagacttcccattcacagtcttctgacctggggtcttgcgtaatctccaatcaccaccattcctctcacactccagctcgtaagccaaggccattaagtgaatatcaggcctgctcaaaacctcgagatcaccagtgcgccgtgcaaagtctgagacaaacttgacactctcgggtcgtggattccgtagtttcaagaatggtagtaatgtagtttccactcgggatctcgtcgctgcgtctttgatttctgatacgactgagggcagtgtgtagagctcgtgcgcttgggcgagcagactgctgactggagggtcattcttgatgagaggtccggcatccaggaccaaggaatgaatgggtttcgtaggggttacttcatcatgtggcgctcttgcttcctccatggtagccggcggttctttctctgcctccatttcgtcagggtatctcaagtgaatgtgtgtttggtgcgaagaaggaggtcactacaaaaccagggtatcgattgcggcgatagcggggtgtctagggactctgccaaatttcagatttggtggggtccgcatgatgatggaaattttggcggcatgtcatggcagaaattctatcgataacagaaaccccaagttggaatacgtacaccccgg

SEQ ID NO: 37975 - DNA, 810 bp, Muscodor strobelii
  misc_feature: SGI cDNA ID NO. 573189
  misc_feature: Elevated expression when VOC is produced
  misc_feature: Encodes the peptide sequence at SEQ ID NO 37976
atggtccgcttcgtgacagacaaccgtgtggtcgacaagaccaagtcggttcagatgcaggtcatctgcgccggccttccgcgcgccgcaacgagttccatgcaagcagcggtcgaacgactcggctacacgccatgtctgcataacgcgcacattctgccacacgccgaccgcacagagttcatgctcaacgcgatgcgagagcaggattccgccatgcgccaaaaaatggtcgcggagatgatggctggacacgcttctgtcgctgatctgccggctatggtgtttgtgcccgagctcatggacttgtaccccaacgccgccatcgtgctgaattcgcgcgacaacggcaaaatctgggctcagtcagctaaggagtcgttcgatttcttcttctcctggaagttctacgcgctttgcttctggtttgccgctgataggatgtggtataatgtcaatgcgcaggtgatcaaggattatgcgaagaagggctattgggtgtttagtgagcagatgtatgatgagcatcgagcgatggtgctgcgcgaggcagagaaacgaggaaggcctgtgctggaattttggccgcagcagggatgggaaccgctctgtgatttcttggggaaggatgttcccgatgagccattcccgaagcttaatgagaagaagacgttccagattgtaaggaggatattcattacgaaggggatcctgagctggatggcggtagggactggcgtctgggcgagttggaggtatgggccgtcttcttttcgatacgctcgagacctatggtcagcatatgtatag

SEQ ID NO: 37976 - protein, 269 aa, Muscodor strobelii
  misc_feature: SGI Peptide ID NO. 573189
  misc_feature (2)..(259): NCBI GI: 256728311 Blast Desc: NECHADRAFT_53787 [Nectria haematococca mpVI 77-13-4]
  misc_feature (2)..(261): NCBI GI: 46114848 Blast Desc: FG03266.1 [Gibberella zeae PH-1]
  misc_feature (1)..(254): NCBI GI: 255945473 Blast Desc: Pc20g10100 [Penicillium chrysogenum Wisconsin 54-1255] gi|211588239|emb|CAP86339.1| Pc20g10100 [Penicillium chrysogenum Wisconsin 54-1255]
  misc_feature (2)..(255): NCBI GI: 256725018 Blast Desc: NECHADRAFT_77088 [Nectria haematococca mpVI 77-13-4]
  misc_feature (19)..(243): NCBI GI: 115401960 Blast Desc: conserved [Aspergillus terreus NIH2624] gi|114190509|gb|EAU32209.1| conserved [Aspergillus terreus NIH2624]
  misc_feature (19)..(243): NCBI GI: 119501485 Blast Desc: NFIA_044210 [Neosartorya fischeri NRRL 181] gi|119415665|gb|EAW25602.1| conserved [Neosartorya fischeri NRRL 181]
  misc_feature (19)..(240): NCBI GI: 188501559 Blast Desc: TPR repeat containing protein-like protein [Adineta vaga]
  misc_feature (19)..(243): NCBI GI: 67904442 Blast Desc: AN9208.2 [Aspergillus nidulans FGSC A4] gi|40742309|gb|EAA61499.1| AN9208.2 [Aspergillus nidulans FGSC A4] gi|259485362|tpe|CBF82322.1| TPA: conserved [Aspergillus FGSC
  misc_feature (18)..(253): NCBI GI: 238488751 Blast Desc: NAD dependent epimerase/dehydratase, [Aspergillus flavus NRRL3357] gi|220698001|gb|EED54341.1| NAD dependent epimerase/dehydratase, [Aspergillus flavus NRRL3357]
  misc_feature (14)..(225): NCBI GI: 258569062 Blast Desc: conserved [Uncinocarpus reesii 1704] gi|237906721|gb|EEP81122.1| conserved [Uncinocarpus reesii 1704]
  misc_feature: Useful for introducing or modulating the production of volatile compounds
MVRFVTDNRVVDKTKSVQMQVICAGLPRAATSSMQAAVERLGYTPCLHNAHILPHADRTEFMLNAMREQDSAMRQKMVAEMMAGHASVADLPAMVFVPELMDLYPNAAIVLNSRDNGKIWAQSAKESFDFFFSWKFYALCFWFAADRMWYNVNAQVIKDYAKKGYWVFSEQMYDEHRAMVLREAEKRGRPVLEFWPQQGWEPLCDFLGKDVPDEPFPKLNEKKTFQIVRRIFITKGILSWMAVGTGVWASWRYGPSSFRYARDLWSAYV

SEQ ID NO: 37977 - DNA, 1377 bp, Muscodor strobelii
  misc_feature: SGI EST ID NO. CUFF.91036.0
  misc_feature: Variant of the nucleotide sequence at SEQ ID NO 37975
tgctaatatcgctggcctgcaagatcatggatatgcactcatttgcaaatggcgagacaaaatgtaggccatatgagctacgagatgtatgcttgataggttcaaggattttagtacctactatcgcgactaccaaattgcacccgtgctgttaggcgcgactgagtgctgggatcatgtcagcacttagacgtcatgggtgttggcaaaacacttctgagcacagggaaacaaagggagaacggtagcttcgggaagcattactccgtattcaatacgcttctcacatcgtgtgtatgattgattggcaaatgtaacaacatctagaaatcaaccgcccccttgcatcaagtcatcgaccaacatgctttactgacatctcaacgccgtgaagcgcctgattgatcccttctttctcatccttcgtgcttctcatccggctcatctcattctagactcaacttttgtagcattacacaatggtccgcttcgtgacagacaaccgtgtggtcgacaagaccaagtcggttcagatgcaggtcatctgcgccggccttccgcgcgccgcaacgagttccatgcaagcagcggtcgaacgactcggctacacgccatgtctgcataacgcgcacattctgccacacgccgaccgcacagagttcatgctcaacgcgatgcgagagcaggattccgccatgcgccaaaaaatggtcgcggagatgatggctggacacgcttctgtcgctgatctgccggctatggtgtttgtgcccgagctcatggacttgtaccccaacgccgccatcgtgctgaattcgcgcgacaacggcaaaatctgggctcagtcagctaaggagtcgttcgatttcttcttctcctggaagttctacgcgctttgcttctggtttgccgctgataggatgtggtataatgtcaatgcgcaggtgatcaaggattatgcgaagaagggctattgggtgtttagtgagcagatgtatgatgagcatcgagcgatggtgctgcgcgaggcagagaaacgaggaaggcctgtgctggaattttggccgcagcagggatgggaaccgctctgtgatttcttggggaaggatgttcccgatgagccattcccgaagcttaatgagaagaagacgttccagattgtaaggaggatattcattacgaaggggatcctgagctggatggcggtagggactggcgtctgggcgagttggaggtatgggccgtcttcttttcgatacgctcgagacctatggtcagcatatgtataggcgcaacggcagagcacttatcactagagaacgtcttcgtcggatatcagaattgaataacaagacagagtgcaatcctttatcagaa

SEQ ID NO: 37978 - DNA, 270 bp, Muscodor strobelii
  misc_feature: SGI cDNA ID NO. 573190
  misc_feature: Encodes the peptide sequence at SEQ ID NO 37979
atgccgacccttgaagaagctgaggccaacatctcccgcctcaacggcgtcatcggcgaccagaccgcccgagagatcattgctcagtctgtcctcgatggctactttagctttcgcaatggtgaagccatagcccgcgccgctcgtgacgaagcccaacgacgacttgccgctgcccgtgctgagcttgcccagtggactagcatcaaggaggatctggagagagccgacgctgccgagcagcttgccaaattgcgtggcaccgagtga

SEQ ID NO: 37979 - protein, 89 aa, Muscodor strobelii
  misc_feature: SGI Peptide ID NO. 573190
MPTLEEAEANISRLNGVIGDQTAREIIAQSVLDGYFSFRNGEAIARAARDEAQRRLAAARAELAQWTSIKEDLERADAAEQLAKLRGTE

SEQ ID NO: 37980 - DNA, 846 bp, Muscodor strobelii
  misc_feature: SGI cDNA ID NO. 573191
  misc_feature: Elevated expression when VOC is produced
  misc_feature: Encodes the peptide sequence at SEQ ID NO 37981
atgacatccgagaagatagcgcagaacgatgggatcagttcggcgagcgacagtcgcgaagactgcgaaaaggggatccgaaggatcgatacgggtgttacaatgccacctgagctgttcgagaagttgtatttgagcccaaaagtacagccttatcgaaggagtacgccatttgcaaacccaacagcactgggtttcatggggtttactgtcgctacgttcatgttttctttggtgctcttaggatgggctggagcgtcaggcttctcgccagtagtcagcatcttctttttcgtggcaccgataaccctgctcttctccatggcggtggtcatggggttctttggagtgttctggctgtccttcgggcttcttcagcttcctggtggatatctgtccagcccatatgcaacatcagaggacccaaccggcatgaactccaaggcattcaatgcagatgttgggctgttcctcgttgtttggggtacagggatattgatgttctgtcttttatcgcttacaattagcattgccttaactgtgctctttgccctcttctctaccggagtatatcttctcggagtatcatatttgttgacggcagctggacagccggatgcagttcctggtcttcataaggctgctggcgtggtattgttcattggatctgcgatcggatggtacatgacgatgggtattttagctgccgagatgcaacttcccatcaacttaccagtcggagatttaagtctttggtggcggaagaaaacgcctgaaattgttgatgatagagcagaaaagtggagcgaatggaacaacacctgcgtatggcaaagtcgaaagtag

SEQ ID NO: 37981 - protein, 281 aa, Muscodor strobelii
  misc_feature: SGI Peptide ID NO. 573191
  misc_feature (3)..(213): NCBI GI: 171683171 Blast Desc: protein product [Podospora anserina] gi|170941545|emb|CAP67197.1| protein product [Podospora anserina]
  misc_feature (13)..(267): NCBI GI: 189192568 Blast Desc: plasma membrane ammonium transporter (Ato3) [Pyrenophora tritici-repentis Pt-1C-BFP] gi|187974229|gb|EDU41728.1| plasma membrane ammonium transporter
  misc_feature (21)..(268): NCBI GI: 116193981 Blast Desc: CHGG_06708 [Chaetomium globosum CBS 148.51] gi|88182621|gb|EAQ90089.1| CHGG_06708 [Chaetomium globosum CBS 148.51]
  misc_feature (13)..(267): NCBI GI: 169625228 Blast Desc: SNOG_15881 [Phaeosphaeria nodorum SN15] gi|111055599|gb|EAT76719.1| SNOG_15881 [Phaeosphaeria nodorum SN15]
  misc_feature (3)..(266): NCBI GI: 224775803 Blast Desc: TPA: TPA_inf: GPR1/FUN34/YaaH-class plasma membrane protein [Phaeosphaeria nodorum]
  misc_feature (7)..(108): NCBI GI: 224775783 Blast Desc: TPA: TPA_inf: GPR1/FUN34/YaaH-class plasma membrane protein [Chaetomium globosum]
  misc_feature (6)..(250): NCBI GI: 224775817 Blast Desc: TPA: TPA_inf: GPR1/FUN34/YaaH-class plasma membrane protein [Hypocrea virens]
  misc_feature (1)..(250): NCBI GI: 224775813 Blast Desc: TPA: TPA_inf: GPR1/FUN34/YaaH-class plasma membrane protein [Hypocrea jecorina]
  misc_feature (6)..(250): NCBI GI: 224775811 Blast Desc: TPA: TPA_inf: GPR1/FUN34/YaaH-class plasma membrane protein [Trichoderma atroviride]
  misc_feature (1)..(259): NCBI GI: 256721703 Blast Desc: NECHADRAFT_82458 [Nectria haematococca mpVI 77-13-4]
  misc_feature: Useful for introducing or modulating the production of volatile compounds
MTSEKIAQNDGISSASDSREDCEKGIRRIDTGVTMPPELFEKLYLSPKVQPYRRSTPFANPTALGFMGFTVATFMFSLVLLGWAGASGFSPVVSIFFFVAPITLLFSMAVVMGFFGVFWLSFGLLQLPGGYLSSPYATSEDPTGMNSKAFNADVGLFLVVWGTGILMFCLLSLTISIALTVLFALFSTGVYLLGVSYLLTAAGQPDAVPGLHKAAGVVLFIGSAIGWYMTMGILAAEMQLPINLPVGDLSLWWRKKTPEIVDDRAEKWSEWNNTCVWQSRK

SEQ ID NO: 37982 - DNA, 327 bp, Muscodor strobelii
  misc_feature: SGI EST ID NO. CUFF.91022.0
  misc_feature: Variant of the nucleotide sequence at SEQ ID NO 37980
ccagcattcaaaatgacatccgagaagatagcgcagaacgatgggatcagttcggcgagcgacagtcgcgaagactgcgaaaaggggatccgaaggatcgatacgggtgttacaatgccacctgagctgttcgagaagttgtatttgagcccaaaagtacagccttatcgaaggagtacgccatttgcaaacccaacagcactgggtttcatggggtttactgtcgctacgttcatgttttctttggtgctcttaggatgggctggagcgtcaggcttctcgccagtagtcagcatcttctttttcgtggcaccgataaccctgctc

SEQ ID NO: 37983 - DNA, 1581 bp, Muscodor strobelii
  misc_feature: SGI cDNA ID NO. 573192
  misc_feature: Encodes the peptide sequence at SEQ ID NO 37984
atggatcgtcttcaatccattatcattcctcatggatcgatatcaatatggatcctgctggccgttgcggcctccttttccgcctacaagatactgagaataggccgacggaattcaaatatgccagatggccccccgacgaggcccatagttggcaatgaacatctgatcccacgatcaaacgctcatttcatatttacagagtgggcgaagaaatatggcggcatctacacactcaagcgcttcaccaacactacgttcatcatctcggatccgcgcgtgattaaggagttgttggataagaaaagcaatctatacagccaccggccagactcttacgtcggtcgacttatcacacaaggcgatcatctactgctaatgcagtatggaacggaatggcggcggatcaggaagctcattcaccaatatttcatggagcccatgtgcgagaaacaccacattcgtctccagaacgccgaagcaaaccagttgatgtatgactttatggttgcgccacaggatcatatggaacatcctaaacgctacagcaatagcattaccaattcactagtgttcggtatccgtacgaagactattgagagcgattatatgatcaggttattttctctcatgaatgaatggagcgagattcttgaactcggagccacgccacctgtcgattcattcccactactcaaattgatccctgaaagattgcttggaatgtggaagtcacgtgcgattggtgtcggtaagctcatgactgatctttacaccgaagtcttaggccaggtgaagcaacggcgctcaaatggtttaaatcgtggatctttcatggatcgtgtgttagacgagaacgagaagaatgagctcactcccagccaattgcacttcctaggcggagttcttatggagggtggctctgatacttcgtcatctcttatccttgcgatggttcgcgcgatgattgagtttccggaggttcaaaagagggctcaagctgagattgacgccgtcattgatgacacgcggtctcctacctgggcagacttccaccaacttccgtatatcaatatgatgatcaaggaaagccatcgctggcgcccggtaagccccttaggcgtgtcacatgcagttgctgaagacgattgggtaggcgggtgttacatccccaagggatcaaccgtggtgcttaatgtgtggggaatgcatcacaacgaatcacgctgggagaagcctgaggacttcatgccagagcgctttgcaaagcatccgaagctagcttcgcaatacactagcgacgggccggatcgtgatcacttcggatatggtgcaggccgtcgcgtttgtccaggtattcatctcgctgagcgcaatctgttcatcgccatgtctaagctactatgggcttttgagttccgaaagccaaatggagacgataccaaggtggaatcgagcatcggctttctacaatgtgtgcgcgattacggctgtgttattatagtcagatctgagagaagagcggagacgatcaggcgggaatttcagcaagctgcggaggtctttgcgaactatgactag

SEQ ID NO: 37984 - protein, 526 aa, Muscodor strobelii
  misc_feature: SGI Peptide ID NO. 573192
  misc_feature (42)..(500): Pfam Id: PF00067 Pfam Desc: Cytochrome P450
  misc_feature (188)..(482): Pfam Id: PF00067 Pfam Desc: Cytochrome P450
  misc_feature (42)..(145): Pfam Id: PF00067 Pfam Desc: Cytochrome P450
  misc_feature (1)..(526): NCBI GI: 121710950 Blast Desc: Cytochrome P450 oxidoreductase, [Aspergillus clavatus NRRL 1] gi|119401241|gb|EAW11665.1| Cytochrome P450 oxidoreductase, [Aspergillus clavatus NRRL 1]
  misc_feature (9)..(526): NCBI GI: 195971095 Blast Desc: m-hydroxybenzyl alcohol hydroxylase [Aspergillus clavatus]
  misc_feature (60)..(520): NCBI GI: 255948126 Blast Desc: Pc22g08150 [Penicillium chrysogenum Wisconsin 54-1255] gi|211591847|emb|CAP98103.1| Pc22g08150 [Penicillium chrysogenum Wisconsin 54-1255]
  misc_feature (66)..(526): NCBI GI: 115399720 Blast Desc: [Aspergillus terreus NIH2624] gi|114191121|gb|EAU32821.1| [Aspergillus terreus NIH2624]
  misc_feature (18)..(525): NCBI GI: 195971093 Blast Desc: m-cresol methyl hydroxylase [Aspergillus clavatus]
  misc_feature (18)..(525): NCBI GI: 121710948 Blast Desc: Cytochrome P450 oxidoreductase, [Aspergillus clavatus NRRL 1] gi|119401240|gb|EAW11664.1| Cytochrome P450 oxidoreductase, [Aspergillus clavatus NRRL 1]
  misc_feature (35)..(525): NCBI GI: 255948120 Blast Desc: Pc22g08110 [Penicillium chrysogenum Wisconsin 54-1255] gi|211591844|emb|CAP98099.1| Pc22g08110 [Penicillium chrysogenum Wisconsin 54-1255]
  misc_feature (20)..(525): NCBI GI: 242782663 Blast Desc: cytochrome P450, [Talaromyces stipitatus ATCC 10500] gi|218720192|gb|EED19611.1| cytochrome P450, [Talaromyces stipitatus ATCC 10500]
  misc_feature (15)..(526): NCBI GI: 259479677 Blast Desc: TPA: cytochrome P450, (Eurofung) [Aspergillus nidulans FGSC A4]
  misc_feature (29)..(526): NCBI GI: 171691562 Blast Desc: protein product [Podospora anserina] gi|170945729|emb|CAP71842.1| protein product [Podospora anserina]
  misc_feature (33)..(478): SWISSPROT Homolog: EC 1.14.99.9 Steroid 17-alpha-monooxygenase
MDRLQSIIIPHGSISIWILLAVAASFSAYKILRIGRRNSNMPDGPPTRPIVGNEHLIPRSNAHFIFTEWAKKYGGIYTLKRFTNTTFIISDPRVIKELLDKKSNLYSHRPDSYVGRLITQGDHLLLMQYGTEWRRIRKLIHQYFMEPMCEKHHIRLQNAEANQLMYDFMVAPQDHMEHPKRYSNSITNSLVFGIRTKTIESDYMIRLFSLMNEWSEILELGATPPVDSFPLLKLIPERLLGMWKSRAIGVGKLMTDLYTEVLGQVKQRRSNGLNRGSFMDRVLDENEKNELTPSQLHFLGGVLMEGGSDTSSSLILAMVRAMIEFPEVQKRAQAEIDAVIDDTRSPTWADFHQLPYINMMIKESHRWRPVSPLGVSHAVAEDDWVGGCYIPKGSTVVLNVWGMHHNESRWEKPEDFMPERFAKHPKLASQYTSDGPDRDHFGYGAGRRVCPGIHLAERNLFIAMSKLLWAFEFRKPNGDDTKVESSIGFLQCVRDYGCVIIVRSERRAETIRREFQQAAEVFANYD

SEQ ID NO: 37985 - DNA, 961 bp, Muscodor strobelii
  misc_feature: SGI EST ID NO. CUFF.91025.0
  misc_feature: Variant of the nucleotide sequence at SEQ ID NO 37983
cggaggttcaaaagagggctcaagctgagattgacgccgtcattgatgacacgcggtctcctacctgggcagacttccaccaacttccgtatatcaatatgatgatcaaggaaagccatcgctggcgcccggtaagccccttaggcgtgtcacatgcagttgctgaagacgattgggtaggcgggtgttacatccccaagggatcaaccgtggtgcttaatgtgtggggaatgcatcacaacgaatcacgctgggagaagcctgaggacttcatgccagagcgctttgcaaagcatccgaagctagcttcgcaatacactagcgacgggccggatcgtgatcacttcggatatggtgcaggccgtcgcgtttgtccaggtattcatctcgctgagcgcaatctgttcatcgccatgtctaagctactatgggcttttgagttccgaaagccaaatggagacgataccaaggtggaatcgagcatcggctttctacaatgtgtgcgcgattacggctgtgttattatagtcagatctgagagaagagcggagacgatcaggcgggaatttcagcaagctgcggaggtctttgcgaactatgactaggccatttagatacgtaggcagatatagtgatttctacggtggttttcttcattttatttacacctagattgtagattgaggcttctgctgcgtttcatcgactttatttacgtacgtcgttgagcgcatctcaacatagctcagacagaacagtggggggactaataaggaactcgcacctggtgtatgaatgattgagaagctcgtgatgcctcgtagggtaggagtctcataacgaagccgtatttggacattgagatagatgatctgttcgagattgcacccctgcttcggatctccatgcgcgtcaatggtatagcccctccccggattccaggtcttattcaggactattt

SEQ ID NO: 37986 - DNA, 885 bp, Muscodor strobelii
  misc_feature: SGI cDNA ID NO. 573193
  misc_feature: Encodes the peptide sequence at SEQ ID NO 37987
atgcctctgtttcgcccctttgtgccttatcataactctgcaggccagaccaaaatcatcaagtttggcggtcttctgactacagagtttcttgagccaccgccaggccgatgttttctcttccggcagacttacaagcaagacatcgatggaccaattccagataatttgcggaagctgattgattcgccccgaaggccacaaggcccactcttacactttcaccagtttcagacggaatatttccgtgtcgagtctggtattatgggtatcgaggttaacggcaagcaccgcaaggtctaccccgaggacggagaggtatccgtgaaagccggcagtgttcatcggttttatattcacccagattccccggtagacatgactgtctatctaagtgcatcggatagcggtatggactatcaacttgaccgtattttcttcgagaactggtacggctattggcatgatgcactccttcatgagggaaaattgaacttccttcagtatcttgcgattcaggacggtggcgatgcatattcggttcctcctaagtgggtacctttccgccgattcattggatattggggaagtgtagctttaggtcgatggctcggaggcatgcttggatacaagccatttttcaaagagtacactactgattgggattatgctgtcgcaaagatgaagggatcgttctttcagcgccatatgatccatgactcatacactaaagcaaagacatgggaggagcaggttgctcttgaccagggcaaggtattgaatgctgaatatgagcaatggacagtcgacttgacggaacaggccaagtctacaggaaaagtaaatggcaaaacaacaaacggcgtgcatgttaatggcgcatga

SEQ ID NO: 37987 - protein, 294 aa, Muscodor strobelii
  misc_feature: SGI Peptide ID NO. 573193
  misc_feature (6)..(281): NCBI GI: 255948128 Blast Desc: Pc22g08160 [Penicillium chrysogenum Wisconsin 54-1255] gi|211591848|emb|CAP98104.1| Pc22g08160 [Penicillium chrysogenum Wisconsin 54-1255]
  misc_feature (6)..(272): NCBI GI: 121710952 Blast Desc: conserved [Aspergillus clavatus NRRL 1] gi|119401242|gb|EAW11666.1| conserved [Aspergillus clavatus NRRL 1]
  misc_feature (16)..(276): NCBI GI: 115399716 Blast Desc: [Aspergillus terreus NIH2624] gi|114191120|gb|EAU32820.1| [Aspergillus terreus NIH2624]
  misc_feature (1)..(288): NCBI GI: 238491836 Blast Desc: conserved [Aspergillus flavus NRRL3357] gi|220697568|gb|EED53909.1| conserved [Aspergillus flavus NRRL3357]
  misc_feature (6)..(250): NCBI GI: 238502251 Blast Desc: conserved [Aspergillus flavus NRRL3357] gi|220691169|gb|EED47517.1| conserved [Aspergillus flavus NRRL3357]
  misc_feature (40)..(293): NCBI GI: 159124821 Blast Desc: conserved [Aspergillus fumigatus A1163]
  misc_feature (66)..(250): NCBI GI: 258573157 Blast Desc: [Uncinocarpus reesii 1704] gi|237901026|gb|EEP75427.1| [Uncinocarpus reesii 1704]
  misc_feature (6)..(172): NCBI GI: 169775621 Blast Desc: [Aspergillus oryzae RIB40] gi|83771012|dbj|BAE61144.1| protein product [Aspergillus oryzae]
  misc_feature (6)..(236): NCBI GI: 255939374 Blast Desc: Pc16g00330 [Penicillium chrysogenum Wisconsin 54-1255] gi|211585079|emb|CAP92703.1| Pc16g00330 [Penicillium chrysogenum Wisconsin 54-1255]
  misc_feature (73)..(235): NCBI GI: 116201113 Blast Desc: CHGG_08441 [Chaetomium globosum CBS 148.51] gi|88176959|gb|EAQ84427.1| CHGG_08441 [Chaetomium globosum CBS 148.51]
MPLFRPFVPYHNSAGQTKIIKFGGLLTTEFLEPPPGRCFLFRQTYKQDIDGPIPDNLRKLIDSPRRPQGPLLHFHQFQTEYFRVESGIMGIEVNGKHRKVYPEDGEVSVKAGSVHRFYIHPDSPVDMTVYLSASDSGMDYQLDRIFFENWYGYWHDALLHEGKLNFLQYLAIQDGGDAYSVPPKWVPFRRFIGYWGSVALGRWLGGMLGYKPFFKEYTTDWDYAVAKMKGSFFQRHMIHDSYTKAKTWEEQVALDQGKVLNAEYEQWTVDLTEQAKSTGKVNGKTTNGVHVNGA

SEQ ID NO: 37988 - DNA, 7764 bp, Muscodor strobelii
  misc_feature: SGI EST ID NO. CUFF.91092.1
  misc_feature: Variant of the nucleotide sequence at SEQ ID NO 37986
cgattctgtgtgaaaatcagtactcgagccttcacgtgatgttcttctaatgcactatcgctctgtgtatcttacaacaagatcgagacaataatgtaatgaatacaaatctacacggaaagtgaaggatgaaaaccaatgaaatttattcatgacggaggcaatctatctagctacctaaacatagaaggataattctaatcaatacgagaaagagaaatatttgtaaccgtatctatgcacaataactcaagccgtcaacttctcctcaaaccaacctactaggtggtttgacgtcggatgactccacgtaagagtgggcgggactttcactttcagagtactttgaagcttcttgcgcagtgtaaccgtcatgacactatcgacaccgagatctgcaatagccgcgcgaccttcaacctcgtctgggccgctcagcatcagaacttcggcaatgatccccctgatcttgacgtccaaccacgtcttgagttctgggccactgcttggcatggcaccatcttttggtccatcctgatcaacggcggcagttgctggtgcgctgcggcgcacagcaatgtcctcaagaatcgacacgggaagtggttcgccctcgtcaaatgcaagactgcgcagaacgacgccgtgatcgatgtcgtactttgccacgtgctcccaagcgcggaagccttcctcaacagtgatatctgtgatacctttgctctcaagttcagctgtaatgaaatctgtactggcagccataccaagtccgtgccagctggtccattggaatgccacagagttgtcgccctggccgcggcgatgcgttgccaatgcatccaggaacgcgttgccgctcgcatagctgctctggcctgggaatccaaagagctggccacacgagctgaacagcacaaaccagtccaagcttcctggtgggaatacggcatggagtgcgagtgcaccagataccttgggcgctagcacgcgactgaacgaatcagctgtcgtgtcgagcacgagctggtcctctagtgcacctgcagcatgcacaacaccaaggacaggcggcaaggctaggcgatctagctcgtcctgaagacggagatgcgcatctttcgccccgatatccaaagctatcgtgtgtactgtagcaccggattgctcgagcttttgaatggcctcgagcacattgtataaagaactgtctttcccgacagatgcccactcacgccgtgggggcagagcgcgacgtgatagcaggagtacgcgtcgtgctcccttctctactagccagctcgcgacttcaagccccaaagcaccaagaccacctgtcactaaataggtgccctcagacttgggaagcagggtgcgagaggctgccgcttctttgctgtatgcaaggtcccgaggcagtgtttgaagtcgcgcgacacgaggtaggtcgttctcaatccgaatgacatcctggtctcgcacatatttcattgccagaatcggcatcgacgcgttcttctgcccatcatctacgtcaatcaaggcgccccaattgtcgggatgttccgacgcgatgattcgcgccaagccctggagaggggcctgggcgagagctgtcgggtcctcggcgacgccaacagccgatgtgagtgtaaacactttcacgtttttcgccgcggccgaagaccgaacaatgtgttttgtgagcgtcaaaagttcatcaatgaaggcttctgaccttgctgctacttctgtcaattcgcttgttggcccggggcagtagatgacggcagtatctgattccagcccgccagcagcaacgaaagcagctgcgctagggtattgcacaatgtcctttgcccctgttcggatggtgagctgcctgctgtaacgcgagagcagctcttgatcgtcagagactatgactgcgtgcttccaagataaaggcttgttttcaaatggtgccggcacccaagcaagcgaatgcactagtgattcaacactgccactgacaccaggagttccctcaatctcggaaaagcgcatggactcaaatttggccatgacattgccatcggtgtcgcaaacactgacgtgtactgcgggagcgccacgctcggaagcctcctcgacgtagagatacccagtcttaggcggcggcgtcccgtattctgtaaagaagtggactttctcgatttgagctggcatgcgcagctttggattgtcgaagaagatcgttgagcccacagacgttgcagcatccaagatcgacgcccacgaagatgggtcccaaggcaaatcggcagcagtgtgattcggagcggtgtccacgtgagcaatcatctccttcaaattgccaaaatgctctgtcacagcccaaggaaatcccattgccgagactcctaccttgtccaaatagtccatcgagaagttgggtgccaacacattgccgatacgtttcttcgccgcttcgacatcgatccagcgggcatggcggccttccttatcttcttgtgctacactccaacgaccagtggtatgggtaacccaagagtggtcggcggactcttcaccttgctgtaggcgtgaagtgatcttgactgagtcatcttcgacaataacctggacatcccgaggcgcattaatagctaccgggactcgcaatgtgatgttagacagtgtcgatgcctttgccgcatgatggaatgtgttcactagcactgcggccggtacgatttcagtgccgtgaagcggatgacggcccggaaatggtttcgtgttgttatccaacttcgttgtaaataggacggtgctggtaccgccaagtgggcttcgaagacctaagagtgtgtgtttatcgacgtcgtgagtgagcagactacccgcatcactggacgacccagtgctgaccttcctccagattgccttgtgtacccacggtgtattgggtaccagcggtgaccattgtactttgttaccgaactgctttcgaaagttgacccgagcacctttgacaaacaaagatccgacggcgtgtagcgcagaggctcctgctgacttgtttcgtcgaagtgttggcaggacagcaaattcttcatcgccgacaccttggtccatgatagtctcattaatcgagtgggatacgatgggatggcttgaaacctcgaggaagagcctgaatccgtcggcaagagcggcacacactgcggacttgagcagtactggactgatcatgttgtgtatccagtaatcggcatctctgagaccagtatatcgaggatcctcgtctgcggtagaataaagaggtatccttgatggccctggctttatatcacccatgatcagctctttcaaaggattagcaagcggattcagcattttccgggagtggaatgcaatatccgtcgctaccttcatgaccttgacacccttgctcttcatttgctcggcatatgctgccacagcatcgtagtcgccgctcacaacgcatgaagatggcgacgaatcaatggcagcgacaacgtctccatcctccccgagctcgagcttcacctcatcgaagggtgtatttatcatgtacataccaccctgacctttgactagcgcatacagtttagctcgtctggtgacaatgagtgcaccctcttccgcggttatggatccagcaacgacagcggctgccagttcaccgactgaatggccaataatagcagacggctggagacccttactgcggagcacggcagcaagtccgatttgaactgtgtaggtcaacacctggacgcggtcggactgatcaaaatgctccccatctctcagggcatcaatgacagagaagtcaccttcagcttggatgatctcctctagtggctggattgcttggaagaaaacggggttggtgatgagtcccttgcccatgtcttgccattgtgcgccgtgtcctgagaacacccataccgcatcagtattgacctggggcccgaaaaccacatcttgtgaagcaaactctgacttcttgccggcagcaaagtcgttcaagatctcagatgcctcatcgtggctacttacgacaaacgcagcacggtaatcatgcttcgcacgacgttccgcaagagtacaggcaatagatgccaggctctctcctcttccgacgtccgtcttgagccacgtggccaaggcactggcttgtataggtagacgcttctcttgaggcgcagacagcaccagaaggacgggactcgttccgtcagcgacttccgccttggttttgaggctataaggagactcttcaatgacagcgtgtgatactgtgcctccgtatccatatgagcaaatggcagcgcggcgaggatggttgcttggcttgatccagtctgcgacttcttggacaacacgcgtaccggactgtacccagtttattttggagtttagcgtcttcaagttggcctgcggtggaaactgcgctttgttgattgctgtgacagctttgatgaaacccatggcgccagctccggcctccagatgtccaatattgggcttgacagaccctatcataacggggttcattccgctacgtgcgattccatagaccgccgagattgcgctgacctcagtagggtcaccaagaggtgtagatgtggcatctagaccattgagaattagctattgctttgcatttgccgagcgagcagtccttcactgcacacttacgagcctcgacataatcaatagtcaccgggtcaaccttcgcctgctccaaggcctggtatgctacgagctcctgtgctttggcgttgggtgccataatgccattcgtcttcccatctgcacgattcgaatgtcagatgaaatcagcttcttacatggaagtatgcataccttgagcgacagccgaacctttgaggactgcaatgatgttgttcccgtcttggatggctgcgtccattcttttcaaaatcacagttgccgctccctcacctcgtccgtacccatgagcgctatcgtcaaatgagaggcatcggccttctggagaggttgcaccggccttgtccaatactctcgtcaaacccgggccacaaagtgcattcacacctccggtgattgcgactgtagactcccctgtcaaaatcgcctgccggccatgatgaattgccaccaaggagcttgcgcaggctgcatctactgcagtacttggtcccatcaagttcaaatggtaggatatccggttcggcaccccacaatatgctgtaccgatgcccatccaggcctcgacattcggcagatcttcaagcaggagcttgctatagtcatctgagttgactcccatgaatacagcagtgtttgagccggacaatgatttggggtcaattccagcgttttcaagagcctcccatgttacttcaagagtgagacgctgttgcgggtccatctgctcggcttcttttggagatatcccgaagaatgctgggtcaaaattttccagtgcatcaaggaaatagccacgggtagtagtcttcttgagttctttcatattggcagcaccacggtgctgatatggttcccatctccaggccggtatctctgacgatgcatctgtcttcgcaaggatcgattcccagagttgctcgggggtgtgatttccaccagcgacacgacatgcaatgcccaccactgcgacatcgttggagttgaagtccatctaattatgtgagcaaacacccgttatattgactcatctcagctacctacaagatctcggagctccgttgcttcgctagcggagctgggtgtcgtacattccgccgactctgacccggtaaaaccgggggtcgacggaggagtgtcttccgcagccatcgtaagatatcggagtcgatgaattagagcgctgaccaaataagcattgagtatacgcgcggtttagttgttccacgaaaataaagtgcgaaaggcggagttccccggcattctcacaatagagtagcagattgcaatgaccaaagcaagcaggccaggtggtggtgcgagatcagctaacttgtacttatgaatgatcgtatgacccttgtgtctccttacactccaatcttatgagaattatcctttccggagctccaagtcgggcaaactgccaagtgccatcttgtccccttagggtctgagctgtaagacgcgcagctcattttcgctgattatgcagcgactctcgcacgccattattgatggcacttgctttaagcgatctgcaagccccaaagggtaattcctgttgaggcaggccgttgctatttttttttacagatatgtatgaatgaagtcgtgatgctcacaggtgtgggagtacaggaaatgtcagagacctaagttacccacaatttcgcacggaaagcgaattgagtgtaacgctatgcattgctgataaagactgcgcgacagttcagtcgagtgcttctgaaatgggtaggatgtaactcaggacccggattaagcggaaccggaccggagcactgggtgaattccccgttctggaaactacaacgccaatccgatatgcgtatgacaattgaattcgatgttttatcatggcgcgtttgcgcaagaattgcgagaaacaaggcaggaaataccatctctgcaagaattgttcagtcgtagtaaacgcggtctgctattccaacatgcctctgtttcgcccctttgtgccttatcataactctgcaggccagaccaaaatcatcaagtttggcggtcttctgactacagagtttcttgagccaccgccaggccgatgttttctcttccggcagacttacaagcaagacatcgatggaccaattccagataatttgcggaagctgattgattcgccccgaaggccacaaggcccactcttacactttcaccagtttcagacggaatatttccgtgtcgagtctggtattatgggtatcgaggttaacggcaagcaccgcaaggtctaccccgaggacggagaggtatccgtgaaagccggcagtgttcatcggttttatattcacccagattccccggtagacatgactgtctatctaagtgcatcggatagcggtatggactatcaacttgaccgtattttcttcgagaactggtacggctattggcatgatgcactccttcatgagggaaaattgaacttccttcagtatcttgcgattcaggacggtggcgatgcatattcggttcctcctaagtgggtacctttccgccgattcattggatattggggaagtgtagctttaggtcgatggctcggaggcatgcttggatacaagccatttttcaaagagtacactactgattgggattatgctgtcgcaaagatgaagggatcgttctttcagcgccatatgatccatgactcatacactaaagcaaagacatgggaggagcaggttgctcttgaccagggcaaggtattgaatgctgaatatgagcaatggacagtcgacttgacggaacaggccaagtctacaggaaaagtaaatggcaaaacaacaaacggcgtgcatgttaatggcgcatgaaagacctatagctaagatttaaagaggggttccggttgtttagtgtgacgggcgttcaatggcatttcctatctaatgagtcatatgttatatagctttgatgtgggcacgatttccatcagtacgtcgtcttgaaatattgaaagcattcgttatgcgacttttccagaacgaattttaccacggcatcatctcaatgacctcg

SEQ ID NO: 37989 - DNA, 5433 bp, Muscodor strobelii
  misc_feature: SGI cDNA ID NO. 573194
  misc_feature: Encodes the peptide sequence at SEQ ID NO 37990
atggctgcggaagacactcctccgtcgacccccggttttaccgggtcagagtcggcggaatgtacgacacccagctccgctagcgaagcaacggagctccgagatcttatggacttcaactccaacgatgtcgcagtggtgggcattgcatgtcgtgtcgctggtggaaatcacacccccgagcaactctgggaatcgatccttgcgaagacagatgcatcgtcagagataccggcctggagatgggaaccatatcagcaccgtggtgctgccaatatgaaagaactcaagaagactactacccgtggctatttccttgatgcactggaaaattttgacccagcattcttcgggatatctccaaaagaagccgagcagatggacccgcaacagcgtctcactcttgaagtaacatgggaggctcttgaaaacgctggaattgaccccaaatcattgtccggctcaaacactgctgtattcatgggagtcaactcagatgactatagcaagctcctgcttgaagatctgccgaatgtcgaggcctggatgggcatcggtacagcatattgtggggtgccgaaccggatatcctaccatttgaacttgatgggaccaagtactgcagtagatgcagcctgcgcaagctccttggtggcaattcatcatggccggcaggcgattttgacaggggagtctacagtcgcaatcaccggaggtgtgaatgcactttgtggcccgggtttgacgagagtattggacaaggccggtgcaacctctccagaaggccgatgcctctcatttgacgatagcgctcatgggtacggacgaggtgagggagcggcaactgtgattttgaaaagaatggacgcagccatccaagacgggaacaacatcattgcagtcctcaaaggttcggctgtcgctcaagatgggaagacgaatggcattatggcacccaacgccaaagcacaggagctcgtagcataccaggccttggagcaggcgaaggttgacccggtgactattgattatgtcgaggctcatgccacatctacacctcttggtgaccctactgaggtcagcgcaatctcggcggtctatggaatcgcacgtagcggaatgaaccccgttatgatagggtctgtcaagcccaatattggacatctggaggccggagctggcgccatgggtttcatcaaagctgtcacagcaatcaacaaagcgcagtttccaccgcaggccaacttgaagacgctaaactccaaaataaactgggtacagtccggtacgcgtgttgtccaagaagtcgcagactggatcaagccaagcaaccatcctcgccgcgctgccatttgctcatatggatacggaggcacagtatcacacgctgtcattgaagagtctccttatagcctcaaaaccaaggcggaagtcgctgacggaacgagtcccgtccttctggtgctgtctgcgcctcaagagaagcgtctacctatacaagccagtgccttggccacgtggctcaagacggacgtcggaagaggagagagcctggcatctattgcctgtactcttgcggaacgtcgtgcgaagcatgattaccgtgctgcgtttgtcgtaagtagccacgatgaggcatctgagatcttgaacgactttgctgccggcaagaagtcagagtttgcttcacaagatgtggttttcgggccccaggtcaatactgatgcggtatgggtgttctcaggacacggcgcacaatggcaagacatgggcaagggactcatcaccaaccccgttttcttccaagcaatccagccactagaggagatcatccaagctgaaggtgacttctctgtcattgatgccctgagagatggggagcattttgatcagtccgaccgcgtccaggtgttgacctacacagttcaaatcggacttgctgccgtgctccgcagtaagggtctccagccgtctgctattattggccattcagtcggtgaactggcagccgctgtcgttgctggatccataaccgcggaagagggtgcactcattgtcaccagacgagctaaactgtatgcgctagtcaaaggtcagggtggtatgtacatgataaatacacccttcgatgaggtgaagctcgagctcggggaggatggagacgttgtcgctgccattgattcgtcgccatcttcatgcgttgtgagcggcgactacgatgctgtggcagcatatgccgagcaaatgaagagcaagggtgtcaaggtcatgaaggtagcgacggatattgcattccactcccggaaaatgctgaatccgcttgctaatcctttgaaagagctgatcatgggtgatataaagccagggccatcaaggatacctctttattctaccgcagacgaggatcctcgatatactggtctcagagatgccgattactggatacacaacatgatcagtccagtactgctcaagtccgcagtgtgtgccgctcttgccgacggattcaggctcttcctcgaggtttcaagccatcccatcgtatcccactcgattaatgagactatcatggaccaaggtgtcggcgatgaagaatttgctgtcctgccaacacttcgacgaaacaagtcagcaggagcctctgcgctacacgccgtcggatctttgtttgtcaaaggtgctcgggtcaactttcgaaagcagttcggtaacaaagtacaatggtcaccgctggtacccaatacaccgtgggtacacaaggcaatctggaggaaggtcagcactgggtcgtccagtgatgcgggtagtctgctcactcacgacgtcgataaacacacactcttaggtcttcgaagcccacttggcggtaccagcaccgtcctatttacaacgaagttggataacaacacgaaaccatttccgggccgtcatccgcttcacggcactgaaatcgtaccggccgcagtgctagtgaacacattccatcatgcggcaaaggcatcgacactgtctaacatcacattgcgagtcccggtagctattaatgcgcctcgggatgtccaggttattgtcgaagatgactcagtcaagatcacttcacgcctacagcaaggtgaagagtccgccgaccactcttgggttacccataccactggtcgttggagtgtagcacaagaagataaggaaggccgccatgcccgctggatcgatgtcgaagcggcgaagaaacgtatcggcaatgtgttggcacccaacttctcgatggactatttggacaaggtaggagtctcggcaatgggatttccttgggctgtgacagagcattttggcaatttgaaggagatgattgctcacgtggacaccgctccgaatcacactgctgccgatttgccttgggacccatcttcgtgggcgtcgatcttggatgctgcaacgtctgtgggctcaacgatcttcttcgacaatccaaagctgcgcatgccagctcaaatcgagaaagtccacttctttacagaatacgggacgccgccgcctaagactgggtatctctacgtcgaggaggcttccgagcgtggcgctcccgcagtacacgtcagtgtttgcgacaccgatggcaatgtcatggccaaatttgagtccatgcgcttttccgagattgagggaactcctggtgtcagtggcagtgttgaatcactagtgcattcgcttgcttgggtgccggcaccatttgaaaacaagcctttatcttggaagcacgcagtcatagtctctgacgatcaagagctgctctcgcgttacagcaggcagctcaccatccgaacaggggcaaaggacattgtgcaataccctagcgcagctgctttcgttgctgctggcgggctggaatcagatactgccgtcatctactgccccgggccaacaagcgaattgacagaagtagcagcaaggtcagaagccttcattgatgaacttttgacgctcacaaaacacattgttcggtcttcggccgcggcgaaaaacgtgaaagtgtttacactcacatcggctgttggcgtcgccgaggacccgacagctctcgcccaggcccctctccagggcttggcgcgaatcatcgcgtcggaacatcccgacaattggggcgccttgattgacgtagatgatgggcagaagaacgcgtcgatgccgattctggcaatgaaatatgtgcgagaccaggatgtcattcggattgagaacgacctacctcgtgtcgcgcgacttcaaacactgcctcgggaccttgcatacagcaaagaagcggcagcctctcgcaccctgcttcccaagtctgagggcacctatttagtgacaggtggtcttggtgctttggggcttgaagtcgcgagctggctagtagagaagggagcacgacgcgtactcctgctatcacgtcgcgctctgcccccacggcgtgagtgggcatctgtcgggaaagacagttctttatacaatgtgctcgaggccattcaaaagctcgagcaatccggtgctacagtacacacgatagctttggatatcggggcgaaagatgcgcatctccgtcttcaggacgagctagatcgcctagccttgccgcctgtccttggtgttgtgcatgctgcaggtgcactagaggaccagctcgtgctcgacacgacagctgattcgttcagtcgcgtgctagcgcccaaggtatctggtgcactcgcactccatgccgtattcccaccaggaagcttggactggtttgtgctgttcagctcgtgtggccagctctttggattcccaggccagagcagctatgcgagcggcaacgcgttcctggatgcattggcaacgcatcgccgcggccagggcgacaactctgtggcattccaatggaccagctggcacggacttggtatggctgccagtacagatttcattacagctgaacttgagagcaaaggtatcacagatatcactgttgaggaaggcttccgcgcttgggagcacgtggcaaagtacgacatcgatcacggcgtcgttctgcgcagtcttgcatttgacgagggcgaaccacttcccgtgtcgattcttgaggacattgctgtgcgccgcagcgcaccagcaactgccgccgttgatcaggatggaccaaaagatggtgccatgccaagcagtggcccagaactcaagacgtggttggacgtcaagatcagggggatcattgccgaagttctgatgctgagcggcccagacgaggttgaaggtcgcgcggctattgcagatctcggtgtcgatagtgtcatgacggttacactgcgcaagaagcttcaaagtactctgaaagtgaaagtcccgcccactcttacgtggagtcatccgacgtcaaaccacctagtaggttggtttgaggagaagttgacggcttga

SEQ ID NO: 37990 - protein, 1810 aa, Muscodor strobelii
  misc_feature: SGI Peptide ID NO. 573194
  misc_feature (577)..(896): Pfam Id: PF00698 Pfam Desc: Acyl transferase domain
  misc_feature (1445)..(1626): Pfam Id: PF00106 Pfam Desc: short chain dehydrogenase
  misc_feature (42)..(291): Pfam Id: PF00109 Pfam Desc: Beta-ketoacyl synthase, N-terminal domain
  misc_feature (299)..(417): Pfam Id: PF02801 Pfam Desc: Beta-ketoacyl synthase, C-terminal domain
  misc_feature (1445)..(1639): Pfam Id: PF08659 Pfam Desc: KR domain
  misc_feature (1737)..(1804): Pfam Id: PF00550 Pfam Desc: Phosphopantetheine attachment site
  misc_feature (8)..(1808): NCBI GI: 13899024 Blast Desc: AF360398_1 6-methylsalicylic acid synthase [Byssochlamys nivea]
  misc_feature (6)..(1808): NCBI GI: 114213489 Blast Desc: 6-methylsalicylic acid synthase [Aspergillus terreus]
  misc_feature (6)..(1808): NCBI GI: 950203 Blast Desc: polyketide synthase [Aspergillus terreus]
  misc_feature (6)..(1808): NCBI GI: 115399712 Blast Desc: 6-methylsalicylic acid synthase [Aspergillus terreus NIH2624] gi|114191119|gb|EAU32819.1| 6-methylsalicylic acid synthase [Aspergillus terreus NIH2624]
  misc_feature (41)..(1808): NCBI GI: 127337 Blast Desc: MSAS_PENPA RecName: Full=6-methylsalicylic acid synthase; Short=6-MSAS gi|3212|emb|CAA39295.1| 6-Methyl salicylic acid Synthase [Penicillium griseofulvum]
  misc_feature (68)..(1808): NCBI GI: 121710954 Blast Desc: 6-methylsalicylic acid synthase MsaS [Aspergillus clavatus NRRL 1] gi|119401243|gb|EAW11667.1| 6-methylsalicylic acid synthase MsaS [Aspergillus clavatus NRRL 1]
  misc_feature (15)..(1808): NCBI GI: 255948130 Blast Desc: Pc22g08170 [Penicillium chrysogenum Wisconsin 54-1255] gi|211591849|emb|CAP98105.1| Pc22g08170 [Penicillium chrysogenum Wisconsin 54-1255]
  misc_feature (22)..(1809): NCBI GI: 238840119 Blast Desc: 6-methylsalicylic acid synthase [Microsporum canis CBS 113480]
  misc_feature (40)..(1807): NCBI GI: 169784227 Blast Desc: [Aspergillus oryzae RIB40] gi|83775320|dbj|BAE65442.1| protein product [Aspergillus oryzae]
  misc_feature (40)..(1807): NCBI GI: 1762235 Blast Desc: polyketide synthase PKSL2 [Aspergillus parasiticus]
  misc_feature (41)..(1808): SWISSPROT Homolog: EC 2.3.1.165 6-methylsalicylic acid synthase
  misc_feature: Useful for fungicidal and/or biocontrol applications
MAAEDTPPSTPGFTGSESAECTTPSSASEATELRDLMDFNSNDVAVVGIACRVAGGNHTPEQLWESILAKTDASSEIPAWRWEPYQHRGAANMKELKKTTTRGYFLDALENFDPAFFGISPKEAEQMDPQQRLTLEVTWEALENAGIDPKSLSGSNTAVFMGVNSDDYSKLLLEDLPNVEAWMGIGTAYCGVPNRISYHLNLMGPSTAVDAACASSLVAIHHGRQAILTGESTVAITGGVNALCGPGLTRVLDKAGATSPEGRCLSFDDSAHGYGRGEGAATVILKRMDAAIQDGNNIIAVLKGSAVAQDGKTNGIMAPNAKAQELVAYQALEQAKVDPVTIDYVEAHATSTPLGDPTEVSAISAVYGIARSGMNPVMIGSVKPNIGHLEAGAGAMGFIKAVTAINKAQFPPQANLKTLNSKINWVQSGTRVVQEVADWIKPSNHPRRAAICSYGYGGTVSHAVIEESPYSLKTKAEVADGTSPVLLVLSAPQEKRLPIQASALATWLKTDVGRGESLASIACTLAERRAKHDYRAAFVVSSHDEASEILNDFAAGKKSEFASQDVVFGPQVNTDAVWVFSGHGAQWQDMGKGLITNPVFFQAIQPLEEIIQAEGDFSVIDALRDGEHFDQSDRVQVLTYTVQIGLAAVLRSKGLQPSAIIGHSVGELAAAVVAGSITAEEGALIVTRRAKLYALVKGQGGMYMINTPFDEVKLELGEDGDVVAAIDSSPSSCVVSGDYDAVAAYAEQMKSKGVKVMKVATDIAFHSRKMLNPLANPLKELIMGDIKPGPSRIPLYSTADEDPRYTGLRDADYWIHNMISPVLLKSAVCAALADGFRLFLEVSSHPIVSHSINETIMDQGVGDEEFAVLPTLRRNKSAGASALHAVGSLFVKGARVNFRKQFGNKVQWSPLVPNTPWVHKAIWRKVSTGSSSDAGSLLTHDVDKHTLLGLRSPLGGTSTVLFTTKLDNNTKPFPGRHPLHGTEIVPAAVLVNTFHHAAKASTLSNITLRVPVAINAPRDVQVIVEDDSVKITSRLQQGEESADHSWVTHTTGRWSVAQEDKEGRHARWIDVEAAKKRIGNVLAPNFSMDYLDKVGVSAMGFPWAVTEHFGNLKEMIAHVDTAPNHTAADLPWDPSSWASILDAATSVGSTIFFDNPKLRMPAQIEKVHFFTEYGTPPPKTGYLYVEEASERGAPAVHVSVCDTDGNVMAKFESMRFSEIEGTPGVSGSVESLVHSLAWVPAPFENKPLSWKHAVIVSDDQELLSRYSRQLTIRTGAKDIVQYPSAAAFVAAGGLESDTAVIYCPGPTSELTEVAARSEAFIDELLTLTKHIVRSSAAAKNVKVFTLTSAVGVAEDPTALAQAPLQGLARIIASEHPDNWGALIDVDDGQKNASMPILAMKYVRDQDVIRIENDLPRVARLQTLPRDLAYSKEAAASRTLLPKSEGTYLVTGGLGALGLEVASWLVEKGARRVLLLSRRALPPRREWASVGKDSSLYNVLEAIQKLEQSGATVHTIALDIGAKDAHLRLQDELDRLALPPVLGVVHAAGALEDQLVLDTTADSFSRVLAPKVSGALALHAVFPPGSLDWFVLFSSCGQLFGFPGQSSYASGNAFLDALATHRRGQGDNSVAFQWTSWHGLGMAASTDFITAELESKGITDITVEEGFRAWEHVAKYDIDHGVVLRSLAFDEGEPLPVSILEDIAVRRSAPATAAVDQDGPKDGAMPSSGPELKTWLDVKIRGIIAEVLMLSGPDEVEGRAAIADLGVDSVMTVTLRKKLQSTLKVKVPPTLTWSHPTSNHLVGWFEEKLTA

SEQ ID NO: 37991 - DNA, 6549 bp, Muscodor strobelii
  misc_feature: SGI EST ID NO. CUFF.91091.2
  misc_feature: Variant of the nucleotide sequence at SEQ ID NO 37989
ttgatgattttggtctggcctgcagagttatgataaggcacaaaggggcgaaacagaggcatgttggaatagcagaccgcgtttactacgactgaacaattcttgcagagatggtatttcctgccttgtttctcgcaattcttgcgcaaacgcgccatgataaaacatcgaattcaattgtcatacgcatatcggattggcgttgtagtttccagaacggggaattcacccagtgctccggtccggttccgcttaatccgggtcctgagttacatcctacccatttcagaagcactcgactgaactgtcgcgcagtctttatcagcaatgcatagcgttacactcaattcgctttccgtgcgaaattgtgggtaacttaggtctctgacatttcctgtactcccacacctgtgagcatcacgacttcattcatacatatctgtaaaaaaaaatagcaacggcctgcctcaacaggaattaccctttggggcttgcagatcgcttaaagcaagtgccatcaataatggcgtgcgagagtcgctgcataatcagcgaaaatgagctgcgcgtcttacagctcagaccctaaggggacaagatggcacttggcagtttgcccgacttggagctccggaaaggataattctcataagattggagtgtaaggagacacaagggtcatacgatcattcataagtacaagttagctgatctcgcaccaccacctggcctgcttgctttggtcattgcaatctgctactctattgtgagaatgccggggaactccgcctttcgcactttattttcgtggaacaactaaaccgcgcgtatactcaatgcttatttggtcagcgctctaattcatcgactccgatatcttacgatggctgcggaagacactcctccgtcgacccccggttttaccgggtcagagtcggcggaatgtacgacacccagctccgctagcgaagcaacggagctccgagatcttgtaggtagctgagatgagtcaatataacgggtgtttgctcacataattagatggacttcaactccaacgatgtcgcagtggtgggcattgcatgtcgtgtcgctggtggaaatcacacccccgagcaactctgggaatcgatccttgcgaagacagatgcatcgtcagagataccggcctggagatgggaaccatatcagcaccgtggtgctgccaatatgaaagaactcaagaagactactacccgtggctatttccttgatgcactggaaaattttgacccagcattcttcgggatatctccaaaagaagccgagcagatggacccgcaacagcgtctcactcttgaagtaacatgggaggctcttgaaaacgctggaattgaccccaaatcattgtccggctcaaacactgctgtattcatgggagtcaactcagatgactatagcaagctcctgcttgaagatctgccgaatgtcgaggcctggatgggcatcggtacagcatattgtggggtgccgaaccggatatcctaccatttgaacttgatgggaccaagtactgcagtagatgcagcctgcgcaagctccttggtggcaattcatcatggccggcaggcgattttgacaggggagtctacagtcgcaatcaccggaggtgtgaatgcactttgtggcccgggtttgacgagagtattggacaaggccggtgcaacctctccagaaggccgatgcctctcatttgacgatagcgctcatgggtacggacgaggtgagggagcggcaactgtgattttgaaaagaatggacgcagccatccaagacgggaacaacatcattgcagtcctcaaaggttcggctgtcgctcaagatgggaagacgaatggcattatggcacccaacgccaaagcacaggagctcgtagcataccaggccttggagcaggcgaaggttgacccggtgactattgattatgtcgaggctcgtaagtgtgcagtgaaggactgctcgctcggcaaatgcaaagcaatagctaattctcaatggtctagatgccacatctacacctcttggtgaccctactgaggtcagcgcaatctcggcggtctatggaatcgcacgtagcggaatgaaccccgttatgatagggtctgtcaagcccaatattggacatctggaggccggagctggcgccatgggtttcatcaaagctgtcacagcaatcaacaaagcgcagtttccaccgcaggccaacttgaagacgctaaactccaaaataaactgggtacagtccggtacgcgtgttgtccaagaagtcgcagactggatcaagccaagcaaccatcctcgccgcgctgccatttgctcatatggatacggaggcacagtatcacacgctgtcattgaagagtctccttatagcctcaaaaccaaggcggaagtcgctgacggaacgagtcccgtccttctggtgctgtctgcgcctcaagagaagcgtctacctatacaagccagtgccttggccacgtggctcaagacggacgtcggaagaggagagagcctggcatctattgcctgtactcttgcggaacgtcgtgcgaagcatgattaccgtgctgcgtttgtcgtaagtagccacgatgaggcatctgagatcttgaacgactttgctgccggcaagaagtcagagtttgcttcacaagatgtggttttcgggccccaggtcaatactgatgcggtatgggtgttctcaggacacggcgcacaatggcaagacatgggcaagggactcatcaccaaccccgttttcttccaagcaatccagccactagaggagatcatccaagctgaaggtgacttctctgtcattgatgccctgagagatggggagcattttgatcagtccgaccgcgtccaggtgttgacctacacagttcaaatcggacttgctgccgtgctccgcagtaagggtctccagccgtctgctattattggccattcagtcggtgaactggcagccgctgtcgttgctggatccataaccgcggaagagggtgcactcattgtcaccagacgagctaaactgtatgcgctagtcaaaggtcagggtggtatgtacatgataaatacacccttcgatgaggtgaagctcgagctcggggaggatggagacgttgtcgctgccattgattcgtcgccatcttcatgcgttgtgagcggcgactacgatgctgtggcagcatatgccgagcaaatgaagagcaagggtgtcaaggtcatgaaggtagcgacggatattgcattccactcccggaaaatgctgaatccgcttgctaatcctttgaaagagctgatcatgggtgatataaagccagggccatcaaggatacctctttattctaccgcagacgaggatcctcgatatactggtctcagagatgccgattactggatacacaacatgatcagtccagtactgctcaagtccgcagtgtgtgccgctcttgccgacggattcaggctcttcctcgaggtttcaagccatcccatcgtatcccactcgattaatgagactatcatggaccaaggtgtcggcgatgaagaatttgctgtcctgccaacacttcgacgaaacaagtcagcaggagcctctgcgctacacgccgtcggatctttgtttgtcaaaggtgctcgggtcaactttcgaaagcagttcggtaacaaagtacaatggtcaccgctggtacccaatacaccgtgggtacacaaggcaatctggaggaaggtcagcactgggtcgtccagtgatgcgggtagtctgctcactcacgacgtcgataaacacacactcttaggtcttcgaagcccacttggcggtaccagcaccgtcctatttacaacgaagttggataacaacacgaaaccatttccgggccgtcatccgcttcacggcactgaaatcgtaccggccgcagtgctagtgaacacattccatcatgcggcaaaggcatcgacactgtctaacatcacattgcgagtcccggtagctattaatgcgcctcgggatgtccaggttattgtcgaagatgactcagtcaagatcacttcacgcctacagcaaggtgaagagtccgccgaccactcttgggttacccataccactggtcgttggagtgtagcacaagaagataaggaaggccgccatgcccgctggatcgatgtcgaagcggcgaagaaacgtatcggcaatgtgttggcacccaacttctcgatggactatttggacaaggtaggagtctcggcaatgggatttccttgggctgtgacagagcattttggcaatttgaaggagatgattgctcacgtggacaccgctccgaatcacactgctgccgatttgccttgggacccatcttcgtgggcgtcgatcttggatgctgcaacgtctgtgggctcaacgatcttcttcgacaatccaaagctgcgcatgccagctcaaatcgagaaagtccacttctttacagaatacgggacgccgccgcctaagactgggtatctctacgtcgaggaggcttccgagcgtggcgctcccgcagtacacgtcagtgtttgcgacaccgatggcaatgtcatggccaaatttgagtccatgcgcttttccgagattgagggaactcctggtgtcagtggcagtgttgaatcactagtgcattcgcttgcttgggtgccggcaccatttgaaaacaagcctttatcttggaagcacgcagtcatagtctctgacgatcaagagctgctctcgcgttacagcaggcagctcaccatccgaacaggggcaaaggacattgtgcaataccctagcgcagctgctttcgttgctgctggcgggctggaatcagatactgccgtcatctactgccccgggccaacaagcgaattgacagaagtagcagcaaggtcagaagccttcattgatgaacttttgacgctcacaaaacacattgttcggtcttcggccgcggcgaaaaacgtgaaagtgtttacactcacatcggctgttggcgtcgccgaggacccgacagctctcgcccaggcccctctccagggcttggcgcgaatcatcgcgtcggaacatcccgacaattggggcgccttgattgacgtagatgatgggcagaagaacgcgtcgatgccgattctggcaatgaaatatgtgcgagaccaggatgtcattcggattgagaacgacctacctcgtgtcgcgcgacttcaaacactgcctcgggaccttgcatacagcaaagaagcggcagcctctcgcaccctgcttcccaagtctgagggcacctatttagtgacaggtggtcttggtgctttggggcttgaagtcgcgagctggctagtagagaagggagcacgacgcgtactcctgctatcacgtcgcgctctgcccccacggcgtgagtgggcatctgtcgggaaagacagttctttatacaatgtgctcgaggccattcaaaagctcgagcaatccggtgctacagtacacacgatagctttggatatcggggcgaaagatgcgcatctccgtcttcaggacgagctagatcgcctagccttgccgcctgtccttggtgttgtgcatgctgcaggtgcactagaggaccagctcgtgctcgacacgacagctgattcgttcagtcgcgtgctagcgcccaaggtatctggtgcactcgcactccatgccgtattcccaccaggaagcttggactggtttgtgctgttcagctcgtgtggccagctctttggattcccaggccagagcagctatgcgagcggcaacgcgttcctggatgcattggcaacgcatcgccgcggccagggcgacaactctgtggcattccaatggaccagctggcacggacttggtatggctgccagtacagatttcattacagctgaacttgagagcaaaggtatcacagatatcactgttgaggaaggcttccgcgcttgggagcacgtggcaaagtacgacatcgatcacggcgtcgttctgcgcagtcttgcatttgacgagggcgaaccacttcccgtgtcgattcttgaggacattgctgtgcgccgcagcgcaccagcaactgccgccgttgatcaggatggaccaaaagatggtgccatgccaagcagtggcccagaactcaagacgtggttggacgtcaagatcagggggatcattgccgaagttctgatgctgagcggcccagacgaggttgaaggtcgcgcggctattgcagatctcggtgtcgatagtgtcatgacggttacactgcgcaagaagcttcaaagtactctgaaagtgaaagtcccgcccactcttacgtggagtcatccgacgtcaaaccacctagtaggttggtttgaggagaagttgacggcttgagttattgtgcatagatacggttacaaatatttctctttctcgtattgattagaattatccttctatgtttaggtagctagatagattgcctccgtcatgaataaatttcattggtt

SEQ ID NO: 37992 - DNA, 1071 bp, Muscodor strobelii
  misc_feature: SGI cDNA ID NO. 573195
  misc_feature: Elevated expression when VOC is produced
  misc_feature: Encodes the peptide sequence at SEQ ID NO 37993
atggcagctgctcttcccatcgttgacctgactcggccagactcagagatcgcaaaggagatcactgagggcgcgattaaatggggatttgtttacgtgcgaagcaagggtctcggattcgacaaggagtatcttgagagtgctttcggcttggcccgcaagttctttgacagtgattatgaagtcaaagctgatgtagcatgtggtaaagagtataacccagcgggaagcggctggtcaggcccaggtcgagaggttttggatccagagcgccagaaaagaggcgattacaaggagggcatgaccttcaacgagtttacaggtggtcagccaggacaaaagatcccctctactctcgacaaccccgaagacaaaagcgcacttatcgactatcacgcgaagtttcgcagcgtctgtatcaagattctcgaattgttcgctgtaggtcttgagatacccgaggaagaaggcgggaaagactggtttgcatctcggcacaatcccgcgaacggtacttcgggcagcaatctgcgcttttgctattacccgaccttcagtgacgagcaggccaagaactttgatccgacagctgttcgcgcgtcctctcatactgattttggtacgatcaccatcttgtttcaacgaccaagtgagcctggcctagaggttctcaaccctgacaatgaatgggagcctgttgctgtctttcctcctggaaccgaggacgatgagttcccgcccattgtcatgaacatcggtgacctactcagctactggacagagggtgttatgaagagcaccattcatcgtgtgtccatcgatcccaatgccaacagggaccgatactcgatcgtatattttagccatcctgttggcactacagagctagtgactgtcccgagtcctgtagtgcgccaggctttgcttgacaagggacctgtgaaacgagctaagaccgcgaaagatcatgtgctcggtcgtttagatgacgtcttcggcgctgcccataagcgcattggtacccaggagactgtccagatgcctgttcaagcgcctactattactgtctaa

SEQ ID NO: 37993 - protein, 356 aa, Muscodor strobelii
  misc_feature: SGI Peptide ID NO. 573195
  misc_feature (173)..(290): Pfam Id: PF03171 Pfam Desc: 2OG-Fe(II) oxygenase superfamily
  misc_feature (5)..(333): NCBI GI: 255954057 Blast Desc: Pc21g07400 [Penicillium chrysogenum Wisconsin 54-1255] gi|211589492|emb|CAP95637.1| Pc21g07400 [Penicillium chrysogenum Wisconsin 54-1255]
  misc_feature (2)..(333): NCBI GI: 261191159 Blast Desc: oxidoreductase [Ajellomyces dermatitidis SLH14081] gi|239591032|gb|EEQ73613.1| oxidoreductase [Ajellomyces dermatitidis SLH14081]
  misc_feature (2)..(333): NCBI GI: 239613068 Blast Desc: oxidoreductase [Ajellomyces dermatitidis ER-3]
  misc_feature (5)..(333): NCBI GI: 226294127 Blast Desc: conserved [Paracoccidioides brasiliensis Pb18]
  misc_feature (5)..(333): NCBI GI: 240106864 Blast Desc: oxidoreductase, 2OG-Fe(II) oxygenase family protein [Coccidioides posadasii C735 delta SOWgp]
  misc_feature (5)..(334): NCBI GI: 119174518 Blast Desc: CIMG_09241 [Coccidioides immitis RS]
  misc_feature (5)..(333): NCBI GI: 121713806 Blast Desc: oxidoreductase, 2OG-Fe(II) oxygenase family, [Aspergillus clavatus NRRL 1] gi|119402667|gb|EAW13088.1| oxidoreductase, 2OG-Fe(II) oxygenase family, [Aspergillus NRRL 1]
  misc_feature (5)..(328): NCBI GI: 238499823 Blast Desc: oxidoreductase, 2OG-Fe(II) oxygenase family, [Aspergillus flavus NRRL3357] gi|220692899|gb|EED49245.1| oxidoreductase, 2OG-Fe(II) oxygenase family, [Aspergillus flavus
  misc_feature (5)..(335): NCBI GI: 154283245 Blast Desc: [Ajellomyces capsulatus NAm1] gi|150410598|gb|EDN05986.1| [Ajellomyces capsulatus NAm1]
  misc_feature (5)..(329): NCBI GI: 145254563 Blast Desc: An18g02050 [Aspergillus niger] gi|134084245|emb|CAK47277.1| protein product [Aspergillus niger]
  misc_feature (4)..(311): SWISSPROT Homolog: EC 1.14.17.4 Aminocyclopropanecarboxylate oxidase
  misc_feature: Useful for introducing or modulating the production of volatile compounds
MAAALPIVDLTRPDSEIAKEITEGAIKWGFVYVRSKGLGFDKEYLESAFGLARKFFDSDYEVKADVACGKEYNPAGSGWSGPGREVLDPERQKRGDYKEGMTFNEFTGGQPGQKIPSTLDNPEDKSALIDYHAKFRSVCIKILELFAVGLEIPEEEGGKDWFASRHNPANGTSGSNLRFCYYPTFSDEQAKNFDPTAVRASSHTDFGTITILFQRPSEPGLEVLNPDNEWEPVAVFPPGTEDDEFPPIVMNIGDLLSYWTEGVMKSTIHRVSIDPNANRDRYSIVYFSHPVGTTELVTVPSPVVRQALLDKGPVKRAKTAKDHVLGRLDDVFGAAHKRIGTQETVQMPVQAPTITV

SEQ ID NO: 37994 - DNA, 1279 bp, Muscodor strobelii
  misc_feature: SGI EST ID NO. CUFF.91043.0
  misc_feature: Variant of the nucleotide sequence at SEQ ID NO 37992
tcgcattgccacttgcaagatcttcgaaaatggcagctgctcttcccatcgttgacctgactcggccagactcagagatcgcaaaggagatcactgagggcgcgattaaatggggatttgtttacgtgcgaagcaagggtctcggattcgacaaggagtatcttgagagtgctttcggcttggcccgcaagttctttgacagtgattatgaagtcaaagctgatgtagcatgtggtaaagagtataacccagcgggaagcggctggtcaggcccaggtcgagaggttttggatccagagcgccagaaaagaggcgattacaaggagggcatgaccttcaacgagtttacaggtggtcagccaggacaaaagatcccctctactctcgacaaccccgaagacaaaagcgcacttatcgactatcacgcgaagtttcgcagcgtctgtatcaagattctcgaattgttcgctgtaggtcttgagatacccgaggaagaaggcgggaaagactggtttgcatctcggcacaatcccgcgaacggtacttcgggcagcaatctgcgcttttgctattacccgaccttcagtgacgagcaggccaagaactttgatccgacagctgttcgcgcgtcctctcatactgattttggtacgatcaccatcttgtttcaacgaccaagtgagcctggcctagaggttctcaaccctgacaatgaatgggagcctgttgctgtctttcctcctggaaccgaggacgatgagttcccgcccattgtcatgaacatcggtgacctactcagctactggacagagggtgttatgaagagcaccattcatcgtgtgtccatcgatcccaatgccaacagggaccgatactcgatcgtatattttagccatcctgttggcactacagagctagtgactgtcccgagtcctgtagtgcgccaggctttgcttgacaagggacctgtgaaacgagctaagaccgcgaaagatcatgtgctcggtcgtttagatgacgtcttcggcgctgcccataagcgcattggtacccaggagactgtccagatgcctgttcaagcgcctactattactgtctaaggcacatacactagacatgtatcgcccaatatcccatatagtagcggaggagtaaacttgaacatggtatatatttgcaaacaaagaatataaatgagactatactcaactagtttgttggagttatcagttcgttcggaactcactcgttatcagaaatacatctctatcaataatca

SEQ ID NO: 37995 - DNA, 1692 bp, Muscodor strobelii
  misc_feature: SGI cDNA ID NO. 573196
  misc_feature: Elevated expression when VOC is produced
  misc_feature: Encodes the peptide sequence at SEQ ID NO 37996
atgcagttgtcacacatacttgtgttcctcccgatcctggctcatgcgatcgacctccctgtcgtaaatctcggttatgagcgccaccaagccatatcgtacaatgagacaggcggttactacaactttaccaacatccgttatggtcaggctccgattggtgacttgcgttgggcaaagccgttggcgcccgtagagtccagtggcgatgatctcgatattgtcgacggctccgagcaaggaggcaattgtccctctgtatttccctgctggtttactatacaaacaggttttacggaagcttaccttgctggcgagctatttgagtttaacagcgaatatgaggagctttacgccgataatgcgtgttcaacagcaccaacacaggcagcgcttgctgggcagtcggaagattgtctcttcttagacgtatttgctcctaagggcactttcgacaacgcagcaaacagtgattcccctaaggcgccagttctagtgtacatatatgggggcggctactctggaggtgccaaggactttttcggatactttgaagggagtcctgcgggtttgattgacagcagccgcgtcacgagtccagatgggttgatctacataggtatcaattacagacttggtggtcttggatggatggtgggatccgagtacacctcccaaggtggtatccagaacttgggcctctacgatcagagactcgcgttaaaatgggtgcaggacaacgtccacctgtttggcggcgatcccaatcgcgttaccgttatgggtgagtccgctggtggcggctcaattctcatgcagatgacagctttcggcactggcgagaaggcacctttccaacaagccattatgcaatcacctgcgtgggaaccggatacagctggcagtccggatattcagaatcagatattcagtgagtatcttgcactgatgaacgtctcctctctggaagaagcgaagcagttgccttccagcgaagttattgatgccaactacatttggcttcggggtgccaagtacggtagcactttcttgggtccgacaataggtggcgactttgtcccagatgatcccaagcggctattgcgggacgggaaagtggacagcagtgtcaaactcctgacaacaattgcagcgaacgagggccttcgatttgcgcccggtaacgtatcgactgaggcggattttgtgcagtgggtcgacttcatgctcggtggtgcgagtacgactgtccgtgatcaggtcatcaatgagatttatcccccaatcttcgatgggtcgttcccgtggacaaaccagttggagagagcaggtgtgttttgggcggagcttgtgagtacatgcaatgctcggtacctacaagatgcgacgaacacgactggctatgccaatttattcaacgtatggccatcgcttcatcaaggagacattccctatgtcttcttcaacgggcctgtgacagtgagttctgtgaatggaactgttgctcggatttctcagaattatatcacggctttcgctatcaacggcgagcccaacaattccgagtccccttcgatgtctccttatgacaaggagtcaatcttgtcgatgacagcgaatggtttctctctagctgcggacccgacaaataatgcccgctgtgcgtattggcttgacgcaccatatgcatag

SEQ ID NO: 37996 - protein, 563 aa, Muscodor strobelii
  misc_feature: SGI Peptide ID NO. 573196
  misc_feature (1)..(557): Pfam Id: PF00135 Pfam Desc: Carboxylesterase
  misc_feature (134)..(292): Pfam Id: PF00135 Pfam Desc: Carboxylesterase
  misc_feature (326)..(424): Pfam Id: PF00135 Pfam Desc: Carboxylesterase
  misc_feature (1)..(61): Pfam Id: PF00135 Pfam Desc: Carboxylesterase
  misc_feature (18)..(557): NCBI GI: 121710936 Blast Desc: carboxylesterase family protein [Aspergillus clavatus NRRL 1] gi|119401234|gb|EAW11658.1| carboxylesterase family protein [Aspergillus clavatus NRRL 1]
  misc_feature (14)..(557): NCBI GI: 237625986 Blast Desc: carboxylesterase family protein [Penicillium griseofulvum]
  misc_feature (12)..(562): NCBI GI: 189200859 Blast Desc: acetylcholinesterase precursor [Pyrenophora tritici-repentis Pt-1C-BFP] gi|187983865|gb|EDU49353.1| acetylcholinesterase precursor [Pyrenophora tritici-repentis
  misc_feature (6)..(562): NCBI GI: 255946670 Blast Desc: Pc22g00570 [Penicillium chrysogenum Wisconsin 54-1255] gi|211591119|emb|CAP97345.1| Pc22g00570 [Penicillium chrysogenum Wisconsin 54-1255]
  misc_feature (19)..(562): NCBI GI: 154294375 Blast Desc: BC1G_13960 [Botryotinia fuckeliana B05.10] gi|150844799|gb|EDN19992.1| BC1G_13960 [Botryotinia fuckeliana B05.10]
  misc_feature (9)..(562): NCBI GI: 156039433 Blast Desc: SS1G_11853 [Sclerotinia sclerotiorum 1980] gi|154697590|gb|EDN97328.1| SS1G_11853 [Sclerotinia sclerotiorum 1980]
  misc_feature (13)..(562): NCBI GI: 119485943 Blast Desc: carboxylesterase family protein [Neosartorya fischeri NRRL 181] gi|119410470|gb|EAW20417.1| carboxylesterase family protein [Neosartorya fischeri NRRL 181]
  misc_feature (35)..(560): NCBI GI: 169773941 Blast Desc: [Aspergillus oryzae RIB40] gi|83769300|dbj|BAE59437.1| protein product [Aspergillus oryzae]
  misc_feature (16)..(519): NCBI GI: 256727193 Blast Desc: NECHADRAFT_76924 [Nectria haematococca mpVI 77-13-4]
  misc_feature (136)..(560): NCBI GI: 238491970 Blast Desc: carboxylesterase, type B, [Aspergillus flavus NRRL3357] gi|220697635|gb|EED53976.1| carboxylesterase, type B, [Aspergillus flavus NRRL3357]
  misc_feature (43)..(487): SWISSPROT Homolog: EC 3.1.1.3 Triacylglycerol lipase
  misc_feature: Useful for introducing or modulating the production of volatile compounds
MQLSHILVFLPILAHAIDLPVVNLGYERHQAISYNETGGYYNFTNIRYGQAPIGDLRWAKPLAPVESSGDDLDIVDGSEQGGNCPSVFPCWFTIQTGFTEAYLAGELFEFNSEYEELYADNACSTAPTQAALAGQSEDCLFLDVFAPKGTFDNAANSDSPKAPVLVYIYGGGYSGGAKDFFGYFEGSPAGLIDSSRVTSPDGLIYIGINYRLGGLGWMVGSEYTSQGGIQNLGLYDQRLALKWVQDNVHLFGGDPNRVTVMGESAGGGSILMQMTAFGTGEKAPFQQAIMQSPAWEPDTAGSPDIQNQIFSEYLALMNVSSLEEAKQLPSSEVIDANYIWLRGAKYGSTFLGPTIGGDFVPDDPKRLLRDGKVDSSVKLLTTIAANEGLRFAPGNVSTEADFVQWVDFMLGGASTTVRDQVINEIYPPIFDGSFPWTNQLERAGVFWAELVSTCNARYLQDATNTTGYANLFNVWPSLHQGDIPYVFFNGPVTVSSVNGTVARISQNYITAFAINGEPNNSESPSMSPYDKESILSMTANGFSLAADPTNNARCAYWLDAPYA

SEQ ID NO: 37997 - DNA, 2401 bp, Muscodor strobelii
  misc_feature: SGI EST ID NO. CUFF.91047.0
  misc_feature: Variant of the nucleotide sequence at SEQ ID NO 37995
atgatttgtctagccactatgtaaatgcctacatagtgtacattttaagatcttgcagctagtactcgcccatggcccagtgttgaccttgagctaatgcgagagtaccgctcgagtgtggaggtcagccaatctcacctgcttccgcatatgcaagtgctcccagcccgcgtgacacccctggccgcgtatgcttggattcactccgacttccccgttcagtcctccgggccactccgattctccatgcaacttgtcaatgaggaattacttgggatgttgactccatattcgacttcaggcatcatgaagacggcaagtcgagctaattaccaacgcctgatagcgtaccttctgcatcaaaatgggaatgcgacgcgcggtgtcaacaggttgacccataatgatacttggcggagaaagcaatagaattatataacaattggattttgtgctacagtcaccgaagctcaagttttcgatgcatcgtgatgacgaactttcgtggctttcgtggcttgcacatcacagaagtcctatccgtcaaaatgcagttgtcacacatacttgtgttcctcccgatcctggctcatgcgatcgacctccctgtcgtaaatctcggttatgagcgccaccaagccatatcgtacaatgagacaggcggttactacaactttaccaacatccgttatggtcaggctccgattggtgacttgcgttgggcaaagccgttggcgcccgtagagtccagtggcgatgatctcgatattgtcgacggctccgagcaaggaggcaattgtccctctgtatttccctgctggtttactatacaaacaggttttacggaagcttaccttgctggcgagctatttgagtttaacagcgaatatgaggagctttacgccgataatgcgtgttcaacagcaccaacacaggcagcgcttgctgggcagtcggaagattgtctcttcttagacgtatttgctcctaagggcactttcgacaacgcagcaaacagtgattcccctaaggcgccagttctagtgtacatatatgggggcggctactctggaggtgccaaggactttttcggatactttgaagggagtcctgcgggtttgattgacagcagccgcgtcacgagtccagatgggttgatctacataggtatcaattacagacttggtggtcttggatggatggtgggatccgagtacacctcccaaggtggtatccagaacttgggcctctacgatcagagactcgcgttaaaatgggtgcaggacaacgtccacctgtttggcggcgatcccaatcgcgttaccgttatgggtgagtccgctggtggcggctcaattctcatgcagatgacagctttcggcactggcgagaaggcacctttccaacaagccattatgcaatcacctgcgtgggaaccggatacagctggcagtccggatattcagaatcagatattcagtgagtatcttgcactgatgaacgtctcctctctggaagaagcgaagcagttgccttccagcgaagttattgatgccaactacatttggcttcggggtgccaagtacggtagcactttcttgggtccgacaataggtggcgactttgtcccagatgatcccaagcggctattgcgggacgggaaagtggacagcagtgtcaaactcctgacaacaattgcagcgaacgagggccttcgatttgcgcccggtaacgtatcgactgaggcggattttgtgcagtgggtcgacttcatgctcggtggtgcgagtacgactgtccgtgatcaggtcatcaatgagatttatcccccaatcttcgatgggtcgttcccgtggacaaaccagttggagagagcaggtgtgttttgggcggagcttgtgagtacatgcaatgctcggtacctacaagatgcgacgaacacgactggctatgccaatttattcaacgtatggccatcgcttcatcaaggagacattccctatgtcttcttcaacgggcctgtgacagtgagttctgtgaatggaactgttgctcggatttctcagaattatatcacggctttcgctatcaacggcgagcccaacaattccgagtccccttcgatgtctccttatgacaaggagtcaatcttgtcgatgacagcgaatggtttctctctagctgcggacccgacaaataatgcccgctgtgcgtattggcttgacgcaccatatgcataggtttgagggctgaaagtcatttcaatttgtaccttgcttaatcttgactaccttgagcctcaaacaaccatatatcaatcggtagattaattcatatcttggatcgtgattgatgaaatcgccattgcatagcatattttaggtagtgtcctacgatagag

SEQ ID NO: 37998 - DNA, 1593 bp, Muscodor strobelii
  misc_feature: SGI cDNA ID NO. 573197
  misc_feature: Encodes the peptide sequence at SEQ ID NO 37999
atgcacagcattaattttttatggcctatacttggtgtcatcgtgtatatcgtgtatggcgcctttcactatggccatcggcgaagagacatgccgactgggcctaaaacactgccattcatagggaaccttcatcaacttccaaagagctatacacacattcaattcacggaatgggctcgaaaatatggcgggctgtatacactgaagttagggagcgctacaatggccgtcatcacggaccgaagcattgtgaagagcaccgttgataagaagagcaacatatactcgcatagaccaccatcatatgtgtcgcatgatctcatcacgaaaggaaaccatctactcgtcatgttctacggggacaaatggcgcaaattccgtcggctcattcaccaacatctcaccgagaacatggtcgagcgtgaacacttatcgatcgtcaacgctgaagctattcagctagttcgcgattatctgctgtaccccgaagaccatatgcttcatccgaagagattcagtaacagtatcagtaattctattatttttggaatccgttcacctcatgtcaggtccgggtatatgaaacgtctttatactttgatggaatcatggtcagagcttatggaaactggcaacactccaccggtggatatcttcccatggctaaaggcaatcccacaacagctattcggcaactataaaacacgttccttacgcgtcggccagcagatggagaacctatatgaagacgttttacaggacgttcttcagcgaagaaaaacccgcaatgcagggtctttcatggacgttgtcctcgatcagcaagataagattcagctgccacgcgacgaactgcgcttcatcggcggcgtgttgatggaggggggctctgacacctcctcgtctcttatcttggcgattattcaggccctcatcttgaacccggatatacaggaaaaagcacactgcgaaatctcggaagtcgttggtcaagaccggtcgccgacttggtctgatatggacaagcttccttatgttaacatgattgtcaaagagggccaccgatggagacccattctgccgctgtgttttccccactctctcggtcaagatgactgggtagacggtaagttcctaccaaaaggcacaacggtgatcctcaatgtatggggcatgcacatggacccacaagtctgggaagatccggagaagttcaacccagatcggtacaaaaaccacccccttttggcacccgagtatgtcgcgggaggagattggcagaagcgagatcattacggttacggggctggtcgccgtatctgcccaggaatgtatctcgcggaacggaacatgctcgtgtccattgccaaactgatctgggctttccgcttcgagcagcgcgttgacactgatggtcggccgattcctgttgaccctgatcctgtcacgggataccataacggatttctatactgtccaaaggaatatggctgtaatccgatcgtaagatctgatcagatccgcgatacaatcatgcacgagtacagtcaagcggagaaagaagtattcagcaagttcggactgagttaa

SEQ ID NO: 37999 - protein, 530 aa, Muscodor strobelii
  misc_feature: SGI Peptide ID NO. 573197
  misc_feature (32)..(494): Pfam Id: PF00067 Pfam Desc: Cytochrome P450
  misc_feature (177)..(494): Pfam Id: PF00067 Pfam Desc: Cytochrome P450
  misc_feature (32)..(157): Pfam Id: PF00067 Pfam Desc: Cytochrome P450
  misc_feature (1)..(527): NCBI GI: 121710948 Blast Desc: Cytochrome P450 oxidoreductase, [Aspergillus clavatus NRRL 1] gi|119401240|gb|EAW11664.1| Cytochrome P450 oxidoreductase, [Aspergillus clavatus NRRL 1]
  misc_feature (1)..(527): NCBI GI: 195971093 Blast Desc: m-cresol methyl hydroxylase [Aspergillus clavatus]
  misc_feature (21)..(527): NCBI GI: 255948120 Blast Desc: Pc22g08110 [Penicillium chrysogenum Wisconsin 54-1255] gi|211591844|emb|CAP98099.1| Pc22g08110 [Penicillium chrysogenum Wisconsin 54-1255]
  misc_feature (7)..(527): NCBI GI: 242782663 Blast Desc: cytochrome P450, [Talaromyces stipitatus ATCC 10500] gi|218720192|gb|EED19611.1| cytochrome P450, [Talaromyces stipitatus ATCC 10500]
  misc_feature (10)..(527): NCBI GI: 121710950 Blast Desc: Cytochrome P450 oxidoreductase, [Aspergillus clavatus NRRL 1] gi|119401241|gb|EAW11665.1| Cytochrome P450 oxidoreductase, [Aspergillus clavatus NRRL 1]
  misc_feature (10)..(527): NCBI GI: 195971095 Blast Desc: m-hydroxybenzyl alcohol hydroxylase [Aspergillus clavatus]
  misc_feature (1)..(527): NCBI GI: 259479677 Blast Desc: TPA: cytochrome P450, (Eurofung) [Aspergillus nidulans FGSC A4]
  misc_feature (12)..(529): NCBI GI: 145256038 Blast Desc: An10g00110 [Aspergillus niger CBS 513.88] gi|134078574|emb|CAK49102.1| protein product [Aspergillus niger]
  misc_feature (43)..(528): NCBI GI: 255939388 Blast Desc: Pc16g00400 [Penicillium chrysogenum Wisconsin 54-1255] gi|211585086|emb|CAP92710.1| Pc16g00400 [Penicillium chrysogenum Wisconsin 54-1255]
  misc_feature (41)..(529): NCBI GI: 171691562 Blast Desc: protein product [Podospora anserina] gi|170945729|emb|CAP71842.1| protein product [Podospora anserina]
  misc_feature (10)..(470): SWISSPROT Homolog: EC 1.14.14.1 Unspecific monooxygenase
MHSINFLWPILGVIVYIVYGAFHYGHRRRDMPTGPKTLPFIGNLHQLPKSYTHIQFTEWARKYGGLYTLKLGSATMAVITDRSIVKSTVDKKSNIYSHRPPSYVSHDLITKGNHLLVMFYGDKWRKFRRLIHQHLTENMVEREHLSIVNAEAIQLVRDYLLYPEDHMLHPKRFSNSISNSIIFGIRSPHVRSGYMKRLYTLMESWSELMETGNTPPVDIFPWLKAIPQQLFGNYKTRSLRVGQQMENLYEDVLQDVLQRRKTRNAGSFMDVVLDQQDKIQLPRDELRFIGGVLMEGGSDTSSSLILAIIQALILNPDIQEKAHCEISEVVGQDRSPTWSDMDKLPYVNMIVKEGHRWRPILPLCFPHSLGQDDWVDGKFLPKGTTVILNVWGMHMDPQVWEDPEKFNPDRYKNHPLLAPEYVAGGDWQKRDHYGYGAGRRICPGMYLAERNMLVSIAKLIWAFRFEQRVDTDGRPIPVDPDPVTGYHNGFLYCPKEYGCNPIVRSDQIRDTIMHEYSQAEKEVFSKFGLS

SEQ ID NO: 38000 - DNA, 1597 bp, Muscodor strobelii
  misc_feature: SGI EST ID NO. CUFF.91050.0
  misc_feature: Variant of the nucleotide sequence at SEQ ID NO 37998
acattcaattcacggaatgggctcgaaaatatggcgggctgtatacactgaagttagggagcgctacaatggccgtcatcacggaccgaagcattgtgaagagcaccgttgataagaagagcaacatatactcgcatagaccaccatcatatgtgtcgcatgatctcatcacgaaaggaaaccatctactcgtcatgttctacggggacaaatggcgcaaattccgtcggctcattcaccaacatctcaccgagaacatggtcgagcgtgaacacttatcgatcgtcaacgctgaagctattcagctagttcgcgattatctgctgtaccccgaagaccatatgcttcatccgaagagattcagtaacagtatcagtaattctattatttttggaatccgttcacctcatgtcaggtccgggtatatgaaacgtctttatactttgatggaatcatggtcagagcttatggaaactggcaacactccaccggtggatatcttcccatggctaaaggcaatcccacaacagctattcggcaactataaaacacgttccttacgcgtcggccagcagatggagaacctatatgaagacgttttacaggacgttcttcagcgaagaaaaacccgcaatgcagggtctttcatggacgttgtcctcgatcagcaagataagattcagctgccacgcgacgaactgcgcttcatcggcggcgtgttgatggaggggggctctgacacctcctcgtctcttatcttggcgattattcaggccctcatcttgaacccggatatacaggaaaaagcacactgcgaaatctcggaagtcgttggtcaagaccggtcgccgacttggtctgatatggacaagcttccttatgttaacatgattgtcaaagagggccaccgatggagacccattctgccgctgtgttttccccactctctcggtcaagatgactgggtagacggtaagttcctaccaaaaggcacaacggtgatcctcaatgtatggggcatgcacatggacccacaagtctgggaagatccggagaagttcaacccagatcggtacaaaaaccacccccttttggcacccgagtatgtcgcgggaggagattggcagaagcgagatcattacggttacggggctggtcgccgtatctgcccaggaatgtatctcgcggaacggaacatgctcgtgtccattgccaaactgatctgggctttccgcttcgagcagcgcgttgacactgatggtcggccgattcctgttgaccctgatcctgtcacgggataccataacggatttctatactgtccaaaggaatatggctgtaatccgatcgtaagatctgatcagatccgcgatacaatcatgcacgagtacagtcaagcggagaaagaagtattcagcaagttcggactgagttaaacgtatttgaaacacaatatgatacctgggggctgtttacgtctcttcaaatattcttaacaagatagccctactgcagtcgtctacaatggatatcttagctttccgaatcttaattcctggttcctattagacgtaattatattcaatgtagaaaatca

SEQ ID NO: 38001 - DNA, 996 bp, Muscodor strobelii
  misc_feature: SGI cDNA ID NO. 573198
  misc_feature: Reduced expression when VOC is produced
  misc_feature: Encodes the peptide sequence at SEQ ID NO 38002
atggcgcagcgggttgacgtacatcatcacatagtcccacccttttacaaggaagctttgatagcagctgggggcgacccatctggatggatcattcctgagtggactgttgaaacagactgcagcttcaatgacgaagaaaacattgcatttactttcttatcaattactgccccgggcgcaggaattgtaccgcaagatgctcaagccgcattttgtcgtacggcaaatgaatacatggcttcagtatgcgcctctcatccgactcgatacgggttcttcgcatgtacaccaagcctacttgacccagaagccgctcacaaggaaatcgtacatgcattggacaatttgaaagccgatggcgtcacgctctacacaaggtatgggaaagataaccactaccttggccaccctaatttccaggcgacatgggatctcctcaatgagcgtaggactgttgtgttcgtacaccctacacatcccgttgataccgcactcgtgaactcgagcctgcctcagcctatgcttgattaccctcacgagacaacgcgtactgccgttgacctcatcacctccggccggatacggtcacattccaatgtcaagatcatattgtcgcatgcgggcggcacactgccatatcttgccctccggcctgcggcaatgctaccctatgttcccgtcaacatgcaaggaggtcagccaaagacttcgctcactgcaacattcatggaggatgcaaagacattttatttcgacacggcgctgtccgctggacccttgactctagcgttgttgaaggacttcgccaagcctggacatgtgctatttggcagtgacttcccatacgcaccgacccccacaatcaaacaaatggatggtttattggacgagtacactgagaaggatggtgactttgtcacttcgatcaatcatgacgcagctttacagctatttccacgtctcaaatcctatctagctaatggtaaggcataa

SEQ ID NO: 38002 - protein, 331 aa, Muscodor strobelii
  misc_feature: SGI Peptide ID NO. 573198
  misc_feature (5)..(321): Pfam Id: PF04909 Pfam Desc: Amidohydrolase
  misc_feature (2)..(329): NCBI GI: 85089642 Blast Desc: NCU09844 [Neurospora crassa OR74A] gi|28919354|gb|EAA28806.1| [Neurospora crassa OR74A]
  misc_feature (3)..(324): NCBI GI: 256724908 Blast Desc: NECHADRAFT_91485 [Nectria haematococca mpVI 77-13-4]
  misc_feature (4)..(323): NCBI GI: 121710946 Blast Desc: amidohydrolase family protein [Aspergillus clavatus NRRL 1] gi|119401239|gb|EAW11663.1| amidohydrolase family protein [Aspergillus clavatus NRRL 1]
  misc_feature (4)..(321): NCBI GI: 145230461 Blast Desc: An01g11270 [Aspergillus niger] gi|134055657|emb|CAK44031.1| protein product [Aspergillus niger]
  misc_feature (3)..(323): NCBI GI: 145256042 Blast Desc: An10g00120 [Aspergillus niger CBS 513.88] gi|134078575|emb|CAK49103.1| protein product [Aspergillus niger]
  misc_feature (3)..(323): NCBI GI: 255939386 Blast Desc: Pc16g00390 [Penicillium chrysogenum Wisconsin 54-1255] gi|211585085|emb|CAP92709.1| Pc16g00390 [Penicillium chrysogenum Wisconsin 54-1255]
  misc_feature (2)..(322): NCBI GI: 145248824 Blast Desc: An14g01235 [Aspergillus niger] gi|134081422|emb|CAK41904.1| protein product [Aspergillus niger]
  misc_feature (3)..(324): NCBI GI: 169777657 Blast Desc: [Aspergillus oryzae RIB40] gi|238494842|ref|XP_002378657.1| 2-amino-3-carboxymuconate-6-semialdehyde decarboxylase, flavus
  misc_feature (3)..(320): NCBI GI: 188501529 Blast Desc: amidohydrolase-like protein [Adineta vaga]
  misc_feature (3)..(320): NCBI GI: 188501504 Blast Desc: amidohydrolase-like protein [Adineta vaga]
  misc_feature (4)..(302): SWISSPROT Homolog: EC 4.1.1.45 Aminocarboxymuconate-semialdehyde decarboxylase
  misc_feature: Useful for introducing or modulating the production of volatile compounds
MAQRVDVHHHIVPPFYKEALIAAGGDPSGWIIPEWTVETDCSFNDEENIAFTFLSITAPGAGIVPQDAQAAFCRTANEYMASVCASHPTRYGFFACTPSLLDPEAAHKEIVHALDNLKADGVTLYTRYGKDNHYLGHPNFQATWDLLNERRTVVFVHPTHPVDTALVNSSLPQPMLDYPHETTRTAVDLITSGRIRSHSNVKIILSHAGGTLPYLALRPAAMLPYVPVNMQGGQPKTSLTATFMEDAKTFYFDTALSAGPLTLALLKDFAKPGHVLFGSDFPYAPTPTIKQMDGLLDEYTEKDGDFVTSINHDAALQLFPRLKSYLANGKA

SEQ ID NO: 38003 - DNA, 1429 bp, Muscodor strobelii
  misc_feature: SGI EST ID NO. CUFF.91055.0
  misc_feature: Variant of the nucleotide sequence at SEQ ID NO 38001
aaagcaccccttattatagcattcttgttttgtttccttagatagaatataaacagtatatcgtactttcggtgaccctctcgaagacgaaacctttcaaattacaacaacatacacaaccacaatggcgcagcgggttgacgtacatcatcacatagtcccacccttttacaaggaagctttgatagcagctgggggcgacccatctggatggatcattcctgagtggactgttgaaacagactgcagcttcaatgacgaagaaaacattgcatttactttcttatcaattactgccccgggcgcaggaattgtaccgcaagatgctcaagccgcattttgtcgtacggcaaatgaatacatggcttcagtatgcgcctctcatccgactcgatacgggttcttcgcatgtacaccaagcctacttgacccagaagccgctcacaaggaaatcgtacatgcattggacaatttgaaagccgatggcgtcacgctctacacaaggtatgggaaagataaccactaccttggccaccctaatttccaggcgacatgggatctcctcaatgagcgtaggactgttgtgttcgtacaccctacacatcccgttgataccgcactcgtgaactcgagcctgcctcagcctatgcttgattaccctcacgagacaacgcgtactgccgttgacctcatcacctccggccggatacggtcacattccaatgtcaagatcatattgtcgcatgcgggcggcacactgccatatcttgccctccggcctgcggcaatgctaccctatgttcccgtcaacatgcaaggaggtcagccaaagacttcgctcactgcaacattcatggaggatgcaaagacattttatttcgacacggcgctgtccgctggacccttgactctagcgttgttgaaggacttcgccaagcctggacatgtgctatttggcagtgacttcccatacgcaccgacccccacaatcaaacaaatggatggtttattggacgagtacactgagaaggatggtgactttgtcacttcgatcaatcatgacgcagctttacagctatttccacgtctcaaatcctatctagctaatggtaaggcataacggataaccatcaagacattggaaagagaatgttcatgtcggtcatttcccaagctggtatggatacccgatgttggcataatgcatagccgcaaaccttagagaattgatagtataaaattcaacgtttgagaagttcagagatgatgtgagcggcaaaaatatatcaaccagaattggatagataatttggcacgcgatgattaagcaacctgctatccactgtatacaaatttcaaaatcaggaatttcaaatgccacatatgtacaacagaggacatgtaagaatgaaagcaacgaacttgaaaa

SEQ ID NO: 38004 - DNA, 4113 bp, Muscodor strobelii
  misc_feature: SGI cDNA ID NO. 573199
  misc_feature: Encodes the peptide sequence at SEQ ID NO 38005
atggatggccggcgagatgggttcggcgaccttgtccgacagtttttggctactcatgactcggcatcgagcagccgttctgcaatttcgttcgacaatctatcggtgatcggagcaggtaaaggtattcaagccgcaccaactgtatcgagtaccgtcaaagcatggactcaattcctaaatccacgaacgtatactgaacctcagccctcgcgaacccttctccatggcttctccggaaccctccgtgacagcgaaatgctgttggttattggaaaaccaggaagcggatgtacaacatttttgaaagcactatcaaacatgtacgaagagtacaagatggttaacgggcgagtcacatatggtggcagggcggccgacactcacgaccaggatcgggttcggcttacattttgtgctgaagaggacagtcatctgccaacactcactgttgcacaaacactacgctttgcagtgcgagcgacatggccttcagaaacgtccaaagcggtggtcaaccgcgcggtggaattgttggcggcctgcgtcggtctgtctaatgtgctaaagacaagagtcgggaacccagcagtgcatggtgttagcggcggcgagcggcggcgagtttctcttgctgaagctatcgcgacacttccagacgttctatgtttagataatccgacgcatgggctggacgcagccaccgcactcgatttcatccaaatgctccgagacttcacgaaccaacatggatgttcaacagctgtcagtgtctatcaaggcagcgactccatggtcccattattcgacaaagtccttgtcatcaacggcggccgtcaaattttctacggaaaagcgactgaagcgaagacttatttcgagagacttggatttcattgttccgagcggacaaccatcaccgatttcctaaactcaatgacggcggaacctgagttgcgacatgtgcatgacggctggaaatatcgcgtccctatgaatgctgttcagttcgaggaagcatttcataagagtgaatactacaagatgctattggacgatatcgccgatgagaagcgacaagctttatcagtacccattggctcgagacgaaagatctacgaactgccgctgtaccgtcagatattcgaatgttgtgtgcgtcaattcagaattcttgtgggagacactaatacttgggtcactgagctggttactatcgtgattcaaagcttagttctcggcacactttttagagatcagccccgttcaacgcagtcgttttttgtactcggatccgccttattcaactctgtcctcgtcccggccttgcagtccatgagcgaattcaacaatagcttcgccgaacgtccgcttgtcatcagacagaaacgataccgcttctataggcctattgcttatgcaatgggtcttgtgctgactgacgctgtatggaagatcgtggcgattagctataatatacctcaatacttcctcatcggctttcaacgaagtgccgacaagttcttcatctggttcctgatcgtatacattgagcacctagctctgtcgatgatctttcgcgccatagctgtctcttcaccgacaatgggtcgcgcagtgcttcccgtcgggctcatgttcaatctctttgtcctgtacacggggctgtacgtgccagggccgcaaatgcaagtgtggctcttctggctccgctatctcaaccctctttactatgggtatgagtctgcaatggtgaatgaatttggcaatcttaattacacctgtagcgatggcgatattgtgcctagtggtccaggatattcctcggttgcacaacaagtatgtgccgtgaaaggcgcaatgccaggtcaggcattagtatctggagcggcctacgtccacgatcagtttggatttgacacatcgcatctctggagaaatatcggtattaatgccgtattcttcgccttctttgctgtttgcaccgggattggtatggaatactataagcttcctgcaggtcgtctagctacgatattctacaaggcagaacccaatgcagttgcgaaagcatcaacaacttcttctgctgagacatccgacggcgaaaaaggaactaccggagaggatactcctccagtgaatgcccgacaacttttaagctcgccggcatctcatcccgtacagtcggtgtcaagtcacaatggccgtacgttagcctgggagaatctcactcttgaattgaaagttggcgacgagcttaagcgactcctagatggtcttagtggatttgtacagcctggccagttaacagctttgatgggcgcatccggcgctggtaagacaactttattgaatactctggctggccgtctagagtttgggtcattgaccggagagctgtacctggatggtggcccgctaccgaagtcctttcgtcgttatatgggctatgtccaacaacaggatgtacatctgcctacgcagactgttcgcgaggcgctgcaagttacagcgcatctacggcgacctctcaacgtccccgacgaagagaaatacgcgcatgttgaggcagtgatccgcacactagagatggaggatattgctgatgcgctcattggtgtccctggagctggattgaatttggaacaaagaaagagagttacaattggcgttgagctttctgctaggccagatattctactcctcgatgaacccacatctggcctggatggtcaatcagcgctgactattggccgcctcttgcgcaaactggccgagtcgggacaaaccgttctctgcacaattcatcaacctgctgcagagctgatcgagctatttgaccaccttattttgcttgttccgggaggccgtcttgcttatgacggcccgctaggcgagaagtgttcgaacgccttggattattttatcggctccaaccctgctcgccctttccatggccatgaaaatccggcagagtatctggttgaagtagtaagagacggagtccaatcgaagcctgacacccaagtttctacgtatgccgatctctggaataccagcaatgagcgcatcgctcgtgatacacagcgagaattgataattagcaacaacactcacgcaactgccaatatcagtgtggagcgcacttatgcagtgccccttcatgtgcagtttatggtcaccatgcgacgaacttggttatactattggagagacccagattatttcgcatcgaagctctggatgaacgtcggcaatgcattgttgaatggcttgacttatctcaattccggaaatgctcaagccggtgcatacaatcgtgttttctcggctttcatgtcgttgatcgtcggtccaccattaggcttacagattcagccgcgatttgttgctctccgtgatattttcacactccgggaacaagccagcctcacgtatagctggctttgctttgtgggaccggccattctcgttgagctgccatacgcatttattactagcctggtgtattggctgctttggtacttccctgttcactacttcactcagccagtacgtgcgggttacagctttctgatgtatgagctcttctccatcttcgcacatagtctagctcagctctgtgcggcacttatgccgagcctgaactccactttcatggctaacgggttcttcttcatgtttgtcaacacatttgctggcacgctttcgcctcggccagtcacaccgacgggatggcgttggtactataatgtctcgcccctctattacttgagcgaaggcacgacttccgacatgctatatggccttgacatgacatgtcagcccgacgagatctccatctttcaaccacccaatggatcatcctgccaacaatacgccgatgagttcttgcgttcggccactgggttcctgctcaactctgacgcgtcttccgattgccaatactgtcggtataagaacggccagtcctactatctgcaatggggctacgacttcgcacatcgatatagaaacattggtatcttcatcgggttcattgcatttaactacactgcagtcatcttgttgacctatttgactaaggttaggaaaagaaagcgttcatag

SEQ ID NO: 38005 - protein, 1370 aa, Muscodor strobelii
  misc_feature: SGI Peptide ID NO. 573199
  misc_feature (379)..(588): Pfam Id: PF01061 Pfam Desc: ABC-2 type transporter
  misc_feature (1057)..(1268): Pfam Id: PF01061 Pfam Desc: ABC-2 type transporter
  misc_feature (768)..(956): Pfam Id: PF00005 Pfam Desc: ABC transporter
  misc_feature (85)..(278): Pfam Id: PF00005 Pfam Desc: ABC transporter
  misc_feature (599)..(757): Pfam Id: PF06422 Pfam Desc: CDR ABC transporter
  misc_feature (599)..(668): Pfam Id: PF06422 Pfam Desc: CDR ABC transporter
  misc_feature (9)..(1366): NCBI GI: 121710958 Blast Desc: ABC transporter PeaB1 [Aspergillus clavatus NRRL 1] gi|119401245|gb|EAW11669.1| ABC transporter PeaB1 [Aspergillus clavatus NRRL 1]
  misc_feature (6)..(1366): NCBI GI: 125971581 Blast Desc: ABC transporter [Byssochlamys nivea]
  misc_feature (6)..(1367): NCBI GI: 237625982 Blast Desc: ABC transporter [Penicillium griseofulvum]
  misc_feature (6)..(1367): NCBI GI: 89276442 Blast Desc: ABC transporter [Penicillium griseofulvum]
  misc_feature (6)..(1366): NCBI GI: 125656312 Blast Desc: ABC transporter [Penicillium expansum]
  misc_feature (12)..(1366): NCBI GI: 242794869 Blast Desc: ATP-binding cassette transporter, [Talaromyces stipitatus ATCC 10500] gi|218719052|gb|EED18472.1| ATP-binding cassette transporter, [Talaromyces stipitatus ATCC 10500]
  misc_feature (9)..(1369): NCBI GI: 255930735 Blast Desc: Pc12g00190 [Penicillium chrysogenum Wisconsin 54-1255] gi|211581543|emb|CAP79646.1| Pc12g00190 [Penicillium chrysogenum Wisconsin 54-1255]
  misc_feature (2)..(1368): NCBI GI: 238502245 Blast Desc: ATP-binding cassette transporter, [Aspergillus flavus NRRL3357] gi|220691166|gb|EED47514.1| ATP-binding cassette transporter, [Aspergillus flavus NRRL3357]
  misc_feature (58)..(1368): NCBI GI: 169775617 Blast Desc: [Aspergillus oryzae RIB40] gi|83771010|dbj|BAE61142.1| protein product [Aspergillus oryzae]
  misc_feature (11)..(1216): NCBI GI: 145235003 Blast Desc: An03g02540 [Aspergillus niger] gi|134057826|emb|CAK38221.1| protein product [Aspergillus niger]
  misc_feature: Useful for introducing or modulating the production of volatile compounds
  misc_feature: Useful for fungicidal and/or biocontrol applications
MDGRRDGFGDLVRQFLATHDSASSSRSAISFDNLSVIGAGKGIQAAPTVSSTVKAWTQFLNPRTYTEPQPSRTLLHGFSGTLRDSEMLLVIGKPGSGCTTFLKALSNMYEEYKMVNGRVTYGGRAADTHDQDRVRLTFCAEEDSHLPTLTVAQTLRFAVRATWPSETSKAVVNRAVELLAACVGLSNVLKTRVGNPAVHGVSGGERRRVSLAEAIATLPDVLCLDNPTHGLDAATALDFIQMLRDFTNQHGCSTAVSVYQGSDSMVPLFDKVLVINGGRQIFYGKATEAKTYFERLGFHCSERTTITDFLNSMTAEPELRHVHDGWKYRVPMNAVQFEEAFHKSEYYKMLLDDIADEKRQALSVPIGSRRKIYELPLYRQIFECCVRQFRILVGDTNTWVTELVTIVIQSLVLGTLFRDQPRSTQSFFVLGSALFNSVLVPALQSMSEFNNSFAERPLVIRQKRYRFYRPIAYAMGLVLTDAVWKIVAISYNIPQYFLIGFQRSADKFFIWFLIVYIEHLALSMIFRAIAVSSPTMGRAVLPVGLMFNLFVLYTGLYVPGPQMQVWLFWLRYLNPLYYGYESAMVNEFGNLNYTCSDGDIVPSGPGYSSVAQQVCAVKGAMPGQALVSGAAYVHDQFGFDTSHLWRNIGINAVFFAFFAVCTGIGMEYYKLPAGRLATIFYKAEPNAVAKASTTSSAETSDGEKGTTGEDTPPVNARQLLSSPASHPVQSVSSHNGRTLAWENLTLELKVGDELKRLLDGLSGFVQPGQLTALMGASGAGKTTLLNTLAGRLEFGSLTGELYLDGGPLPKSFRRYMGYVQQQDVHLPTQTVREALQVTAHLRRPLNVPDEEKYAHVEAVIRTLEMEDIADALIGVPGAGLNLEQRKRVTIGVELSARPDILLLDEPTSGLDGQSALTIGRLLRKLAESGQTVLCTIHQPAAELIELFDHLILLVPGGRLAYDGPLGEKCSNALDYFIGSNPARPFHGHENPAEYLVEVVRDGVQSKPDTQVSTYADLWNTSNERIARDTQRELIISNNTHATANISVERTYAVPLHVQFMVTMRRTWLYYWRDPDYFASKLWMNVGNALLNGLTYLNSGNAQAGAYNRVFSAFMSLIVGPPLGLQIQPRFVALRDIFTLREQASLTYSWLCFVGPAILVELPYAFITSLVYWLLWYFPVHYFTQPVRAGYSFLMYELFSIFAHSLAQLCAALMPSLNSTFMANGFFFMFVNTFAGTLSPRPVTPTGWRWYYNVSPLYYLSEGTTSDMLYGLDMTCQPDEISIFQPPNGSSCQQYADEFLRSATGFLLNSDASSDCQYCRYKNGQSYYLQWGYDFAHRYRNIGIFIGFIAFNYTAVILLTYLTKVRKRKRS

SEQ ID NO: 38006 - DNA, 4817 bp, Muscodor strobelii
  misc_feature: SGI EST ID NO. CUFF.91068.0
  misc_feature: Variant of the nucleotide sequence at SEQ ID NO 38004
ttctcgtaaagttttactcactctagaagttcctgaagtcggtatactccatttctcttgagtaaaatcatattagtgcggtaattgcgaggttggttatcatcgacgggtcctctgcatttcgtctgttttgggatattgagcctccaggagagctatgtactcgtggtacgtacttgttgctacctattatgatggcagctcaacgggttccatccgcttgggtcccatccctgccatcttgagcttctaaaccctgtattccatgcaagttgtggcatgccacttctggttccggtagccattgctctgcctagttaagcttccgggctctccagacccctgtattgcctattttggttgctggagactccgccttgacactcaactgttcactaacgagatctgagctagaccctgcattcgatggaggacatttttatgttttcatagaccgagatagcctttatattgtttctggccagtccttgtagcctttgaacatgctttctttcagtattcgagacaacaatcggtcatggatggccggcgagatgggttcggcgaccttgtccgacagtttttggctactcatgactcggcatcgagcagccgttctgcaatttcgttcgacaatctatcggtgatcggagcaggtaaaggtattcaagccgcaccaactgtatcgagtaccgtcaaagcatggactcaattcctaaatccacgaacgtatactgaacctcagccctcgcgaacccttctccatggcttctccggaaccctccgtgacagcgaaatgctgttggttattggaaaaccaggaagcggatgtacaacatttttgaaagcactatcaaacatgtacgaagagtacaagatggttaacgggcgagtcacatatggtggcagggcggccgacactcacgaccaggatcgggttcggcttacattttgtgctgaagaggacagtcatctgccaacactcactgttgcacaaacactacgctttgcagtgcgagcgacatggccttcagaaacgtccaaagcggtggtcaaccgcgcggtggaattgttggcggcctgcgtcggtctgtctaatgtgctaaagacaagagtcgggaacccagcagtgcatggtgttagcggcggcgagcggcggcgagtttctcttgctgaagctatcgcgacacttccagacgttctatgtttagataatccgacgcatgggctggacgcagccaccgcactcgatttcatccaaatgctccgagacttcacgaaccaacatggatgttcaacagctgtcagtgtctatcaaggcagcgactccatggtcccattattcgacaaagtccttgtcatcaacggcggccgtcaaattttctacggaaaagcgactgaagcgaagacttatttcgagagacttggatttcattgttccgagcggacaaccatcaccgatttcctaaactcaatgacggcggaacctgagttgcgacatgtgcatgacggctggaaatatcgcgtccctatgaatgctgttcagttcgaggaagcatttcataagagtgaatactacaagatgctattggacgatatcgccgatgagaagcgacaagctttatcagtacccattggctcgagacgaaagatctacgaactgccgctgtaccgtcagatattcgaatgttgtgtgcgtcaattcagaattcttgtgggagacactaatacttgggtcactgagctggttactatcgtgattcaaagcttagttctcggcacactttttagagatcagccccgttcaacgcagtcgttttttgtactcggatccgccttattcaactctgtcctcgtcccggccttgcagtccatgagcgaattcaacaatagcttcgccgaacgtccgcttgtcatcagacagaaacgataccgcttctataggcctattgcttatgcaatgggtcttgtgctgactgacgctgtatggaagatcgtggcgattagctataatatacctcaatacttcctcatcggctttcaacgaagtgccgacaagttcttcatctggttcctgatcgtatacattgagcacctagctctgtcgatgatctttcgcgccatagctgtctcttcaccgacaatgggtcgcgcagtgcttcccgtcgggctcatgttcaatctctttgtcctgtacacggggctgtacgtgccagggccgcaaatgcaagtgtggctcttctggctccgctatctcaaccctctttactatgggtatgagtctgcaatggtgaatgaatttggcaatcttaattacacctgtagcgatggcgatattgtgcctagtggtccaggatattcctcggttgcacaacaagtatgtgccgtgaaaggcgcaatgccaggtcaggcattagtatctggagcggcctacgtccacgatcagtttggatttgacacatcgcatctctggagaaatatcggtattaatgccgtattcttcgccttctttgctgtttgcaccgggattggtatggaatactataagcttcctgcaggtcgtctagctacgatattctacaaggcagaacccaatgcagttgcgaaagcatcaacaacttcttctgctgagacatccgacggcgaaaaaggaactaccggagaggatactcctccagtgaatgcccgacaacttttaagctcgccggcatctcatcccgtacagtcggtgtcaagtcacaatggccgtacgttagcctgggagaatctcactcttgaattgaaagttggcgacgagcttaagcgactcctagatggtcttagtggatttgtacagcctggccagttaacagctttgatgggcgcatccggcgctggtaagacaactttattgaatactctggctggccgtctagagtttgggtcattgaccggagagctgtacctggatggtggcccgctaccgaagtcctttcgtcgttatatgggctatgtccaacaacaggatgtacatctgcctacgcagactgttcgcgaggcgctgcaagttacagcgcatctacggcgacctctcaacgtccccgacgaagagaaatacgcgcatgttgaggcagtgatccgcacactagagatggaggatattgctgatgcgctcattggtgtccctggagctggattgaatttggaacaaagaaagagagttacaattggcgttgagctttctgctaggccagatattctactcctcgatgaacccacatctggcctggatggtcaatcagcgctgactattggccgcctcttgcgcaaactggccgagtcgggacaaaccgttctctgcacaattcatcaacctgctgcagagctgatcgagctatttgaccaccttattttgcttgttccgggaggccgtcttgcttatgacggcccgctaggcgagaagtgttcgaacgccttggattattttatcggctccaaccctgctcgccctttccatggccatgaaaatccggcagagtatctggttgaagtagtaagagacggagtccaatcgaagcctgacacccaagtttctacgtatgccgatctctggaataccagcaatgagcgcatcgctcgtgatacacagcgagaattgataattagcaacaacactcacgcaactgccaatatcagtgtggagcgcacttatgcagtgccccttcatgtgcagtttatggtcaccatgcgacgaacttggttatactattggagagacccagattatttcgcatcgaagctctggatgaacgtcggcaatgcattgttgaatggcttgacttatctcaattccggaaatgctcaagccggtgcatacaatcgtgttttctcggctttcatgtcgttgatcgtcggtccaccattaggcttacagattcagccgcgatttgttgctctccgtgatattttcacactccgggaacaagccagcctcacgtatagctggctttgctttgtgggaccggccattctcgttgagctgccatacgcatttattactagcctggtgtattggctgctttggtacttccctgttcactacttcactcagccagtacgtgcgggttacagctttctgatgtatgagctcttctccatcttcgcacatagtctagctcagctctgtgcggcacttatgccgagcctgaactccactttcatggctaacgggttcttcttcatgtttgtcaacacatttgctggcacgctttcgcctcggccagtcacaccgacgggatggcgttggtactataatgtctcgcccctctattacttgagcgaaggcacgacttccgacatgctatatggccttgacatgacatgtcagcccgacgagatctccatctttcaaccacccaatggatcatcctgccaacaatacgccgatgagttcttgcgttcggccactgggttcctgctcaactctgacgcgtcttccgattgccaatactgtcggtataagaacggccagtcctactatctgcaatggggctacgacttcgcacatcgatatagaaacattggtatcttcatcgggttcattgcatttaactacactgcagtcatcttgttgacctatttgactaaggttaggaaaagaaagcgttcatagttgggagacttggactctggcattacatgaagacgccactagacgtagggaaacactattatgaaatctgttgatacgattgtacgaatattctaaaaacgttcataatcacaccgaagtactcaaaatcctttagacatagataataatcaaacatctttcggtg

SEQ ID NO: 38007 - DNA, 639 bp, Muscodor strobelii
  misc_feature: SGI cDNA ID NO. 573200
  misc_feature: Elevated expression when VOC is produced
  misc_feature: Encodes the peptide sequence at SEQ ID NO 38008
atgaggttttttctcgttcccgtctttgccatgctaggggcattatacccttacatcgttggcgccatcccgatcaacgagttactagaggaccccgagaagcttgagtctatcacacggcgatacacaagtcctacacagatctggccagcaaatgggacgagaacgcctatgaacaccttcctactgatcctcaatactcagccaaacccggacccagatctgattaaagagaatgtcgcaatagacgccacatatgtctcgcttacggaggataatcctcagctgcaccagattctgccttgggcaggcacacgatacaaggttggaccgcaagcatttcttgacacctttactcgtgttggtctatggtggactcgtgggccattcaatgtcgagcgtatcttcgaagacggccacggaaacttgacggcttggggaaacttcgagattacatctaatactatgggcaaaagtatctcgtcgccatggtcatgccgggctgagatccaatcagatggactgatacactattttcaatacatggaagacacttttgctacaacatcaacgttttgggcggaggggtctaagcaattctgtgctaaccctgtggagggtggctgcgtctggttctga

SEQ ID NO: 38008 - protein, 212 aa, Muscodor strobelii
  misc_feature: SGI Peptide ID NO. 573200
  misc_feature (1)..(210): NCBI GI: 121710944 Blast Desc: ACLA_093610 [Aspergillus clavatus NRRL 1] gi|119401238|gb|EAW11662.1| ACLA_093610 [Aspergillus clavatus NRRL 1]
  misc_feature (63)..(197): NCBI GI: 146308223 Blast Desc: Pmen_3203 [Pseudomonas mendocina ymp] gi|145576424|gb|ABP85956.1| Pmen_3203 [Pseudomonas mendocina ymp]
  misc_feature: Useful for introducing or modulating the production of volatile compounds
MRFFLVPVFAMLGALYPYIVGAIPINELLEDPEKLESITRRYTSPTQIWPANGTRTPMNTFLLILNTQPNPDPDLIKENVAIDATYVSLTEDNPQLHQILPWAGTRYKVGPQAFLDTFTRVGLWWTRGPFNVERIFEDGHGNLTAWGNFEITSNTMGKSISSPWSCRAEIQSDGLIHYFQYMEDTFATTSTFWAEGSKQFCANPVEGGCVWF

SEQ ID NO: 38009 - DNA, 1311 bp, Muscodor strobelii
  misc_feature: SGI EST ID NO. CUFF.91058.0
  misc_feature: Variant of the nucleotide sequence at SEQ ID NO 38007
ctttagacaatctcacaccgtagtgtcccaccgagataggaacagccattcttatcatcatgaggttttttctcgttcccgtctttgccatgctaggggcattatacccttacatcgttggcgccatcccgatcaacgagttactagaggaccccgagaagcttgagtctatcacacggcgatacacaagtcctacacagatctggccagcaaatgggacgagaacgcctatgaacaccttcctactgatcctcaatactcagccaaacccggacccagatctgattaaagagaatgtcgcaatagacgccacatatgtctcgcttacggaggataatcctcagctgcaccagattctgccttgggcaggcacacgatacaaggttggaccgcaagcatttcttgacacctttactcgtgttggtctatggtggactcgtgggccattcaatgtcgagcgtatcttcgaagacggccacggaaacttgacggcttggggaaacttcgagattacatctaatactatgggcaaaagtatctcgtcgccatggtcatgccgggctgagatccaatcagatggactgatacactattttcaatacatggaagacacttttgctacaacatcaacgttttgggcggaggggtctaagcaattctgtgctaaccctgtggagggtggctgcgtctggttctgagtaggttcagatgattgctatctaatcttagttcgtttggagttcgatccctaatcagtaatcactggcatagacagggaaatctggcaaagagtatgatcgcttgactggcggaactagtagtcgatagctatagtctagctcgcgcttcaatggagcaaagacgctaccattgctgaatatgacttctaccaaacacaagatacgatatcgatcacgacttgaccttcgaaataccggatactgtaccgaccgatattgatagcctcgtgtagaagatgaggggcttgcactagtaatgatgaatcccaacacctgttttggatgttgggtggacatatgatcggcatgttcatattgaacaatattgtcatgaaaacccggtcataaaatacaattccacacaacaacgtgagcttgccatggaggattacatgcagatgcttccgaaactcttctcacagcatccaacacgggccacgggctacagcgattgattaccaccatcgttcaatgctcgtgatgttcatctcgttactcgcgtagtatccaactaacattactcgtcacgtaactctagcaactatcaaattacatcattatcattctggaa

SEQ ID NO: 38010 - DNA, 1653 bp, Muscodor strobelii
  misc_feature: SGI cDNA ID NO. 573201
  misc_feature: Reduced expression when VOC is produced
  misc_feature: Encodes the peptide sequence at SEQ ID NO 38011
atgactgcagagaaggaggagcaaccggtccctcggcccgctgatggaagcgacaacgataccaacgacaccaataacaacgccaacaccaacaatccgaagccagaaagaacgattaaagggtggcgctgggcccttgtctgctttgcggtattctccgccaattttctctacgggttggacaacaccattgtcgccgctattcaggctgccgttgtagatgatttcaatgaggtcaacaaactcggttggcttggtgtcggtttccctttaggttccatcgccattattctgccacttggcaaggcttatggcgctttcgatgtgaaatggctctacagtggctctttgactatgttcgcggcgggcagcgccctatgcggtgcggcgcccaacatgaacgctctcatcgtgggcagagtctgggctggtgctggaggagctggaagttatcttggtaacttaaacatgattcaacacttgaccactccgactgaaagaagtgtatatatgtcattcgtcatcctgtgctatggtacaggtgccatcttggggccagtgattggtggcgctttggccgatagttcgtcatctggttggcgctggagtttctatttgaatcttttcatatttgctcttgcggctcctgtctatctttttatgctgccatctatccagacgcagccggaccttcgcttgatgacgaaacttcgatctgtagactggataggaaccattttgagcttcggtttcttttcatcctttgcactcatcttcactttcggcggtgccatctggtcttggagcgatggacgcatgatcgcgctctatgttgtccttgccgtgacaacggggattttctctgttcagcaatccatgacgcttttcaccacgaagaaagaccgcatattcccaactcatttcctgcgaagtcgtaccatgatgctgttgttcattacaacagcttctcttggaggtgcctttttcatcgtcgtgtactatctccctcttttcttccaattcgttcagaatgacaatggtatacagtcggctgtacgactccttccatttatcgtcctatacatcatcggagtcattgctaacggcattctaatgttgcggcttgggtactacatgccgtggtacctggtgagcggtgtcttcacaacgataggcggggcgctcctctacaccagctccacgtccatttcgaatagcaatatctatggatactcaatccttgttgccattggaatggtcgcctttcaagccagttattcgattgctccaatcaaagtcgccgaggacgaaatagcggaagcaattctgttcatcaatttcgcgcagaatggcgcggccctcattgctttggccgcctcaaacgccatctttcagaatgttgccttcgataggctattgcccatcttgacccctgctggctattcgacagaagacattactgctgcgctcgctggtgccaggagtaccgtgctggaaacagcgccaccggatgtaaaggcagccgccctggatgttctggttcaagtcatcgactatatttatacactagtaatcgctgctggtggtattatcctgatatgcgctctcttcatgaaacgcgagaaactgcatatgtcattagtcgcgggctga

SEQ ID NO: 38011 - protein, 550 aa, Muscodor strobelii
  misc_feature: SGI Peptide ID NO. 573201
  misc_feature (51)..(457): Pfam Id: PF07690 Pfam Desc: Major Facilitator Superfamily
  misc_feature (4)..(542): NCBI GI: 121710938 Blast Desc: MFS transporter, [Aspergillus clavatus NRRL 1] gi|119401235|gb|EAW11659.1| MFS transporter, [Aspergillus clavatus NRRL 1]
  misc_feature (17)..(542): NCBI GI: 212535584 Blast Desc: conserved [Penicillium marneffei ATCC 18224] gi|210070347|gb|EEA24437.1| conserved [Penicillium marneffei ATCC 18224]
  misc_feature (4)..(543): NCBI GI: 256726789 Blast Desc: NECHADRAFT_34124 [Nectria haematococca mpVI 77-13-4]
  misc_feature (4)..(543): NCBI GI: 238845978 Blast Desc: conserved [Microsporum canis CBS 113480]
  misc_feature (6)..(549): NCBI GI: 156058470 Blast Desc: SS1G_03247 [Sclerotinia sclerotiorum 1980] gi|154701034|gb|EDO00773.1| SS1G_03247 [Sclerotinia sclerotiorum 1980]
  misc_feature (10)..(550): NCBI GI: 212531635 Blast Desc: conserved [Penicillium marneffei ATCC 18224] gi|210071338|gb|EEA25427.1| conserved [Penicillium marneffei ATCC 18224]
  misc_feature (4)..(549): NCBI GI: 242800469 Blast Desc: efflux pump antibiotic resistance protein, [Talaromyces stipitatus ATCC 10500] gi|218716940|gb|EED16361.1| efflux pump antibiotic resistance protein, [Talaromyces ATCC
  misc_feature (15)..(542): NCBI GI: 242820263 Blast Desc: conserved [Talaromyces stipitatus ATCC 10500] gi|218713944|gb|EED13368.1| conserved [Talaromyces stipitatus ATCC 10500]
  misc_feature (14)..(549): NCBI GI: 212544362 Blast Desc: conserved [Penicillium marneffei ATCC 18224] gi|210065304|gb|EEA19398.1| conserved [Penicillium marneffei ATCC 18224]
  misc_feature (7)..(549): NCBI GI: 238844068 Blast Desc: conserved [Microsporum canis CBS 113480]
  misc_feature: Useful for introducing or modulating the production of volatile compounds
MTAEKEEQPVPRPADGSDNDTNDTNNNANTNNPKPERTIKGWRWALVCFAVFSANFLYGLDNTIVAAIQAAVVDDFNEVNKLGWLGVGFPLGSIAIILPLGKAYGAFDVKWLYSGSLTMFAAGSALCGAAPNMNALIVGRVWAGAGGAGSYLGNLNMIQHLTTPTERSVYMSFVILCYGTGAILGPVIGGALADSSSSGWRWSFYLNLFIFALAAPVYLFMLPSIQTQPDLRLMTKLRSVDWIGTILSFGFFSSFALIFTFGGAIWSWSDGRMIALYVVLAVTTGIFSVQQSMTLFTTKKDRIFPTHFLRSRTMMLLFITTASLGGAFFIVVYYLPLFFQFVQNDNGIQSAVRLLPFIVLYIIGVIANGILMLRLGYYMPWYLVSGVFTTIGGALLYTSSTSISNSNIYGYSILVAIGMVAFQASYSIAPIKVAEDEIAEAILFINFAQNGAALIALAASNAIFQNVAFDRLLPILTPAGYSTEDITAALAGARSTVLETAPPDVKAAALDVLVQVIDYIYTLVIAAGGIILICALFMKREKLHMSLVAG

SEQ ID NO: 38012 - DNA, 2106 bp, Muscodor strobelii
  misc_feature: SGI EST ID NO. CUFF.91562.1
  misc_feature: Variant of the nucleotide sequence at SEQ ID NO 38010
ctgacgtggtctgcgtatggtacgtacctacctcaatgaaaaacgtccaaacccctgctctcgagctgagagatgcattgtcgcttgtagatttgtggtgttagtccaagtgttgacatctacccgtcgaagacaaattcattagcaagctgtaaatgctcggcctcgtccaccatgactgcagagaaggaggagcaaccggtccctcggcccgctgatggaagcgacaacgataccaacgacaccaataacaacgccaacaccaacaatccgaagccagaaagaacgattaaagggtggcgctgggcccttgtctgctttgcggtattctccgccaattttctctacgggttggacaacaccattgtcgccgctattcaggctgccgttgtagatgatttcaatgaggtcaacaaactcggttggcttggtgtcggtttccctttaggttccatcgccattattctgccacttggcaaggcttatggcgctttcgatgtgaaatggctctacagtggctctttgactatgttcgcggcgggcagcgccctatgcggtgcggcgcccaacatgaacgctctcatcgtgggcagagtctgggctggtgctggaggagctggaagttatcttggtaacttaaacatgattcaacacttgaccactccgactgaaagaagtgtatatatgtcattcgtcatcctgtgctatggtacaggtgccatcttggggccagtgattggtggcgctttggccgatagttcgtcatctggttggcgctggagtttctatttgaatcttttcatatttgctcttgcggctcctgtctatctttttatgctgccatctatccagacgcagccggaccttcgcttgatgacgaaacttcgatctgtagactggataggaaccattttgagcttcggtttcttttcatcctttgcactcatcttcactttcggcggtgccatctggtcttggagcgatggacgcatgatcgcgctctatgttgtccttgccgtgacaacggggattttctctgttcagcaatccatgacgcttttcaccacgaagaaagaccgcatattcccaactcatttcctgcgaagtcgtaccatgatgctgttgttcattacaacagcttctcttggaggtgcctttttcatcgtcgtgtactatctccctcttttcttccaattcgttcagaatgacaatggtatacagtcggctgtacgactccttccatttatcgtcctatacatcatcggagtcattgctaacggcattctaatgttgcggcttgggtactacatgccgtggtacctggtgagcggtgtcttcacaacgataggcggggcgctcctctacaccagctccacgtccatttcgaatagcaatatctatggatactcaatccttgttgccattggaatggtcgcctttcaagccagttattcgattgctccaatcaaagtcgccgaggacgaaatagcggaagcaattctgttcatcaatttcgcgcagaatggcgcggccctcattgctttggccgcctcaaacgccatctttcagaatgttgccttcgataggctattgcccatcttgacccctgctggctattcgacagaagacattactgctgcgctcgctggtgccaggagtaccgtgctggaaacagcgccaccggatgtaaaggcagccgccctggatgttctggttcaagtcatcgactatatttatacactagtaatcgctgctggtggtattatcctgatatgcgctctcttcatgaaacgcgagaaactgcatatgtcattagtcgcgggctgatcgtccctaatgttacaatactgctacacctgcaaatgtagctcttgagagagcaagtagaggggcttagctcctcgtgtacttttctttttcggtccgtcatgttgtctctgcaaccgcctagattggaatgacccgccttctgatcgcgatcggtcaggaccactgtaattctaagggatagactgctatagactgaaaactcgctttggcttacaaaattcttttaattcgactataaagactccaaatgccattatttaggaatctagagcaatg

SEQ ID NO: 38013 - DNA, 1035 bp, Muscodor strobelii
  misc_feature: SGI cDNA ID NO. 573202
  misc_feature: Encodes the peptide sequence at SEQ ID NO 38014
atgtcgataggtgataaaactactgctattcccaaaggttccaccgtgcttattactggtgccaatggcttcatcgcatctaacatcgccgaccaattcttgaaactaggcttcaaggtgcgaggtgcgacgcgcaatccacagaagaaccaatggataagcaagctttttgatcagaaatatggccccggggtcttcgagctggtatccgtgcccgacatggaagccaacggcgcctacgacgaagcagtcaaaggtgtctcagccattgtgcatacagcaacaaactacaccttgaaccctaatcctcatgaggtggtccctggcactgttgctgggacagtgcatgcgcttgctgctgcggcacaagagactagcgtgaagcgctttgtcttgacgtcgtcttccgctgcagcgatcattcctaagcctaatgatccagtcacggtgacgacggacacatggaatgaggagaatatccagtatgcttatcgtgatcctccatatgaggaagagcgcggttatccagtctatgctgctgcgaagacacttgcagagaaggaggcatggaagttcatgcaggagaacaagcctggctttgttctcaatactgtcctgccaaatctcaacatgggcgcatctctcgacttcgccaatcagggtcatccttcgacgtcgggaatgattgttgaattgttcaaaggcaattctaagccgctcgcagatttgccagcgcaatactatgtcgatgtacaagacaatgcgctgttacacgttgcggcagctgtgcttccggacgtggtatcagagcgtgtctttgcgttcgcagagccattcaatggggatagcatattggcagctttgcgcaagctgtatcccgatcgtacattccctgagaactttcaatcggataacgatttgacagatattgtacctcggactcgtgcattagaactcttgaaagccatggggaaaagtgaaggatggaccagcctagaagagacggtcagacggaacacggaggatttgatctag

SEQ ID NO: 38014 - protein, 344 aa, Muscodor strobelii
  misc_feature: SGI Peptide ID NO. 573202
  misc_feature (16)..(276): Pfam Id: PF01370 Pfam Desc: NAD dependent epimerase/dehydratase family
  misc_feature (18)..(320): Pfam Id: PF07993 Pfam Desc: Male sterility protein
  misc_feature (16)..(50): Pfam Id: PF01370 Pfam Desc: NAD dependent epimerase/dehydratase family
  misc_feature (1)..(344): NCBI GI: 261358231 Blast Desc: aldehyde reductase [Verticillium albo-atrum VaMs.102]
  misc_feature (9)..(343): NCBI GI: 256722383 Blast Desc: NECHADRAFT_44319 [Nectria haematococca mpVI 77-13-4]
  misc_feature (10)..(343): NCBI GI: 256727901 Blast Desc: NECHADRAFT_46394 [Nectria haematococca mpVI 77-13-4]
  misc_feature (9)..(343): NCBI GI: 256724478 Blast Desc: NECHADRAFT_54734 [Nectria haematococca mpVI 77-13-4]
  misc_feature (9)..(343): NCBI GI: 256724300 Blast Desc: NECHADRAFT_53386 [Nectria haematococca mpVI 77-13-4]
  misc_feature (10)..(344): NCBI GI: 169765928 Blast Desc: [Aspergillus oryzae RIB40] gi|83765290|dbj|BAE55433.1| protein product [Aspergillus oryzae]
  misc_feature (9)..(343): NCBI GI: 46139405 Blast Desc: FG11217.1 [Gibberella zeae PH-1]
  misc_feature (10)..(344): NCBI GI: 238482541 Blast Desc: aldehyde reductase II [Aspergillus flavus NRRL3357] gi|220700559|gb|EED56897.1| aldehyde reductase II [Aspergillus flavus NRRL3357]
  misc_feature (1)..(344): NCBI GI: 261194276 Blast Desc: aldehyde reductase II [Ajellomyces dermatitidis SLH14081] gi|239588557|gb|EEQ71200.1| aldehyde reductase II [Ajellomyces dermatitidis SLH14081]
  misc_feature (1)..(344): NCBI GI: 226278768 Blast Desc: aldehyde reductase [Paracoccidioides brasiliensis Pb01]
  misc_feature (10)..(337): SWISSPROT Homolog: EC 1.1.1.2 Alcohol dehydrogenase (NADP(+))
MSIGDKTTAIPKGSTVLITGANGFIASNIADQFLKLGFKVRGATRNPQKNQWISKLFDQKYGPGVFELVSVPDMEANGAYDEAVKGVSAIVHTATNYTLNPNPHEVVPGTVAGTVHALAAAAQETSVKRFVLTSSSAAAIIPKPNDPVTVTTDTWNEENIQYAYRDPPYEEERGYPVYAAAKTLAEKEAWKFMQENKPGFVLNTVLPNLNMGASLDFANQGHPSTSGMIVELFKGNSKPLADLPAQYYVDVQDNALLHVAAAVLPDVVSERVFAFAEPFNGDSILAALRKLYPDRTFPENFQSDNDLTDIVPRTRALELLKAMGKSEGWTSLEETVRRNTEDLI

SEQ ID NO: 38015 - DNA, 1962 bp, Muscodor strobelii
  misc_feature: SGI EST ID NO. CUFF.91107.0
  misc_feature: Variant of the nucleotide sequence at SEQ ID NO 38013
gaatgatcggatctagaaggagtaatcagtgtaatactggtgcgcatactggtgggcggagtcgaattaggcaagagtcctgcatggtacaaggagaaatcggaagcattacagtaggtacatgcaccgaaggtgcccatctgtatgactaaggtatgcgttcaattccctcggcttaacaatttagtcatactattcgacatatacttatctcaggcatcttgataattgtcgtgtcgcaaacaagtcaattctatttctgtatcaagtcatctggctgaatccctctcatcatgtcgataggtgataaaactactgctattcccaaaggttccaccgtgcttattactggtgccaatggcttcatcgcatctaacatcgccgaccaattcttgaaactaggcttcaaggtgcgaggtgcgacgcgcaatccacagaagaaccaatggataagcaagctttttgatcagaaatatggccccggggtcttcgagctggtatccgtgcccgacatggaagccaacggcgcctacgacgaagcagtcaaaggtatggcattctctacggaaagcgaagctggcgcactaacaagccaaaaaggtgtctcagccattgtgcatacagcaacaaactacaccttgaaccctaatcctcatgaggtggtccctggcactgttgctgggacagtgcatgcgcttgctgctgcggcacaagagactagcgtgaagcgctttgtcttgacgtcgtcttccgctgcagcgatcattcctaagcctaatgatccagtcacggtgacgacggacacatggaatgaggagaatatccagtatgcttatcgtgatcctccatatgaggaagagcgcggttatccagtctatgctgctgcgaagacacttgcagagaaggaggcatggaagttcatgcaggagaacaagcctggctttgttctcaatactgtcctgccaaatctcaacatgggcgcatctctcgacttcgccaatcagggtcatccttcgacgtcgggaatgattgttgaattgttcaaaggcaattctaagccgctcgcagatttgccagcgcaatactatgtcgatgtacaagacaatgcgctgttacacgttgcggcagctgtgcttccggacgtggtatcagagcgtgtctttgcgttcgcagagccattcaatggggatagcatattggcagctttgcgcaagctgtatcccgatcgtacattccctgagaactttcaatcggataacgatttgacagatattgtacctcggactcgtgcattagaactcttgaaagccatggggaaaagtgaaggatggaccagcctagaagagacggtcagacggaacacggaggatttgatctagattaactttgtaacagtagacagcgtcaagtcaattgtagataagcattgggctgcaattctcttgatatcagatgtccgacatcttaggtaatccaagcgagcttaattagacctcctgaccatacatatcttctatactcgagcttaacttgcatatctcttgataatcaacttggtaacatggtgtaactcagaagataaggccatcacaagagaatatcgtctgatacagctggtcatcataacagcagaaaaaggcatgttttgaatcttgttttgaggttcttcaaagacggtccgggcactggggaagagtacatgtgctccttcgtcaacttcgatcttggaaagtttggcctgcgggctggggtgtagaaagtgactaatgtcggattcgtgacgatggaatctctccaggggaacgaaatcattgcctattttcggaagggcaataatcaagtgttcactttggaatctccgcggtggaacagaaatggacggatttgacatccggcggaattgtaccgtgcaggtgcatatgcgtcgacatagaatatgcaacatccctaccgtgggtcaag

SEQ ID NO: 38016 - DNA, 1719 bp, Muscodor strobelii
  misc_feature: SGI cDNA ID NO. 573203
  misc_feature: Encodes the peptide sequence at SEQ ID NO 38017
atgttatctaaaatcagtctcaggggtgccatcttgacagccctaagcttacaatcctcattggcacacccaacaagtagcggaaagggtaaggcgtgcaagtacattcctggagattgggggtggccaacgacgcatgattgggacgctttcaatgctactctagggggaaggctcttgactcctcagcagctgggtagggtttgccacaaccctgattacgacgaagaagcatgcaactatgtgcgaaaacaatggaatcagccatccctacatgatgtatcctcatcctcggtgatggcggctgcagtagctcacgagagttgcgacccgttcacttcacgtgagctaccatgtaaccctggaaatagcgtcacatacgtggtgaatgctacgggtgtttcagatcttacaagagcgattgcctttgcgcacgagcgaaatatccgattggtcattcgcaacactggacatgactaccttggaaagtcgactggacaatgggcactgtccgtttggacccatcacatgaaacaaacggaatatctgcagtatgcgagctcttattacaatggctctgctattcggcttggtgctggtatccaagttgaggaggcatacaatgtgtcacatgcgcatggttctctcgtcgtaggaggtgattgcgatacagtgggcgttgctggtggctacttgcaaggcggcggtcattcagcgatgagctcgatgtatggccttgcagcggattcggttctggaatgggaggttattgacggccggggacggcatcttcgagcaaccccgcacatagagcgagaattatactgggcgctttccggaggaggcggaggcacgtatggtgttgttgtttcagtcgtcgtcaagatgtaccctgacatgccagtgaccggtgtccagctaaagtttgatcttgatatccaacgacctaacgctttctacaaggcggtcagcacgtatcatgagattgtgccgaccatcactgccgcaaagggaatgggcatagcggaggtcagcaattccacatttttgctgaccccattaactttaccaaacgcgtcgcgatacgaagcagaggctctactagccccgcttctatcacaactaaataggaccggcgtggcttacgaactgaatatcacagagagctcgagttggttaaaccattggcgaacgctcatcaagccaaatccaacacagctggtgcagaatgcgcaatatggcggttggatgataccacgttcagtcatggacagtcgagcagcggccgtcgaagaggcgattcgggatatcacggacgcaggatgtgtgttcgtgggtctagccttaaacgtctcattaccccaaggagaagtaataccaaatgcggtactgcccgcctggcgggaggctgcgataaacgttattctttccacgtcatggccagcgggtgccagtcttagtgcgatggagcttctggcagacaccatgacacagacgtgcgtgcctgcgctggcaaagctttcgccaaactctggtgcatatttgaacgaggcggacccaaaccagccaggttggcaaagagcattctatggagacaacttcgttagtctattggccatcaagaagaagtatgatccgcatcatcttttctatgcgcccttggcggttggcagtgaccattataagattgatgacgatgggcgactatgcgaagcgtga

SEQ ID NO: 38017 - protein, 572 aa, Muscodor strobelii
  misc_feature: SGI Peptide ID NO. 573203
  misc_feature (513)..(557): Pfam Id: PF08031 Pfam Desc: Berberine and berberine like
  misc_feature (125)..(267): Pfam Id: PF01565 Pfam Desc: FAD binding domain
  misc_feature (4)..(571): NCBI GI: 121710962 Blast Desc: FAD binding domain protein [Aspergillus clavatus NRRL 1] gi|119401247|gb|EAW11671.1| FAD binding domain protein [Aspergillus clavatus NRRL 1]
  misc_feature (26)..(572): NCBI GI: 146141330 Blast Desc: isoamyl alcohol oxidase [Penicillium griseofulvum]
  misc_feature (1)..(571): NCBI GI: 115386510 Blast Desc: ATEG_07110 [Aspergillus terreus NIH2624] gi|114190794|gb|EAU32494.1| ATEG_07110 [Aspergillus terreus NIH2624]
  misc_feature (33)..(571): NCBI GI: 145250439 Blast Desc: An15g01940 [Aspergillus niger] gi|134082253|emb|CAK42297.1| protein product [Aspergillus niger]
  misc_feature (30)..(572): NCBI GI: 85102097 Blast Desc: NCU04108 [Neurospora crassa OR74A] gi|21622328|emb|CAD36969.1| isoamyl alcohol oxidase [Neurospora crassa] gi|28922807|gb|EAA32028.1| NCU04108 [Neurospora crassa
  misc_feature (33)..(571): NCBI GI: 121703467 Blast Desc: FAD binding domain protein [Aspergillus clavatus NRRL 1] gi|119398141|gb|EAW08572.1| FAD binding domain protein [Aspergillus clavatus NRRL 1]
  misc_feature (33)..(571): NCBI GI: 242765564 Blast Desc: FAD/FMN-containing isoamyl alcohol oxidase MreA [Talaromyces stipitatus ATCC 10500] gi|218724196|gb|EED23613.1| FAD/FMN-containing isoamyl alcohol oxidase MreA [Talaromyces ATCC
  misc_feature (21)..(572): NCBI GI: 212540954 Blast Desc: isoamyl alcohol oxidase, [Penicillium marneffei ATCC 18224] gi|210067931|gb|EEA22023.1| isoamyl alcohol oxidase, [Penicillium marneffei ATCC 18224]
  misc_feature (13)..(572): NCBI GI: 259484933 Blast Desc: TPA: FAD/FMN-containing isoamyl alcohol oxidase MreA (AFU_orthologue; AFUA_6G03620) [Aspergillus nidulans FGSC A4]
  misc_feature (13)..(572): NCBI GI: 146322331 Blast Desc: isoamyl alcohol oxidase [Aspergillus fumigatus Af293] gi|129556964|gb|EBA27325.1| isoamyl alcohol oxidase, [Aspergillus fumigatus Af293] gi|159124810|gb|EDP49928.1| conserved fumigatus
MLSKISLRGAILTALSLQSSLAHPTSSGKGKACKYIPGDWGWPTTHDWDAFNATLGGRLLTPQQLGRVCHNPDYDEEACNYVRKQWNQPSLHDVSSSSVMAAAVAHESCDPFTSRELPCNPGNSVTYVVNATGVSDLTRAIAFAHERNIRLVIRNTGHDYLGKSTGQWALSVWTHHMKQTEYLQYASSYYNGSAIRLGAGIQVEEAYNVSHAHGSLVVGGDCDTVGVAGGYLQGGGHSAMSSMYGLAADSVLEWEVIDGRGRHLRATPHIERELYWALSGGGGGTYGVVVSVVVKMYPDMPVTGVQLKFDLDIQRPNAFYKAVSTYHEIVPTITAAKGMGIAEVSNSTFLLTPLTLPNASRYEAEALLAPLLSQLNRTGVAYELNITESSSWLNHWRTLIKPNPTQLVQNAQYGGWMIPRSVMDSRAAAVEEAIRDITDAGCVFVGLALNVSLPQGEVIPNAVLPAWREAAINVILSTSWPAGASLSAMELLADTMTQTCVPALAKLSPNSGAYLNEADPNQPGWQRAFYGDNFVSLLAIKKKYDPHHLFYAPLAVGSDHYKIDDDGRLCEA

SEQ ID NO: 38018 - DNA, 2301 bp, Muscodor strobelii
  misc_feature: SGI EST ID NO. CUFF.91087.1
  misc_feature: Variant of the nucleotide sequence at SEQ ID NO 38016
gctggcttcctattgtctacgactgtattcaaaatgttatctaaaatcagtctcaggggtgccatcttgacagccctaagcttacaatcctcattggcacacccaacaagtagcggaaagggtaaggcgtgcaagtacattcctggagattgggggtggccaacgacgcatgattgggacgctttcaatgctactctagggggaaggctcttgactcctcagcagctgggtagggtttgccacaaccctgattacgacgaagaagcatgcaactatgtgcgaaaacaatggaatcagccatccctacatgatgtatcctcatcctcggtgatggcggctgcagtagctcacgagagttgcgacccgttcacttcacgtgagctaccatgtaaccctggaaatagcgtcacatacgtggtgaatgctacgggtgtttcagatcttacaagagcgattgcctttgcgcacgagcgaaatatccgattggtcattcgcaacactggacatgactaccttggaaagtcgactggacaatgggcactgtccgtttggacccatcacatgaaacaaacggaatatctgcagtatgcgagctcttattacaatggctctgctattcggcttggtgctggtatccaagttgaggaggcatacaatgtgtcacatgcgcatggttctctcgtcgtaggaggtgattgcgatacagtgggcgttgctggtggctacttgcaaggcggcggtcattcagcgatgagctcgatgtatggccttgcagcggattcggttctggaatgggaggttattgacggccggggacggcatcttcgagcaaccccgcacatagagcgagaattatactgggcgctttccggaggaggcggaggcacgtatggtgttgttgtttcagtcgtcgtcaagatgtaccctgacatgccagtgaccggtgtccagctaaagtttgatcttgatatccaacgacctaacgctttctacaaggcggtcagcacgtatcatgagattgtgccgaccatcactgccgcaaagggaatgggcatagcggaggtcagcaattccacatttttgctgaccccattaactttaccaaacgcgtcgcgatacgaagcagaggctctactagccccgcttctatcacaactaaataggaccggcgtggcttacgaactgaatatcacagagagctcgagttggttaaaccattggcgaacgctcatcaagccaaatccaacacagctggtgcagaatgcgcaatatggcggttggatgataccacgttcagtcatggacagtcgagcagcggccgtcgaagaggcgattcgggatatcacggacgcaggatgtgtgttcgtgggtctagccttaaacgtctcattaccccaaggagaagtaataccaaatgcggtactgcccgcctggcgggaggctgcgataaacgttattctttccacgtcatggccagcgggtgccagtcttagtgcgatggagcttctggcagacaccatgacacagacgtgcgtgcctgcgctggcaaagctttcgccaaactctggtgcatatttgaacgaggcggacccaaaccagccaggttggcaaagagcattctatggagacaacttcgttagtctattggccatcaagaagaagtatgatccgcatcatcttttctatgcgcccttggcggttggcagtgaccattataagattgatgacgatgggcgactatgcgaagcgtgaatatgcgatttcttacagtaagaaatggactatttttttgttgttgtcggtggtctgcactctacatgacgacatgatgagtcgtggacctgttcttgcagtggtatggggatcattgagactagacggaaccccgcaaaacggctatatctggagatatagtgcgatggactccccaccagttcgactcctatccataaccagcaacggaggggttgacattaatgataatgatatgttgcatatgtcgtgattagtatcatttatttcaacatggatattgtgttgattagagtgtgataagagaagcacgagcggggcgcagtacaccgccgaaatacgccgtgtctaatgccatcaggataagcttacatctgatgctgcaatggtctggcatgaagcacacgtcgtgagctcatgtatgggacttatccgtgtcgcccagtctgcatgtaatgatttcacagaggtacctctgaatcgtcactgagtcacggggcttcatagaatccttattaactaagtcaagtcttggtctctggatctctg

SEQ ID NO: 38019 - DNA, 2148 bp, Muscodor strobelii
  misc_feature: SGI cDNA ID NO. 573204
  misc_feature: Reduced expression when VOC is produced
  misc_feature: Encodes the peptide sequence at SEQ ID NO 38020
atgtcgtacggcgagcgtgcgactggtgcaagctcatgcgcatcaaatgtgacagccatcggccttgttcgagctgccagcaagcacatcgcggagatcgacacattacgtgcccaagtgcgcgagtttgagagtgaaaaaaagtctaaggctaagagcgagagcccttcgcccgtatctccaactcggagaacgtcactatttgattcttacggaagcggtctttcgtcatcacgtaatggcgtgcgcctcgactctgtgctctacggcgttggatcgcttcctttcttcctgacgcagatgcgacagtatctgaaagcgtctcggccgcagtcgcaaatcgacctcgatgtgtcctcgcacgccggcggtcctcaaaatcttactgaaaatgctcaaatttctctccataaaaactatttgccggcttctcaagaaattcattttctcgacctcttttggcaatcgcactatttcagctatccaatcatcaaagaagcagatttccggaaagatttcaaagctctagttgatagcagtaatccgggcgagcctcggaaagcatcaccacttatcgacatagtcttggctctgtgtattcaactggctaattttcgtcttcgtcaaaaaacgcctcaagaaggcagtagccatcttatacctgatgcaccgtgtcttgccgggctgcagtactaccaacgttgtaatgatgttatcgaggcgacagtcgacaaaccatcattgactacggtacaatgctacgtattcagcatcgtgtacctctgccaagcgggcttggtcaatagggcacaagttgtcataggaaaagcaatcatgacgtgcatcttactaggcctacataacgaagttttagaaacagattttgaacctgaacaggaagtccggaggcgcacttggtggagcatctatatgctcgacgctaagctatcaatggagattggccaaccacccatgattgatcactcaaaacacacatgtcgccttccttctgactctccggagacggcaatgtggcttgcaccacactacccgtacgatgagaactgtcccacgtggttaggcttccagacacagacattgcgtcttgtggatgctgtgagaacagcctggtgcactttttacgcaacatacgacagtcttgtcggtgagaatgcgcacagtcaatttctcgaaactgcaaacacacgggaagagtgcgccacgctactcacagacttgatgaagactcttgacacatggactcgacaagttcccgcaggatattatgtccctcggaaggacgctggccgtcccttccagaccatcgacagcgcgcctatagatcttgatctaagtcgcaacgtccttatacattgcatacggcaacgactccttttagaaatgcagtaccactactattgcatgtgcctatgccgacctttcatttgctttggcacgaggtgcgaatcaccgactccgctgtctgatgaaaaagcagttgcatgtctcaatcacgccatcgcattgacagtcatgatacatcagggaatgacctcttcagaagcgctttttggcatttacgatgtttatagatggcagaaaagcgttctttttacaattcttggatttgcatatacctttcccgttagtcctaaaacgcaaggccttagcaagactatagacatggctatcgcgaaccttactttttttgccgatacgctatcggaagctggtcccgttgtcgcaatgggacgggcgctggccaatgacgtgagcacgatattgtccggactttatcacactagttcctggccaacatcctcagctccttcatcgtcaactgctgctacgtcaatcgcttcaacatccgttcctctcacatcagaagctgcagacgcctcgatggtagtaccgccgatggacttaccagtagacttagaaaagcaatacttcgacatgccaatgacgagcatggcattacctgggaacgatatgctagactttgatctttcaatgccgtcattagacggttcgcaagtagattttggcgtcatggacgaatcgtggatcaacctcaacgcaaacaacagtgcagatgtttatccatgggtcacgatggaagatcttacgacgggacaacagaactga

SEQ ID NO: 38020 - protein, 715 aa, Muscodor strobelii
  misc_feature: SGI Peptide ID NO. 573204
  misc_feature (247)..(339): Pfam Id: PF04082 Pfam Desc: Fungal specific transcription factor domain
  misc_feature (30)..(572): NCBI GI: 238845984 Blast Desc: fungal specific transcription factor domain-containing protein [Microsporum canis CBS 113480]
  misc_feature (23)..(623): NCBI GI: 225558092 Blast Desc: fungal specific transcription factor domain-containing protein [Ajellomyces capsulatus G186AR]
  misc_feature (6)..(635): NCBI GI: 154280669 Blast Desc: conserved [Ajellomyces capsulatus NAm1] gi|150411326|gb|EDN06714.1| conserved [Ajellomyces capsulatus NAm1]
  misc_feature (15)..(636): NCBI GI: 239610229 Blast Desc: fungal specific transcription factor domain-containing protein [Ajellomyces dermatitidis ER-3]
  misc_feature (32)..(591): NCBI GI: 242782473 Blast Desc: conserved [Talaromyces stipitatus ATCC 10500] gi|218720153|gb|EED19572.1| conserved [Talaromyces stipitatus ATCC 10500]
  misc_feature (10)..(636): NCBI GI: 261192695 Blast Desc: fungal specific transcription factor domain-containing protein [Ajellomyces dermatitidis SLH14081] gi|239589236|gb|EEQ71879.1| fungal specific transcription factor
  misc_feature (30)..(599): NCBI GI: 121700352 Blast Desc: fungal specific transcription factor domain protein [Aspergillus clavatus NRRL 1] gi|119396583|gb|EAW07015.1| fungal specific transcription factor domain protein [Aspergillus NRRL 1]
  misc_feature (30)..(589): NCBI GI: 242783604 Blast Desc: conserved [Talaromyces stipitatus ATCC 10500] gi|218720367|gb|EED19786.1| conserved [Talaromyces stipitatus ATCC 10500]
  misc_feature (32)..(587): NCBI GI: 212527060 Blast Desc: conserved [Penicillium marneffei ATCC 18224] gi|210073085|gb|EEA27172.1| conserved [Penicillium marneffei ATCC 18224]
  misc_feature (52)..(598): NCBI GI: 226287663 Blast Desc: fungal specific transcription factor domain-containing protein [Paracoccidioides brasiliensis Pb18]
  misc_feature: Useful for introducing or modulating the production of volatile compounds
MSYGERATGASSCASNVTAIGLVRAASKHIAEIDTLRAQVREFESEKKSKAKSESPSPVSPTRRTSLFDSYGSGLSSSRNGVRLDSVLYGVGSLPFFLTQMRQYLKASRPQSQIDLDVSSHAGGPQNLTENAQISLHKNYLPASQEIHFLDLFWQSHYFSYPIIKEADFRKDFKALVDSSNPGEPRKASPLIDIVLALCIQLANFRLRQKTPQEGSSHLIPDAPCLAGLQYYQRCNDVIEATVDKPSLTTVQCYVFSIVYLCQAGLVNRAQVVIGKAIMTCILLGLHNEVLETDFEPEQEVRRRTWWSIYMLDAKLSMEIGQPPMIDHSKHTCRLPSDSPETAMWLAPHYPYDENCPTWLGFQTQTLRLVDAVRTAWCTFYATYDSLVGENAHSQFLETANTREECATLLTDLMKTLDTWTRQVPAGYYVPRKDAGRPFQTIDSAPIDLDLSRNVLIHCIRQRLLLEMQYHYYCMCLCRPFICFGTRCESPTPLSDEKAVACLNHAIALTVMIHQGMTSSEALFGIYDVYRWQKSVLFTILGFAYTFPVSPKTQGLSKTIDMAIANLTFFADTLSEAGPVVAMGRALANDVSTILSGLYHTSSWPTSSAPSSSTAATSIASTSVPLTSEAADASMVVPPMDLPVDLEKQYFDMPMTSMALPGNDMLDFDLSMPSLDGSQVDFGVMDESWINLNANNSADVYPWVTMEDLTTGQQN

SEQ ID NO: 38021 - DNA, 4901 bp, Muscodor strobelii
  misc_feature: SGI EST ID NO. CUFF.91364.0
  misc_feature: Variant of the nucleotide sequence at SEQ ID NO 38019
ctcccgatgcccagacggccaggggcaatcattcggccggattattcagaacattataatctccatcgtattccctgtgcgaaggatacctatatacgaacatagttgacgaagtaataggccttagataaaacacgccaagctgcgaccggcgctagattttactggattgatgatcgggttgatgatcggcacgggccgtgaagagctgggttaaggatagtaaagagccgaggaagggtagttcgggagcgtagtgcgaagtttctgttaatcctagataaggttaaggaatagcaatacaccttggcgagagccaaagtagactattgagactaatgtattccgaaatcagaatacgtgtattggtatgacttgcgaactggatgcagctcggcattattcagttgtctaccgtacccacagactcgcatactttagcgctcttcagcatatgcacgcaactgaattccgagaagtcaggaccgcaagcataaggcatggggtcccgcgcgggaaacttcttcgagccactgcctggggttcaaataagctcgcaaagttctctcgtacgcgagaaggccctgtataattcttatcttgtgcttatcaccgatgattggatcgctcggaagtacatacatgggttcgaatgcgccgactagggggcctgaggcacgagttgcattgcccgtaccttgaattgacgtaattgtaaccctccatgcctctcaatgaaatatgtacctagtcggattgcgatcgcatacgtctaaatagatccgacgtgtccctagttagtcggcaactgcgtttcccctcgtggtgtcgttgcaatcgatcataccacatcccaacagtccaataatgtttgcaacactgaatttgaggcaggatgccaccactaccactaccactcgcacatcggggcgcgatggtagtagtggcactgcatcgtcaagtcggacaagaagaaatgtcgtacggcgagcgtgcgactggtgcaagctcatgcgcatcaaatgtgacagccatcggccttgttcgagctgccagcaagcacatcgcgtttgtagtataacaggagaccgacaattccgcagtattgcagacgcagtcaaggagatcgacacattacgtgcccaagtgcgcgagtttgagagtgaaaaaaagtctaaggctaagagcgagagcccttcgcccgtatctccaactcggagaacgtcactatttgattcttacggaagcggtctttcgtcatcacgtaatggcgtgcgcctcgactctgtgctctacggcgttggatcgcttcctttcttcctgacgcagatgcgacagtatctgaaagcgtctcggccgcagtcgcaaatcgacctcgatgtgtcctcgcacgccggcggtcctcaaaatcttactgaaaatgctcaaatttctctccataaaaactatttgccggcttctcaagaaattcattttctcgacctcttttggcaatcgcactatttcagctatccaatcatcaaagaagcagatttccggaaagatttcaaagctctagttgatagcagtaatccgggcgagcctcggaaagcatcaccacttatcgacatagtcttggctctgtgtattcaactggctaattttcgtcttcgtcaaaaaacgcctcaagaaggcagtagccatcttatacctgatgcaccgtgtcttgccgggctgcagtactaccaacgttgtaatgatgttatcgaggcgacagtcgacaaaccatcattgactacggtacaatgctacgtattcagcatcgtgtacctctgccaagcgggcttggtcaatagggcacaagttgtcataggaaaagcaatcatgacgtgcatcttactaggcctacataacgaagttttagaaacagattttgaacctgaacaggaagtccggaggcgcacttggtggagcatctatatgctcgacgctaagctatcaatggagattggccaaccacccatgattgatcactcaaaacacacatgtcgccttccttctgactctccggagacggcaatgtggcttgcaccacactacccgtacgatgagaactgtcccacgtggttaggcttccagacacagacattgcgtcttgtggatgctgtgagaacagcctggtgcactttttacgcaacatacgacagtcttgtcggtgagaatgcgcacagtcaatttctcgaaactgcaaacacacgggaagagtgcgccacgctactcacagacttgatgaagactcttgacacatggactcgacaagttcccgcaggatattatgtccctcggaaggacgctggccgtcccttccagaccatcgacagcgcgcctatagatcttgatctaagtcgcaacgtccttatacattgcatacggcaacgactccttttagaaatgcagtaccactactattgcatgtgcctatgccgacctttcatttgctttggcacgaggtgcgaatcaccgactccgctgtctgatgaaaaagcagttgcatgtctcaatcacgccatcgcattgacagtcatgatacatcagggaatgacctcttcagaagcgctttttggcatttacgatgtttatagatggcagaaaagcgttctttttacaattcttggatttgcatatacctttcccgttagtcctaaaacgcaaggccttagcaagactatagacatggctatcgcgaaccttactttttttgccgatacgctatcggaagctggtcccgttgtcgcaatgggacgggcgctggccaatgacgtgagcacgatattgtccggactttatcacactagttcctggccaacatcctcagctccttcatcgtcaactgctgctacgtcaatcgcttcaacatccgttcctctcacatcagaagctgcagacgcctcgatggtagtaccgccgatggacttaccagtagacttagaaaagcaatacttcgacatgccaatgacgagcatggcattacctgggaacgatatgctagactttgatctttcaatgccgtcattagacggttcgcaagtagattttggcgtcatggacgaatcgtggatcaacctcaacgcaaacaacagtgcagatgtttatccatgggtcacgatggaagatcttacgacgggacaacagaactgacgtaacgattgatgattttgcaacgagacatgagttgattaatgttttgctaatgattgtggcatcctggcgttcggacgtgtttacctagatacgcagactgccaaaggttggatcgggcggagtttgaacccccaaaaatgttacttttagatctcttgttttatacttgataaaatacgtctttggctaggtgtttccattgaaaatgcgtgaggatcggagactggatgcttgtgatgtgaagcgtaaacctggatagaaaagggttctaacaatagccataatcattctatgccactgtcgtaggcatgggttcgtcgaaactgacgtgactggttggctcagcagtcatgtccggctatgctcttcggtacgctccgaagaaaaagtagcatctaatcaaatctggcaagcgtcttgattctcaaaatagctctagctaagacacctttcttgcggcaggtttacatagtcgcttactctggcttcgctatttccgcaaaccctttatgatctaattccatggcaccagcatcaggcaccaaaggcgtctcatttccttctgctgcggcaccagtgaccatgagaccggcttgttccccagccagggcaggatcgctttccccttcgtatttcgcccaggcaggggcattccttttgtcatcaccgccttggctcttgaagttataaccccgggcgcgtggtctcacacccgtgcccgttggcagctctgagtcgtatacacgagagaagtcgtcacagtccttctgaaacttctgctcgccttctttaagtgattctctgacgcctgcaaagaacttgttcattacatgatagttgtggatttgcaagagcgtccagcccagcatctcttttgcctccagaaggtgatgtagataggcgcgatgatgctttgtgcacgcatggcattgacacccctctaccaatggcgtcaccgagacttcatgatctggcgaccacatatttatgcctaatggcttaatctcgccatccgcatttacaggtgctggaaatgagaaatagagtgcgataccggcatctgatatcgtattcagaaactcgactgcgaaaaggtctataccgagctggatctggcgtaggatgtcctgaggcgaaacggtggagttgagtgagaggcgaggaagaggcaccaggggggcgtgatgtattaagtcaggtaatacgtccacgtcgtagattgccaatcccgaaagcttcgaagaatgctccttctccatcgtatttaagtattcccattgtgttgggtacggtattggtaaaactggtgcgaaaacggcggacgtggaagcgccagtctcaccttctgattcgccgggctgcaaaaactcagcaagccattcttcggtgcgatcgatcattcgatactgccgtttggagtttgacacaaaagtccacttcttagaatacgagactgttggtgtttgcacgtatgatagatccgcaagggggatgacggcatcaggctttaaggaatcaactgcctcacggtacgtctctgtcgtcaagtttcgaaagcccgtagaagtgaagactgaaatagagtctttggcattgcctatgggagatgcgactgccggatgccgtcttgccgcaagaactgtgaacatttgagatggagttgcagtaaatgcatgtaaaggctctagctcatcggattttagctctagaatagcaggcgc

SEQ ID NO: 38022 - DNA, 1497 bp, Muscodor strobelii
  misc_feature: SGI cDNA ID NO. 573205
  misc_feature: Encodes the peptide sequence at SEQ ID NO 38023
atggtgactcccgagagagatgggcgggccatcttcaaaattctgaaggttgtagtcaacgatggcgtcggagctcggttgggcgtgctatcctttcccaagaggcgccccctcgaaacgcccaacttcttgggccttacagctcgaggcgccgtgccacatgtcacccctgacaatataaccaagcgcactgaacttggcggagtatacatggccctagaagacttcatagaattgacgcgtaagaagaaagcgcctgctattctagagctaaaatccgatgagctagagcctttacatgcatttactgcaactccatctcaaatgttcacagttcttgcggcaagacggcatccggcagtcgcatctcccataggcaatgccaaagactctatttcagtcttcacttctacgggctttcgaaacttgacgacagagacgtaccgtgaggcagttgattccttaaagcctgatgccgtcatcccccttgcggatctatcatacgtgcaaacaccaacagtctcgtattctaagaagtggacttttgtgtcaaactccaaacggcagtatcgaatgatcgatcgcaccgaagaatggcttgctgagtttttgcagcccggcgaatcagaaggtgagactggcgcttccacgtccgccgttttcgcaccagttttaccaataccgtacccaacacaatgggaatacttaaatacgatggagaaggagcattcttcgaagctttcgggattggcaatctacgacgtggacgtattacctgacttaatacatcacgcccccctggtgcctcttcctcgcctctcactcaactccaccgtttcgcctcaggacatcctacgccagatccagctcggtatagaccttttcgcagtcgagtttctgaatacgatatcagatgccggtatcgcactctatttctcatttccagcacctgtaaatgcggatggcgagattaagccattaggcataaatatgtggtcgccagatcatgaagtctcggtgacgccattggtagaggggtgtcaatgccatgcgtgcacaaagcatcatcgcgcctatctacatcaccttctggaggcaaaagagatgctgggctggacgctcttgcaaatccacaactatcatgtaatgaacaagttctttgcaggcgtcagagaatcacttaaagaaggcgagcagaagtttcagaaggactgtgacgacttctctcgtgtatacgactcagagctgccaacgggcacgggtgtgagaccacgcgcccggggttataacttcaagagccaaggcggtgatgacaaaaggaatgcccctgcctgggcgaaatacgaaggggaaagcgatcctgccctggctggggaacaagccggtctcatggtcactggtgccgcagcagaaggaaatgagacgcctttggtgcctgatgctggtgccatggaattagatcataaagggtttgcggaaatagcgaagccagagtaa

SEQ ID NO: 38023 - protein, 498 aa, Muscodor strobelii
  misc_feature: SGI Peptide ID NO. 573205
  misc_feature (149)..(410): Pfam Id: PF01702 Pfam Desc: Queuine tRNA-ribosyltransferase
  misc_feature (341)..(398): Pfam Id: PF01702 Pfam Desc: Queuine tRNA-ribosyltransferase
  misc_feature (12)..(496): NCBI GI: 164425310 Blast Desc: NCU04654 [Neurospora crassa OR74A] gi|157070877|gb|EAA29961.2| conserved [Neurospora crassa OR74A]
  misc_feature (12)..(496): NCBI GI: 21622321 Blast Desc: conserved [Neurospora crassa]
  misc_feature (11)..(473): NCBI GI: 256731307 Blast Desc: [Nectria haematococca mpVI 77-13-4]
  misc_feature (11)..(449): NCBI GI: 46125993 Blast Desc: FG07374.1 [Gibberella zeae PH-1]
  misc_feature (11)..(447): NCBI GI: 145609277 Blast Desc: MGG_07477 [Magnaporthe grisea 70-15] gi|145016665|gb|EDK01095.1| MGG_07477 [Magnaporthe grisea 70-15]
  misc_feature (3)..(411): NCBI GI: 116206708 Blast Desc: CHGG_02647 [Chaetomium globosum CBS 148.51] gi|88183244|gb|EAQ90712.1| CHGG_02647 [Chaetomium globosum CBS 148.51]
  misc_feature (12)..(451): NCBI GI: 189210040 Blast Desc: tRNA-guanine transglycosylase family protein [Pyrenophora tritici-repentis Pt-1C-BFP] gi|187977445|gb|EDU44071.1| tRNA-guanine transglycosylase family
  misc_feature (12)..(496): NCBI GI: 171692239 Blast Desc: protein product [Podospora anserina] gi|170946068|emb|CAP72869.1| protein product [Podospora anserina]
  misc_feature (142)..(492): NCBI GI: 261355541 Blast Desc: queuine tRNA-ribosyltransferase [Verticillium albo-atrum VaMs.102]
  misc_feature (12)..(493): NCBI GI: 238503187 Blast Desc: tRNA-guanine transglycosylase family protein [Aspergillus flavus NRRL3357] gi|220691637|gb|EED47985.1| tRNA-guanine transglycosylase family protein [Aspergillus flavus
  misc_feature (12)..(394): SWISSPROT Homolog: EC 2.4.2.29 tRNA-guanine transglycosylase
MVTPERDGRAIFKILKVVVNDGVGARLGVLSFPKRRPLETPNFLGLTARGAVPHVTPDNITKRTELGGVYMALEDFIELTRKKKAPAILELKSDELEPLHAFTATPSQMFTVLAARRHPAVASPIGNAKDSISVFTSTGFRNLTTETYREAVDSLKPDAVIPLADLSYVQTPTVSYSKKWTFVSNSKRQYRMIDRTEEWLAEFLQPGESEGETGASTSAVFAPVLPIPYPTQWEYLNTMEKEHSSKLSGLAIYDVDVLPDLIHHAPLVPLPRLSLNSTVSPQDILRQIQLGIDLFAVEFLNTISDAGIALYFSFPAPVNADGEIKPLGINMWSPDHEVSVTPLVEGCQCHACTKHHRAYLHHLLEAKEMLGWTLLQIHNYHVMNKFFAGVRESLKEGEQKFQKDCDDFSRVYDSELPTGTGVRPRARGYNFKSQGGDDKRNAPAWAKYEGESDPALAGEQAGLMVTGAAAEGNETPLVPDAGAMELDHKGFAEIAKPE

SEQ ID NO: 38024 - DNA, 5810 bp, Muscodor strobelii
  misc_feature: SGI EST ID NO. CUFF.91365.1
  misc_feature: Variant of the nucleotide sequence at SEQ ID NO 38022
cttgcaacagctgctcgagtgacctcacccttacgttttgcgacaagagctttgtctcattagtgaaaaaaataatcttcaaatttgagacataacaactcatttttaaggtcactcattcactcgtatagcgccggtgcttagacatcccgctttgatttctcgttcgatcgcttttccgaaaaatttggtgggggtttccacgcctttcgttccaacaccacttgagtctcgcaagtgggtacccaaagtgtcgcacccaagttatggtgactcccgagagagatgggcgggccatcttcaaaattctgaaggttgtagtcaacgatggcgtcggagctcggttgggcgtgctatcctttcccaagaggcgccccctcgaaacgcccaacttcttgggccttacagctcgaggcgccgtgccacatgtcacccctgacaatataaccaagcgcactgaacttggcggagtatacatggccctagaagacttcatagaattgacgcgtaagaagaaagcgcctgctattctagagctaaaatccgatgagctagagcctttacatgcatttactgcaactccatctcaaatgttcacagttcttgcggcaagacggcatccggcagtcgcatctcccataggcaatgccaaagactctatttcagtcttcacttctacgggctttcgaaacttgacgacagagacgtaccgtgaggcagttgattccttaaagcctgatgccgtcatcccccttgcggatctatcatacgtgcaaacaccaacagtctcgtattctaagaagtggacttttgtgtcaaactccaaacggcagtatcgaatgatcgatcgcaccgaagaatggcttgctgagtttttgcagcccggcgaatcagaaggtgagactggcgcttccacgtccgccgttttcgcaccagttttaccaataccgtacccaacacaatgggaatacttaaatacgatggagaaggagcattcttcgaagctttcgggattggcaatctacgacgtggacgtattacctgacttaatacatcacgcccccctggtgcctcttcctcgcctctcactcaactccaccgtttcgcctcaggacatcctacgccagatccagctcggtatagaccttttcgcagtcgagtttctgaatacgatatcagatgccggtatcgcactctatttctcatttccagcacctgtaaatgcggatggcgagattaagccattaggcataaatatgtggtcgccagatcatgaagtctcggtgacgccattggtagaggggtgtcaatgccatgcgtgcacaaagcatcatcgcgcctatctacatcaccttctggaggcaaaagagatgctgggctggacgctcttgcaaatccacaactatcatgtaatgaacaagttctttgcaggcgtcagagaatcacttaaagaaggcgagcagaagtttcagaaggactgtgacgacttctctcgtgtatacgactcagagctgccaacgggcacgggtgtgagaccacgcgcccggggttataacttcaagagccaaggcggtgatgacaaaaggaatgcccctgcctgggcgaaatacgaaggggaaagcgatcctgccctggctggggaacaagccggtctcatggtcactggtgccgcagcagaaggaaatgagacgcctttggtgcctgatgctggtgccatggaattagatcataaagggtttgcggaaatagcgaagccagagtaagcgactatgtaaacctgccgcaagaaaggtgtcttagctagagctattttgagaatcaagacgcttgccagatttgattagatgctactttttcttcggagcgtaccgaagagcatagccggacatgactgctgagccaaccagtcacgtcagtttcgacgaacccatgcctacgacagtggcatagaatgattatggctattgttagaacccttttctatccaggtttacgcttcacatcacaagcatccagtctccgatcctcacgcattttcaatggaaacacctagccaaagacgtattttatcaagtataaaacaagagatctaaaagtaacatttttgggggttcaaactccgcccgatccaacctttggcagtctgcgtatctaggtaaacacgtccgaacgccaggatgccacaatcattagcaaaacattaatcaactcatgtctcgttgcaaaatcatcaatcgttacgtcagttctgttgtcccgtcgtaagatcttccatcgtgacccatggataaacatctgcactgttgtttgcgttgaggttgatccacgattcgtccatgacgccaaaatctacttgcgaaccgtctaatgacggcattgaaagatcaaagtctagcatatcgttcccaggtaatgccatgctcgtcattggcatgtcgaagtattgcttttctaagtctactggtaagtccatcggcggtactaccatcgaggcgtctgcagcttctgatgtgagaggaacggatgttgaagcgattgacgtagcagcagttgacgatgaaggagctgaggatgttggccaggaactagtgtgataaagtccggacaatatcgtgctcacgtcattggccagcgcccgtcccattgcgacaacgggaccctacattaacgcgcgttagtgatcgcatgctaaggtaagaatcttgataaagtcataatgactggccctggagttggagcagaatggcaacttacagcttccgatagcgtatcggcaaaaaaagtaaggttcgcgatagccatgtctatagtcttgctaaggccttgcgttttaggactaacgggaaaggtatatgcaaatccaagaattgtaaaaagaacgcttttctgccatctataaacatcgtaaatgccaaaaagcgcttctgaagaggtcattccctgatgtatcatgactgtcaatgcgatggcgtgattgagacatgcaactgctttttcatcagacagcggagtcggtgattcgcacctcgtgccaaagcaaatgaaaggtcggcataggcacatgcaatagtagtggtactgcatttctaaaaggagtcgttgccgtatgcaatgtataaggacgttgcgacttagatcaagatctataggcgcgctgtcgatggtctggaagggacggccagcgtccttccgagggacataatatcctgcgggaacttgtcgagtccatgtgtcaagagtcttcatcaagtctgtgagtagcgtggcgcactcttcccgtgtgtttgcagtttcgagaaattgactgtgcgcattctcaccgacaagactgtcgtatgttgcgtaaaaagtgcaccaggctgttctcacagcatccacaagacgcaatgtctgtgtctggaagcctaaccacgtgggacagttctcatcgtacgggtagtgtggtgcaagccacattgccgtctccggagagtcagaaggaaggcgacatgtgtgttttgagctgtagtagtccgagattagtataacgagtcaatgacggagagcgaggcagtatgatacgatggactaggaaggaagcaagacagtatgaaatctgatggacttgtctatgaacgtactgatcaatcatgggtggttggccaatctccattgatagcttagcgtcgagcatatagatgctccaccaagtgcgcctccggacttcctgttcaggttcaaaatctgtttctaaaacttcgttatgtaggcctagtaagatgcacgtcactaatgcactaggttagcagcgtcgcaggcttcgaggttgaattgcatcatgcaagaggaacacaggatatgggtggggcagacgctaggcggacttgagcgggaaaggggtgtaactgactgattgcttttcctatgacaacttgtgccctattgaccaagcccgcttggcagaggtacacgatgctgaatacgtagcattgtaccgtagtcaatgatggtttgtcgactgtcgcctcgataacatcattacaacgttggtagtactgcagcccggcaagacacggtgcatcaggtataagatggctactgccttcttgaggcgttttttgacgaagacgaaaattagccagttgaatacacagagccaagactatgtcgataagtggtgatgctttccgaggctcgcccggattactgctatcaactagagctttgaaatctttccggaaatctgcttctttgatgattggatagctgaaatagtgcgattgccaaaagaggtcgagaaaatgaatttcttgagaagccggcaaatagtttttatggagagaaatttgagcattttcagtaagattttgaggaccgccggcgtgcgaggacacatcgaggtcgatttgcgactgcggccgagacgctttcagatactgtcgcatctgcgtcaggaagaaaggaagcgatccaacgccgtagagcacagagtcgaggcgcacgccattacgtgatgacgaaagaccgcttccgtaagaatcaaatagtgacgttctccgagttggagatacgggcgaagggctctcgctcttagccttagactttttttcactctcaaactcgcgcacttgggcacgtaatgtgtcgatctcccttcgacagcaaagttagaatagcttttatttgaaagtaatgcaagggtttgtttacttgactgcgtctgcaatactgcggaattgtcggtctcctgttatactacaaacgcgatgtgcttgctggcagctcgaacaaggccgatggctgtcacatttgatgcgcatgagcttgcaccagtcgcacgctcgccgtacgacatttcttcttgtccgacttgacgatgcagtgccactactaccatcgcgccccgatgtgcgagtggtagtggtagtggtggcatcctgcctcaaattcagtgttgcaaacattattggactgttgggatgtggtatgatcgattgcaacgacaccacgaggggaaacgcagttgccgactaactagggacacgtcggatctatttagacgtatgcgatcgcaatccgactaggtacatatttcattgagaggcatggagggttacaattacgtcaattcaaggtacgggcaatgcaactcgtgcctcaggccccctagtcggcgcattcgaacccatgtatgtacttccgagcgatccaatcatcggtgataagcacaagataagaattatacagggccttctcgcgtacgagagaactttgcgagcttatttgaaccccaggcagtggctcgaagaagtttcccgcgcgggaccccatgccttatgcttgcggtcctgacttctcggaattcagttgcgtgcatatgctgaagagcgctaaagtatgcgagtctgtgggtacggtagacaactgaataatgccgagctgcatccagttcgcaagtcataccaatacacgtattctgatttcggaatacattagtctcaatagtctactttggctctcgccaaggtgtattgctattccttaaccttatctaggattaacagaaacttcgcactacgctcccgaactacccttcctcggctctttactatccttaacccagctcttcacggcccgtgccgatcatcaacccgatcatcaatccagtaaaatctagcgccggtcgcagcttggcgtgttttatctaaggcctattacttcgtcaactatgttcgtatataggtatccttcgcacagggaatacgatggagattataatgttctgaataatccggccgaatgattgcccctggccgtctgggcatcgggag

SEQ ID NO: 38025 - DNA, 1998 bp, Muscodor strobelii
  misc_feature: SGI cDNA ID NO. 573206
  misc_feature: Encodes the peptide sequence at SEQ ID NO 38026
atgagcgattctcgcaggcagcactcggcaagattgctgccgtcttcttctcctgatcttgagcaccaggacaaccgtctcaccggcccagactcgcctccgcatccttccgaacgtcttgactacgaggacaccgactattctgacgattcaagtggccagcgcttcaccccacgcttcatggaagaggagggtgtcgggaagcgctggaaatggataccatatcctgtccgacgcttaacacgcaaagctgtaatttgggctaaggggcctgaaccaccaaagctattcaagatcgaccccttcttgcctgtcatccagcatgcgccaattcggctcctcgaccgagttctacccaaacgtaaacatcgaatcgctttgttcctcgcctacatagcagcatggattctcacatttgccattgtcttgtggcggagtgaagtagccgccgagattgacggatggggcgaagcgacagatattggttgtggcgtgacgtattggtcgaggaacaatctgtgtgggattgatggtgtgaactgtcgtcccttcgacaattcgagctttgcatttcgatgtccaggcagttgcgacagttacaaagtactcaaccctcatgccgtgggaacgcaggagatcgtctatgatacttatgtgattggcgggcctcccgaccaatccaatgatttgaattccctttaccgaggcgattcattcatctgcactgctgctattcacgccggcatcatcagtgcttctaagggaggctgcggagttgtctcgttgataggggagcagcagaatttcgtcagctcaattcgtcacggcatcaaaagcattggtttcgactcgtacttcccgctaagctacacgttcctgcccaacatcgaatgcgaggccacggacgcgagatggaatctgttcgctgtatcagttgtttttaccggcctactctcgctattcacgacctcgtccgctgcctttttcttcggtacatttatcattgccttttggcaagtcggtttagcttcggatccgccgctgacgggcgcagtggctccaaccttctccaacgtattgggtaaattcctgccagctatgttcattgcttgggttttctacgacaagatgggcgtgcggcggactttgagagggctaacagcccaggtggagaagacggtcctgtggctcggcgcatgttggactggtgcactcacaaattacaccttggatttcatccccattcagaggttgacgggacacgatcttgagcaacaacccggtgcgaaagcggctttgtcaattatcgttattgtcctagtcgtggtcgttgtgggacagatatggtgttttcagagagaagctcggctcgtgcgctatttgggactttacgccttatttatcttggctattctcatcgcattggccctgcctagcctcaacttacgcattcatcactatatacttgcccttttactcatacctggcacgagcattcagacgcgaccgtcgctattataccagggtcttcttgttggtctcttcatcaacggtattgctcgatgggggttcgattcagtactgcagacttcgtcggcattacaaggagatgcgcaacttggcactgcgttgcccgtcctccttactcctattgtcaacacaacgctgtctcagatcgcgttccagtggcagtccgcgcctgcgatacgctacgatggcataagcatcttggtcaacgacgtggaacgatatcgtgcgtacttcggcgacaaaggaagcgatgaattcttgtggtcacgcgagaatggaacgtcaattaatgagtactttcgttttggatacatgcagggtgcgaattctggcgactatacacaagcaggcacgtgggatactgacatgaattggattgagatggcaagcggcccgtctaaattaaagggtcgggatcttatacaaacggaacaacaggttcctagaacgttgcgaaatcatagatga

SEQ ID NO: 38026 - protein, 665 aa, Muscodor strobelii
  misc_feature: SGI Peptide ID NO. 573206
  misc_feature (234)..(282): Pfam Id: PF03815 Pfam Desc: LCCL domain
  misc_feature (15)..(650): NCBI GI: 256730930 Blast Desc: NECHADRAFT_63445 [Nectria haematococca mpVI 77-13-4]
  misc_feature (15)..(654): NCBI GI: 46125991 Blast Desc: FG07373.1 [Gibberella zeae PH-1]
  misc_feature (15)..(656): NCBI GI: 85092038 Blast Desc: NCU04653 [Neurospora crassa OR74A] gi|21622320|emb|CAD37023.1| conserved [Neurospora crassa] gi|28920598|gb|EAA29960.1| conserved [Neurospora crassa OR74A]
  misc_feature (24)..(650): NCBI GI: 154293045 Blast Desc: BC1G_14789 [Botryotinia fuckeliana B05.10] gi|150845693|gb|EDN20886.1| BC1G_14789 [Botryotinia fuckeliana B05.10]
  misc_feature (45)..(650): NCBI GI: 156063096 Blast Desc: SS1G_01664 [Sclerotinia sclerotiorum 1980] gi|154697000|gb|EDN96738.1| SS1G_01664 [Sclerotinia sclerotiorum 1980]
  misc_feature (70)..(650): NCBI GI: 39972353 Blast Desc: MGG_07478 [Magnaporthe grisea 70-15] gi|145016666|gb|EDK01096.1| MGG_07478 [Magnaporthe grisea 70-15]
  misc_feature (30)..(651): NCBI GI: 171692237 Blast Desc: protein product [Podospora anserina] gi|170946067|emb|CAP72868.1| protein product [Podospora anserina]
  misc_feature (57)..(649): NCBI GI: 116206710 Blast Desc: CHGG_02648 [Chaetomium globosum CBS 148.51] gi|88183245|gb|EAQ90713.1| CHGG_02648 [Chaetomium globosum CBS 148.51]
  misc_feature (9)..(643): NCBI GI: 189209806 Blast Desc: LCCL domain containing protein [Pyrenophora tritici-repentis Pt-1C-BFP] gi|187977328|gb|EDU43954.1| LCCL domain containing protein [Pyrenophora tritici-repentis
  misc_feature (48)..(643): NCBI GI: 169624431 Blast Desc: SNOG_15474 [Phaeosphaeria nodorum SN15] gi|111056019|gb|EAT77139.1| SNOG_15474 [Phaeosphaeria nodorum SN15]
MSDSRRQHSARLLPSSSPDLEHQDNRLTGPDSPPHPSERLDYEDTDYSDDSSGQRFTPRFMEEEGVGKRWKWIPYPVRRLTRKAVIWAKGPEPPKLFKIDPFLPVIQHAPIRLLDRVLPKRKHRIALFLAYIAAWILTFAIVLWRSEVAAEIDGWGEATDIGCGVTYWSRNNLCGIDGVNCRPFDNSSFAFRCPGSCDSYKVLNPHAVGTQEIVYDTYVIGGPPDQSNDLNSLYRGDSFICTAAIHAGIISASKGGCGVVSLIGEQQNFVSSIRHGIKSIGFDSYFPLSYTFLPNIECEATDARWNLFAVSVVFTGLLSLFTTSSAAFFFGTFIIAFWQVGLASDPPLTGAVAPTFSNVLGKFLPAMFIAWVFYDKMGVRRTLRGLTAQVEKTVLWLGACWTGALTNYTLDFIPIQRLTGHDLEQQPGAKAALSIIVIVLVVVVVGQIWCFQREARLVRYLGLYALFILAILIALALPSLNLRIHHYILALLLIPGTSIQTRPSLLYQGLLVGLFINGIARWGFDSVLQTSSALQGDAQLGTALPVLLTPIVNTTLSQIAFQWQSAPAIRYDGISILVNDVERYRAYFGDKGSDEFLWSRENGTSINEYFRFGYMQGANSGDYTQAGTWDTDMNWIEMASGPSKLKGRDLIQTEQQVPRTLRNHR

SEQ ID NO: 38027 - DNA, 384 bp, Muscodor strobelii
  misc_feature: SGI cDNA ID NO. 573207
  misc_feature: Reduced expression when VOC is produced
  misc_feature: Encodes the peptide sequence at SEQ ID NO 38028
atgtatctcccaagcacccaaagcgtcataaccgccgggctattgctcacaggcaccctcagaaaaccatcagaagtagcttccggcaaagtaatggactacgcaatcgagaagtgcctcgacgacgacggcaacacgcgttgcagtaaacccttcctcgtgacaaaatcaacatgttataagatcgaatggagcaccgagggtacgctcacgcacaccactgccgaagtacgcgatgctggatcgggcgagcttgtgtactaccgcgataccgacggcgattggacaactgaaaagggcgagcttgtatacttggacttcaagcctaaggttccggctactgggaattcgactgttgagtacaaggttacgacctgcgagtaa

SEQ ID NO: 38028 - protein, 127 aa, Muscodor strobelii
  misc_feature: SGI Peptide ID NO. 573207
  misc_feature (1)..(127): NCBI GI: 154304170 Blast Desc: BC1G_08355 [Botryotinia fuckeliana B05.10] gi|150854157|gb|EDN29349.1| BC1G_08355 [Botryotinia fuckeliana B05.10]
  misc_feature (1)..(127): NCBI GI: 58266208 Blast Desc: [Cryptococcus neoformans var. neoformans JEC21] gi|134111172|ref|XP_775728.1| CNBD4570 [Cryptococcus neoformans var. neoformans B-3501A] gi|50258392|gb|EAL21081.1| CNBD4570 var.
  misc_feature (1)..(127): NCBI GI: 269856954 Blast Desc: CND01770-like protein [Cryptococcus heveanensis]
  misc_feature: Useful for introducing or modulating the production of volatile compounds
MYLPSTQSVITAGLLLTGTLRKPSEVASGKVMDYAIEKCLDDDGNTRCSKPFLVTKSTCYKIEWSTEGTLTHTTAEVRDAGSGELVYYRDTDGDWTTEKGELVYLDFKPKVPATGNSTVEYKVTTCE

SEQ ID NO: 38029 - DNA, 3252 bp, Muscodor strobelii
  misc_feature: SGI EST ID NO. CUFF.91126.0
  misc_feature: Variant of the nucleotide sequence at SEQ ID NO 38027
caaaccgtagactcaacaacagtcatattccccaatttgatcaaacgcattgcacataataattgctattttgcaatatcttacaatagaaactcaacccgtcaagcaatcgcgccgccactttgctcaatccaccgacaagatgtatctcccaagcacccaaagcgtcataaccgccgggctattgctcacaggcaccctcagaaaaccatcagaagtagcttccggcaaagtaatggactacgcaatcgagaagtgcctcgacgacgacggcaacacgcgttgcagtaaacccttcctcgtgacaaaatcaacatgttataagatcgaatggagcaccgagggtacgctcacgcacaccactgccgaagtacgcgatgctggatcgggcgagcttgtgtactaccgcgataccgacggcgattggacaactgaaaagggcgagcttgtatacttggacttcaagcctaaggttccggctactgggaattcgactgttgagtacaaggttacgacctgcgagtaatgtttgcatttaatgcgtttggcgtcggaggacgaaatgattagcagaatggaaagaaataattgtaacactacacctttcgtaaaatggtaatggcgcgtggcgtataatacagtgcccgctcgtgagtaacgggttaggactgcgagactgcaacacgtgagaatggagccttcagtgcatactctggatgggtaattttctattacactgtcatattccatagcctgtctcaatcatgggcaaatgtttaaagcggatattgaaaaatcaggtatactgtgcaatgttaatgatatactctgccaatgctatgcttatacaaatgctgatgctatactaatatcatctatgatttcgcaacgttctaggaacctgttgttccgtttgtataagatcccgaccctttaatttagacgggccgcttgccatctcaatccaattcatgtcagtatcccacgtgcctgcttgtgtatagtcgccagaattcgcaccctgcatgtatccaaaacgaaagtactcattaattgacgttccattctcgcgtgaccacaagaattcatcgcttcctttgtcgccgaagtacgcacgatatcgttccacgtcgttgaccaagatgcttatgccatcgtagcgtatcgcaggcgcggactgccactggaacgcgatctgagacagcgttgtgttgacaataggagtaaggaggacgggcaacgcagtgccaagttgcgcatctccttgtaatgccgacgaagtctgcagtactgaatcgaacccccatcgagcaataccgttgatgaagagaccaacaagaagaccctggtataatagcgacggtcgcgtctgaatgctcgtgccaggtatgagtaaaagggcaagtatatagtgatgaatgcgtaagttgaggctaggcagggccaatgcgatgagaatagccaagataaataaggcgtaaagtcccaaatagcgcacgagccgagcttctctctgaaaacaccatatctgtcccacaacgaccacgactaggacaataacgataattgacaaagccgctttcgcaccgggttgttgctcaagatcgtgtcccgtcaacctctgaatggggatgaaatccaaggtgtaatttgtgagtgcaccagtccaacatgcgccgagccacaggaccgtcttctccacctgggctgttagccctctcaaagtccgccgcacgcccatcttgtcgtagaaaacccaagcaatgaacatagctggcaggaatttacccaatacgttggagaaggttggagccactgcgcccgtcagcggcggatccgaagctaaaccgacttgccaaaaggcaatgataaatgtaccgaagaaaaaggcagcggacgaggtcgtgaatagcgagagtaggccggtaaaaacaactgatacagcgaacagattccatctcgcgtccgtggcctcgcattcgatgttgggcaggaacgtgtagcttagcgggaagtacgagtcgaaaccaatgcttttgatgccgtgacgaattgagctgacgaaattctgctgctcccctatcaacgagacaactccgcagcctcccttagaagcactgatgatgccggcgtgaatagcagcagtgcagatgaatgaatcgcctcggtaaagggaattcaaatcattggattggtcgggaggcccgccaatcacataagtatcatagacgatctcctgcgttcccacggcatgagggttgagtactttgtaactgtcgcaactgcctggacatcgaaatgcaaagctcgaattgtcgaagggacgacagttcacaccatcaatcccacacagattgttcctcgaccaatacgtcacgccacaaccaatatctgtcgcttcgccccatccgtcaatctcggcggctacttcactccgccacaagacaatggcaaatgtgagaatccatgctgctatgtaggcgaggaacaaagcgattcgatgtttacgtttgggtagaactcggtcgaggagccgaattggcgcatgctggatgacaggcaagaaggggtcgatcttgaatagctttggtggttcaggccccttagcccaaattacagctttgcgtgttaagcgtcggacaggatatggtatccatttccagcgcttcccgacaccctcctcttccatgaagcgtggggtgaagcgctggccacttgaatcgtcagaatagtcggtgtcctcgtagtcaagacgttcggaaggatgcggaggcgagtctgggccggtgagacggttgtcctggtgctcaagatcaggagaagaagacggcagcaatcttgccgagtgctgcctgcgagaatcgctcatgactgtcacacacggtgttataggtggccaaccatgcaaagacgattgacggtgaggcgggaacggttgtggcacagataggctcagaatttgatcggcattgacacaaagtttatatccgtttcaatttgtatctgtctatgttgaggatggtgtgcgagagatccttccggcggcgcggtgcataaaaagcaatgatgacaacggtgatgatgctgctaataatctgataacaacaatatgaacattgtcaagatctatcaagccaccaaaatatctcaagttgaagccgagaacccgctcgaccttgtacaatagcttggagaggatggtgaagaatcgagaagatcgatccaacggcccatttggccgcgttgcttcac

SEQ ID NO: 38030 - DNA, 2253 bp, Muscodor strobelii
  misc_feature: SGI cDNA ID NO. 573208
  misc_feature: Reduced expression when VOC is produced
  misc_feature: Encodes the peptide sequence at SEQ ID NO 38031
atgtcacccaaattggttctttacaaactagtcatactaggagatggcggggtagggaagactgccttgacgatccagtcatcgctccaacattttgttggaacctacgatccgaacatcgaagacccttacagaaagccctacgatccggacatcgaagacccctacagaaggcaaagagtgattgacggcagcgcttgtatcatcgaaatcctcgatgccgccggccaagaagaatacgctgccttgcgcgaccaatggatccgggagggcgacggcttcctccttgtgtatagcatcgcttccagatcatcatttgcgcgggtgatgggattccatcgtcaaattcagagggtaaaagagaggacactgccgtcgacgtcgtgcagtagctccgctccagaacccagtatcgcaggagttccgatcgtactagtcggtaacaaggccgatcggttcacagaaagagaagtttctatcggagaagggcaggccctggctcgcgaattgggtgttgactttctcgaggcatctgcgaaaacctgctataatgtggaaaagcctttttatgacatcgtacgagaaatgtcaacggaaaccggccgcgccaatttagcggcggccttcgtctcagcagcaaagtcgaatgatgagagactcgtgtcagcgtatcttgatgctggagtagacgtcaacatgcactcgggcacagacgggagtgcgcttcatgcttcggctgcggctggacatgccaatatagtaaacatcctcgtcaaaaagggcgccgctttgagtgcgcggggaccaactggcaccccatctctacatctcgccgcggccgaaggtcaccttgcaattgtgcgcctcttgatacacaagggggcgtcggttgatcaaacaggagttcttcattggaccgtacttagtgctgcagcttctagaggacgggcagacgtagtgcgtgtgcttctaaagaaggggccgagtgtcattgttacaggcaggccttatggtaacccgctacaggcagcttcgtggaacgggaacccagaagtgatcaaatacttactcgacgccgaagcagatattagggcgaggagcgacggaaattgtaccgctcttcaaatggctgccttcgtaggcaaagcgagcgctgtccaaatacttctcaatcgtggagccaaggtggacatcgatgcttcacaggggaaatacggaagtgctttaaaggctgcaactgacggtaaccactacgaagttatcacgatgctgctggaagttggagcaactcctctcctactcaacgtcgtcaagaccaccgacaacaatgctgaggagatagtagccattggcaatggcagtctaggtcaggtagctatccgcaacgcaagcaacacgatcgcagcggaagcttcacagacaagcgagtccttggcgccatcctcgctagcaacaatggaagtgtgctcaggttcgcggtctacatcagctccgccaccgataagcggtgttgcgaacaatacaacttcaacatattatcgtcgcggaatttccactaactcgcctatggtcaataaccgtcgaatcatcagccctattggaataaccaccatccacgactccccaagggctaccgccgaacctttgatcatcgttgctcatagtcttggcggcattgtcctgaaagtgaccctcgacaattcgaaacggtcgacccatcaaccgcaatttctcggagtctatgaatcaaccaagggaatggtcttccttggcacaccacatggcggctctcaaagcgccaactgggtcctcctggttagcaaaatagtcaaacatgccctgcaagcgcccgcggaacgagtgctacgagggctcacacccaacaacgaactgcttgagaatttacgaaaggcctttcttcaaatgcttgaggatggccattttagcaattattctttctatgaaacgcggccgattgtcggagtgtacggtctcagcggtcttttctcggagacggacgatcctagttatcggctagtattcggtgccctgcaagactatgttcgagaagcgactggcgttccagcgggcgagaatgaagcggatttggacgttgttcaagttacccaggatcagatcggacctcctcgcttggaactaccgattgcacgctcaatgggatttgatcaattcaacttcgaattttcaacgggacggacagtccaacctgacccggcagctgttgctgcgtaa

SEQ ID NO: 38031 - protein, 750 aa, Muscodor strobelii
  misc_feature: SGI Peptide ID NO. 573208
  misc_feature (270)..(302): Pfam Id: PF00023 Pfam Desc: Ankyrin repeat
  misc_feature (9)..(151): Pfam Id: PF08477 Pfam Desc: Miro-like protein
  misc_feature (9)..(198): Pfam Id: PF00071 Pfam Desc: Ras family
  misc_feature (340)..(368): Pfam Id: PF00023 Pfam Desc: Ankyrin repeat
  misc_feature (303)..(335): Pfam Id: PF00023 Pfam Desc: Ankyrin repeat
  misc_feature (9)..(125): Pfam Id: PF08477 Pfam Desc: Miro-like protein
  misc_feature (1)..(224): NCBI GI: 189211105 Blast Desc: GTPase NRas precursor [Pyrenophora tritici-repentis Pt-1C-BFP] gi|187977976|gb|EDU44602.1| GTPase NRas precursor [Pyrenophora tritici-repentis Pt-1C-BFP]
  misc_feature (4)..(199): NCBI GI: 85102512 Blast Desc: GTPase KRas [Neurospora crassa OR74A] gi|30316372|sp|Q01387.2|RAS2_NEUCR RecName: Full=Protein ras-2; Flags: Precursor gi|12718404|emb|CAC28712.1| RAS-2 PROTEIN GTPase
  misc_feature (1)..(204): NCBI GI: 46137197 Blast Desc: FG10114.1 [Gibberella zeae PH-1]
  misc_feature (1)..(194): NCBI GI: 256732182 Blast Desc: [Nectria haematococca mpVI 77-13-4]
  misc_feature (1)..(194): NCBI GI: 171691841 Blast Desc: protein product [Podospora anserina] gi|170945869|emb|CAP72670.1| protein product [Podospora anserina]
  misc_feature (2)..(193): NCBI GI: 154315730 Blast Desc: BC1G_04437 [Botryotinia fuckeliana B05.10] gi|150846833|gb|EDN22026.1| BC1G_04437 [Botryotinia fuckeliana B05.10]
  misc_feature (1)..(194): NCBI GI: 116179946 Blast Desc: ras-2 protein [Chaetomium globosum CBS 148.51] gi|88184898|gb|EAQ92366.1| ras-2 protein [Chaetomium globosum CBS 148.51]
  misc_feature (4)..(199): NCBI GI: 1113079 Blast Desc: NC-ras-2 protein [Neurospora crassa]
  misc_feature (1)..(199): NCBI GI: 169600943 Blast Desc: SNOG_03326 [Phaeosphaeria nodorum SN15] gi|160705550|gb|EAT90057.2| SNOG_03326 [Phaeosphaeria nodorum SN15]
  misc_feature (1)..(193): NCBI GI: 225684166 Blast Desc: ras-1 [Paracoccidioides brasiliensis Pb03] gi|226293783|gb|EEH49203.1| ras-2 [Paracoccidioides brasiliensis Pb18]
  misc_feature: Useful for introducing or modulating the production of volatile compounds
MSPKLVLYKLVILGDGGVGKTALTIQSSLQHFVGTYDPNIEDPYRKPYDPDIEDPYRRQRVIDGSACIIEILDAAGQEEYAALRDQWIREGDGFLLVYSIASRSSFARVMGFHRQIQRVKERTLPSTSCSSSAPEPSIAGVPIVLVGNKADRFTEREVSIGEGQALARELGVDFLEASAKTCYNVEKPFYDIVREMSTETGRANLAAAFVSAAKSNDERLVSAYLDAGVDVNMHSGTDGSALHASAAAGHANIVNILVKKGAALSARGPTGTPSLHLAAAEGHLAIVRLLIHKGASVDQTGVLHWTVLSAAASRGRADVVRVLLKKGPSVIVTGRPYGNPLQAASWNGNPEVIKYLLDAEADIRARSDGNCTALQMAAFVGKASAVQILLNRGAKVDIDASQGKYGSALKAATDGNHYEVITMLLEVGATPLLLNVVKTTDNNAEEIVAIGNGSLGQVAIRNASNTIAAEASQTSESLAPSSLATMEVCSGSRSTSAPPPISGVANNTTSTYYRRGISTNSPMVNNRRIISPIGITTIHDSPRATAEPLIIVAHSLGGIVLKVTLDNSKRSTHQPQFLGVYESTKGMVFLGTPHGGSQSANWVLLVSKIVKHALQAPAERVLRGLTPNNELLENLRKAFLQMLEDGHFSNYSFYETRPIVGVYGLSGLFSETDDPSYRLVFGALQDYVREATGVPAGENEADLDVVQVTQDQIGPPRLELPIARSMGFDQFNFEFSTGRTVQPDPAAVAA

SEQ ID NO: 38032 - DNA, 4170 bp, Muscodor strobelii
  misc_feature: SGI EST ID NO. CUFF.91159.1
  misc_feature: Variant of the nucleotide sequence at SEQ ID NO 38030
ggccgccacgcgacagcgcctatacgtagggctgtcactggacctgggccattgtactgaagtggctgaggtcgcatttgcatccagctcagacgcagccagctgaacatggcggctctcgtcctggtcgtttctggaaggttcaccgcgattgaaatcattgtagagattcaattccataatcgtacagatcgaatgccgagtgcttcccgtgaaggaagtcgacgggcgtctcctaggactttggtaaagagtcaccatgtcacccaaattggttctttacaaactagtcatactaggagatggcggggtagggaagactgccttgacgatccagtcatcgctccaacattttgttggaacctacgatccgaacatcgaagacccttacagaaagccctacgatccggacatcgaagacccctacagaaggcaaagagtgattgacggcagcgcttgtatcatcgaaatcctcgatgccgccggccaagaagaatacgctgccttgcgcgaccaatggatccgggagggcgacggcttcctccttgtgtatagcatcgcttccagatcatcatttgcgcgggtgatgggattccatcgtcaaattcagagggtaaaagagaggacactgccgtcgacgtcgtgcagtagctccgctccagaacccagtatcgcaggagttccgatcgtactagtcggtaacaaggccgatcggttcacagaaagagaagtttctatcggagaagggcaggccctggctcgcgaattgggtgttgactttctcgaggcatctgcgaaaacctgctataatgtggaaaagcctttttatgacatcgtacgtcttttgagacgtcaacgcgaggcggctgcgtgacgcgatttgacgctgccgtcaacgcggctactgcccaggcaggtttcataccgaacaaggaggaccttttggggttcttgccgcatactgattccaccaggagaaatgtcaacggaaaccggccgcgccaatttagcggcggccttcgtctcagcagcaaagtcgaatgatgagagactcgtgtcagcgtatcttgatgctggagtagacgtcaacatgcactcgggcacagacgggagtgcgcttcatgcttcggctgcggctggacatgccaatatagtaaacatcctcgtcaaaaagggcgccgctttgagtgcgcggggaccaactggcaccccatctctacatctcgccgcggccgaaggtcaccttgcaattgtgcgcctcttgatacacaagggggcgtcggttgatcaaacaggagttcttcattggaccgtacttagtgctgcagcttctagaggacgggcagacgtagtgcgtgtgcttctaaagaaggggccgagtgtcattgttacaggcaggccttatggtaacccgctacaggcagcttcgtggaacgggaacccagaagtgatcaaatacttactcgacgccgaagcagatattagggcgaggagcgacggaaattgtaccgctcttcaaatggctgccttcgtaggcaaagcgagcgctgtccaaatacttctcaatcgtggagccaaggtggacatcgatgcttcacaggggaaatacggaagtgctttaaaggctgcaactgacggtaaccactacgaagttatcacgatgctgctggaagttggagcaactcctctcctactcaacgtcgtcaagaccaccgacaacaatgctgaggagatagtagccattggcaatggcagtctaggtcaggtagctatccgcaacgcaagcaacacgatcgcagcggaagcttcacagacaagcgagtccttggcgccatcctcgctagcaacaatggaagtgtgctcaggttcgcggtctacatcagctccgccaccgataagcggtgttgcgaacaatacaacttcaacatattatcgtcgcggaatttccactaactcgcctatggtcaataaccgtcgaatcatcagccctattggaataaccaccatccacgactccccaagggctaccgccgacatagtattcattcacggactacaaggacacccagagaagatttggactcatgttggcaagtctcaaaagattggcttgcggcgtagactattcggcccgccttctcctgcgattatcgaagacaccccaactatgtattggccatttgatttgttggcacacagtaacgacgtcccgaacacgcgaatcatgacttgagggtatgacaccaatgttatacaagatttcctcggaacaagtgaccagcagaacatatctcagcacggtaataatctactagtgaatctacaacaagaaagaaaagtagatatgagtatagcaaggatgataataggcgcttgacctaatcgttatgtagcctctcagacctttgatcatcgttgctcatagtcttggcggcattgtcctgaaagtggtaagttcaatgattatttgcaatcgctacttatttgcagtaatgggatggctagaccctcgacaattcgaaacggtcgacccatcaaccgcaatttctcggagtctatgaatcaaccaagggaatggtcttccttggcacaccacatggcggctctcaaagcgccaactgggtcctcctggttagcaaaatagtcaaacatgccctgcaagcgcccgcggaacgagtgctacgagggctcacacccaacaacgaactgcttgagaatttacgaaaggcctttcttcaaatgcttgaggatggccattttagcaattattctttctatgaaacgcggccgattgtcggagtgtacggtctcagcggtcttgtaagtctgcattttccgtagactgattccttgaactagcaggtgtcgccgacttgtaccttctaggttgttccgtttgaatctccactcgtcggcacgcacgcagggaggtatccgcaggtctcttggggaaccatccgaaaatatgcaagttctcggagacggacgatcctagttatcggctagtattcggtgccctgcaagactatgttcgagaagcgactggcgttccagcgggcgagaatgaagcggatttggacgttgttcaagttacccaggatcagatcggacctcctcgcttggaactaccgattgcacgctcaatgggatttgatcaattcaacttcgaattttcaacgggacggacagtccaacctgacccggcagctgttgctgcgtaatcgtatattccggttcataatggacttgttcattggcagagcactggtccatatactgcctgaagatagtcaagctgatcagaaggcaaattcgagaccgcccacgatcgcgtatactagaaagatcacaattgtcactttcacgactgtggtgtgctgtcgctttgttgccatctactcagcatcaaaagttccgataacgaaactgcagcttgcagcatcccgattaatactggacacacactagtgttcagtgtaacatctaggacattgttaggcacgatacgtcacaaagtcttgtcgcaataacctcctttccataagcctctatcttcacgaaatcggaggggaaaaacggtgatatagaataataaaggcaaagaagcctgtgtactgttgcgattccaggtagacgggcttacatcgttttattccaaaagattggcttttgcacaaatagccctttgtcacattcttcagcaacactcaataaacaaaatgcactacacgaacaaatgtctaggaaacaagacttaattagtgtttctcgttcgccagacaggaaggcaacgctagcacaggtctcctgacatcgggcggcaaaggcttgccagttggaagcgttgttgatgttggtggtgcttccggctattgtcatggttgaaaggggaagcatgaagtaagcggtagtcagcaggacataaaaattatcaggggcaacagatggatgagcgtcgcaaagcgcgaatagatgaataacactagcgctgataaactcacaggcgtagcgccgatggataaaaacattggcgccgatgagctcacgacctgtcactagaggctgatactaatatttattttttagaagcaaagaagacccttttagtgtctctttttcttttctttttcttagtacgctgcgtctatacaataacatcctataactgag

SEQ ID NO: 38033 - DNA, 990 bp, Muscodor strobelii
  misc_feature: SGI cDNA ID NO. 573209
  misc_feature: Encodes the peptide sequence at SEQ ID NO 38034
atgcaagctgtcacgactatcatcaatcccagtaccgttgaacgcaaactgaagaaggttctgatttttcagtctcttgccaacggaactgtcggctatgagcagcatgaattcgatgaccagcaagagctcttcacgcaaggctatagcaagggagtcaatggtaactacgatgagcagcctgctccgttgactcctgtcatcaagttcgggtccaacattgtgtcattgatcattgacgatactgtgcgcatttacggtgtcagtgcacacacaggcgcaatctgtctcctcagccccgtcttccaacacctgggctctgccaatgtggaccctaatctccccggcaagatcgctggctgtggtaacggcaaagataaggcctggatctactttcagaaagccactggcccaggaagattttccatctatgagaagagcttgaccaagctcaacgaaaagcccgtcgagatcagtgacacggataaatgcaaggagggcactgatgtcgtggctttctttgacggcaagcgccgttggattgcatatcagacggctacagaggaccgtaaagagcaagtttctcatatccaggtcgactgtcttgataacagatctctcggtaagggaattttaccagatcgcgccatcaggactgggctaaccaacttttcagaccacaagatccgtggtaccgacactgtcattgatagcaagctgattgagctagcggcaactaatgccgtgaagaacggtaaagagatggtttacatctatttccgcggccagggaagaaagctatattacacctccagcgaaatcaaagacgagggcatcctattcagcgctcctaagctgctcgaggacatgacgtatctcgagagccacgcttccctgtcggttcttcccagcccggatggtatcatgatctacggtatcaaggatggtggtgagggacttgaggctttcctcgatccctggaccaaatga

SEQ ID NO: 38034 - protein, 329 aa, Muscodor strobelii
  misc_feature: SGI Peptide ID NO. 573209
  misc_feature (1)..(305): NCBI GI: 171680420 Blast Desc: protein product [Podospora anserina] gi|170939837|emb|CAP65062.1| protein product [Podospora anserina]
MQAVTTIINPSTVERKLKKVLIFQSLANGTVGYEQHEFDDQQELFTQGYSKGVNGNYDEQPAPLTPVIKFGSNIVSLIIDDTVRIYGVSAHTGAICLLSPVFQHLGSANVDPNLPGKIAGCGNGKDKAWIYFQKATGPGRFSIYEKSLTKLNEKPVEISDTDKCKEGTDVVAFFDGKRRWIAYQTATEDRKEQVSHIQVDCLDNRSLGKGILPDRAIRTGLTNFSDHKIRGTDTVIDSKLIELAATNAVKNGKEMVYIYFRGQGRKLYYTSSEIKDEGILFSAPKLLEDMTYLESHASLSVLPSPDGIMIYGIKDGGEGLEAFLDPWTK

SEQ ID NO: 38035 - DNA, 2001 bp, Muscodor strobelii
  misc_feature: SGI cDNA ID NO. 573210
  misc_feature: Elevated expression when VOC is produced
  misc_feature: Encodes the peptide sequence at SEQ ID NO 38036
atgggtagggtatcttctctcgctgtgtggacggcatcattagctgtggtcgcgggtcagcattaccagcgtcttggcgcgtgcccctcgctcggttgcgttctgcctcccgatcagaccgacttcctcccgggtcagtacttcgacttgcgaattgaggttcatgctcctgtcaatggctcggaagcttacaacgatggtgttccggatgaggagttctccgtgaccatcacgaaggacggtgggaaggccaagagcattactgaattctttgatatcaaggagcctgagattgagaactggaatttctcctggtatgaagacctcttcgctgaagatgctggcacgccgtctgtcgtcaatgttgcggcgaaggcctaccgacgattggctatctacgagcctggtacctatgtcgttgagttggactactacaatggcaagaagactactgcggagtgggttgtacgccctcttgctactcgcaagagggccaagaacgtcattctctttattggtgacggcatgactaccaacatgatcaccgccgctcgtctcctcggtcataagagcatcaacggcaaatatcaatctaccttgcagatggacaaattccctgtcctgggtcatcaaatgacacactcgcttgatagctacatcaccgatagtgccaactcggcatctgctctatactccggacacaagagtactgtgaatgctatgggcgtctacgctgactcttctcctgatttgttcgacgatccgaaggtcgagaccatcgtagagatggtgaagcgtatctggggctctgcttggggcgctgtgtctactgctgcaatcgccgacgcgacacctattgccctaacgggtcacagccgctcacgctacgcctacggcccgctcattgaccaagctctgcactcagtcaccaactacacctggaccaggcagggcggacccgacgcctacttcggcgggggcgccgagcaattctaccccggatccgacagctacgagggaaaagactactacgcagagttctcctcagccggatatgacatcgcaaataccaagtccgctctcctcgagctggggaacagcagtcgtgcactcggtatattctgtcgcactcacttacctgtatggctagaccggaacatctacacggagaaccttcaagccttcgagaatgatcctcatggttctaagtcaccggcacttgatctaccaggtctgaaggacatgacgctaaaagccatcgatgtgctacaccaccgcggcggagaaaagggtttcttcctaatgtccgaaggcgcatcaatcgacaagcagatgcacaccctagactacgaccgagcactcggtgatctgctggagttcgacgataccatcaaagctacaatcgcacatctcaaagcgatcggcgagctagaaaagacactcatcctcgtgacagcagaccacggccacgggttcgacgtcttcggaggagtagacactaaatatctcgcagcacaaaaagataatcgatcaaagcgccgcgctgtgggtacttatgtcaactccggtctatctcaatacaccgttcctcaagacggcgtatcatataacacggggacttctttcccagtaaactgggatccgagatacacacttgcccagggcgtaggcgcgatgccagatcatcgggagaactacaaagttcattctaaaggaccccgtacacctgctacgaatatctctggttttgatgaagatgatctttttgcgaatcctgaagatgccgttgatggctttgtggtcaatggtacgcttgctaccgacgaggcgcagggtgtgcattcgctgactgatgtaccggtttttgctatggggccttgtcaggaggattttggcggggtttatgggaatgtggatgttttctttaagatggctagttgtcttggattggggcagaggagtgataagatgcgcgaggttggggattgtcctgggaaatag

SEQ ID NO: 38036 - protein, 666 aa, Muscodor strobelii
  misc_feature: SGI Peptide ID NO. 573210
  misc_feature (165)..(650): Pfam Id: PF00245 Pfam Desc: Alkaline phosphatase
  misc_feature (165)..(300): Pfam Id: PF00245 Pfam Desc: Alkaline phosphatase
  misc_feature (410)..(497): Pfam Id: PF00245 Pfam Desc: Alkaline phosphatase
  misc_feature (614)..(650): Pfam Id: PF00245 Pfam Desc: Alkaline phosphatase
  misc_feature (3)..(656): NCBI GI: 85100284 Blast Desc: NCU01376 [Neurospora crassa OR74A] gi|11595660|emb|CAC18282.1| alkaline phosphatase [Neurospora crassa] gi|28922466|gb|EAA31697.1| NCU01376 [Neurospora crassa
  misc_feature (17)..(663): NCBI GI: 116206316 Blast Desc: CHGG_02451 [Chaetomium globosum CBS 148.51] gi|88183048|gb|EAQ90516.1| CHGG_02451 [Chaetomium globosum CBS 148.51]
  misc_feature (19)..(656): NCBI GI: 145602442 Blast Desc: MGG_04900 [Magnaporthe grisea 70-15] gi|145010867|gb|EDJ95523.1| MGG_04900 [Magnaporthe grisea 70-15]
  misc_feature (20)..(652): NCBI GI: 46125995 Blast Desc: FG07375.1 [Gibberella zeae PH-1]
  misc_feature (1)..(652): NCBI GI: 171693489 Blast Desc: protein product [Podospora anserina] gi|170946693|emb|CAP73496.1| protein product [Podospora anserina]
  misc_feature (20)..(652): NCBI GI: 256731306 Blast Desc: [Nectria haematococca mpVI 77-13-4]
  misc_feature (17)..(655): NCBI GI: 261355540 Blast Desc: alkaline phosphatase H [Verticillium albo-atrum VaMs.102]
  misc_feature (1)..(659): NCBI GI: 83283008 Blast Desc: protein tyrosine phosphatase [Metarhizium acridum]
  misc_feature (4)..(652): NCBI GI: 240105971 Blast Desc: alkaline phosphatase, [Coccidioides posadasii C735 delta SOWgp]
  misc_feature (10)..(655): NCBI GI: 225684270 Blast Desc: alkaline phosphatase [Paracoccidioides brasiliensis Pb03]
  misc_feature (141)..(495): SWISSPROT Homolog: EC 3.1.3.1 Alkaline phosphatase
  misc_feature: Useful for introducing or modulating the production of volatile compounds
MGRVSSLAVWTASLAVVAGQHYQRLGACPSLGCVLPPDQTDFLPGQYFDLRIEVHAPVNGSEAYNDGVPDEEFSVTITKDGGKAKSITEFFDIKEPEIENWNFSWYEDLFAEDAGTPSVVNVAAKAYRRLAIYEPGTYVVELDYYNGKKTTAEWVVRPLATRKRAKNVILFIGDGMTTNMITAARLLGHKSINGKYQSTLQMDKFPVLGHQMTHSLDSYITDSANSASALYSGHKSTVNAMGVYADSSPDLFDDPKVETIVEMVKRIWGSAWGAVSTAAIADATPIALTGHSRSRYAYGPLIDQALHSVTNYTWTRQGGPDAYFGGGAEQFYPGSDSYEGKDYYAEFSSAGYDIANTKSALLELGNSSRALGIFCRTHLPVWLDRNIYTENLQAFENDPHGSKSPALDLPGLKDMTLKAIDVLHHRGGEKGFFLMSEGASIDKQMHTLDYDRALGDLLEFDDTIKATIAHLKAIGELEKTLILVTADHGHGFDVFGGVDTKYLAAQKDNRSKRRAVGTYVNSGLSQYTVPQDGVSYNTGTSFPVNWDPRYTLAQGVGAMPDHRENYKVHSKGPRTPATNISGFDEDDLFANPEDAVDGFVVNGTLATDEAQGVHSLTDVPVFAMGPCQEDFGGVYGNVDVFFKMASCLGLGQRSDKMREVGDCPGK

SEQ ID NO: 38037 - DNA, 2336 bp, Muscodor strobelii
  misc_feature: SGI EST ID NO. CUFF.91202.0
  misc_feature: Variant of the nucleotide sequence at SEQ ID NO 38035
gctggatcgttgcttccctgcataagaagcttgacattcctcgaatttaaattgcgatgaagctgctgcatctcgaaacctcctcgcgagcaattgcaattgcaattgagcagcacttgattcccagttcaatccccagacacgatgggtagggtatcttctctcgctgtgtggacggcatcattagctgtggtcgcgggtcagcattaccagcgtcttggcgcgtgcccctcgctcggttgcgttctgcctcccgatcagaccgacttcctcccgggtcagtacttcgacttgcgaattgaggttcatgctcctgtcaatggctcggaagcttacaacgatggtgttccggatgaggagttctccgtgaccatcacgaaggacggtgggaaggccaagagcattactgaattctttgatatcaaggagcctgagattgagaactggaatttctcctggtatgaagacctcttcgctgaagatgctggcacgccgtctgtcgtcaatgttgcggcgaaggcctaccgacgattggctatctacgagcctggtacctatgtcgttgagttggactactacaatggcaagaagactactgcggagtgggttgtacgccctcttgctactcgcaagagggccaagaacgtcattctctttattggtgacggcatgactaccaacatgatcaccgccgctcgtctcctcggtcataagagcatcaacggcaaatatcaatctaccttgcagatggacaaattccctgtcctgggtcatcaaatgacacactcgcttgatagctacatcaccgatagtgccaactcggcatctgctctatactccggacacaagagtactgtgaatgctatgggcgtctacgctgactcttctcctgatttgttcgacgatccgaaggtcgagaccatcgtagagatggtgaagcgtatctggggctctgcttggggcgctgtgtctactgctgcaatcgccgacgcgacacctattgccctaacgggtcacagccgctcacgctacgcctacggcccgctcattgaccaagctctgcactcagtcaccaactacacctggaccaggcagggcggacccgacgcctacttcggcgggggcgccgagcaattctaccccggatccgacagctacgagggaaaagactactacgcagagttctcctcagccggatatgacatcgcaaataccaagtccgctctcctcgagctggggaacagcagtcgtgcactcggtatattctgtcgcactcacttacctgtatggctagaccggaacatctacacggagaaccttcaagccttcgagaatgatcctcatggttctaagtcaccggcacttgatctaccaggtctgaaggacatgacgctaaaagccatcgatgtgctacaccaccgcggcggagaaaagggtttcttcctaatgtccgaaggcgcatcaatcgacaagcagatgcacaccctagactacgaccgagcactcggtgatctgctggagttcgacgataccatcaaagctacaatcgcacatctcaaagcgatcggcgagctagaaaagacactcatcctcgtgacagcagaccacggccacgggttcgacgtcttcggaggagtagacactaaatatctcgcagcacaaaaagataatcgatcaaagcgccgcgctgtgggtacttatgtcaactccggtctatctcaatacaccgttcctcaagacggcgtatcatataacacggggacttctttcccagtaaactgggatccgagatacacacttgcccagggcgtaggcgcgatgccagatcatcgggagaactacaaagttcattctaaaggaccccgtacacctgctacgaatatctctggttttgatgaagatgatctttttgcgaatcctgaagatgccgttgatggctttgtggtcaatggtacgcttgctaccgacgaggcgcagggtgtgcattcgctgactgatgtaccggtttttgctatggggccttgtcaggaggattttggcggggtttatgggaatgtggatgttttctttaagatggctagttgtcttggattggggcagaggagtgataagatgcgcgaggttggggattgtcctgggaaataggacggtgtgtgatggtgggaggtagttggaggttgtatatgatgtatgaggtgtataactgtttgtttaagaggttgtgatgagtttatcatatattacacgacgaactattatatatcataaacataactctatcacttgcacaaccgcctgatacccccgaatctacaaatgcgccttccaggtttccc

SEQ ID NO: 38038 - DNA, 1131 bp, Muscodor strobelii
  misc_feature: SGI cDNA ID NO. 573211
  misc_feature: Encodes the peptide sequence at SEQ ID NO 38039
atgcccaaaacacgaagcagatccgaagctgtgtcctcgcctcggaagtccaagaagtccaagcagggacccaaagatctactctccccaatatcaatcgaagatccagaggtttcttcccttctaaatgagttcctgaccacaaggaccggtcccatcgcccccatcgccgcagcattcctcgacggaattgcatccgcagacaatggcatctccaaactccgtgcctcccgtttaagcaccctatggaaatccctgaatctgcaaaaacctgtcctcatcccttcttcgacaacatgggagctcatgcccacatcctatgaagtattcgtaaacgacctaataagtagttacaccaaaagctctatcaatgtatataccgtcggaaagcctctagagcccgcgggcgaagacgcatttgtgcgctgtatatggcagctccaggagcctgatccagagtgtacttattatgcgataaacgtgccgacggataatgcaaagatgataataccgaaaagtctaaagcacacgggggtcccgtatggaaagcagatgactactacgaacatcacgccgcggtatacattcgtagacttacacatcgatcacggccgccacggcctaacatccctcttcggcccctgcatcaaactctgggctctctacccaccaaccccacacaacctctcactctactcctcagccgtaacatcctccaaccccttcgccactctctcctcatctctagaaggcggcgaattctgcataacaacatcaaaagatacactatacctgccccccggctgtctgcacgccacatacacactccgcggtggattaacccccggtttcgagtatacgacggccgaatgtctagatgtaagcgcaaaggtcttagagataaataagaagaaatttaggctgggcgcaggtgattatgagccgtttctagaggctgttgtccttgctttgaggaatggtgggaaggtgtcggaagaggcggaaaggaggttatgcgcgttctataaagtggtcgctaagcataaggggaaagtggcggctgagattaggaggttgactaaggggcgtgtttgcaagggttgtggggaaacctggaaggcgcatttgtag

SEQ ID NO: 38039 - protein, 376 aa, Muscodor strobelii
  misc_feature: SGI Peptide ID NO. 573211
  misc_feature (78)..(292): NCBI GI: 212547159 Blast Desc: PMAA_102620 [Penicillium marneffei ATCC 18224] gi|210064388|gb|EEA18485.1| PMAA_102620 [Penicillium marneffei ATCC 18224]
  misc_feature (81)..(299): NCBI GI: 242816161 Blast Desc: TSTA_106880 [Talaromyces stipitatus ATCC 10500] gi|218715055|gb|EED14478.1| TSTA_106880 [Talaromyces stipitatus ATCC 10500]
  misc_feature (144)..(299): NCBI GI: 255952546 Blast Desc: [Penicillium chrysogenum Wisconsin 54-1255] gi|211586529|emb|CAP79364.1| [Penicillium chrysogenum Wisconsin 54-1255]
  misc_feature (89)..(326): NCBI GI: 225558681 Blast Desc: conserved [Ajellomyces capsulatus G186AR]
  misc_feature (65)..(327): NCBI GI: 154310132 Blast Desc: [Botryotinia fuckeliana B05.10] gi|150851547|gb|EDN26740.1| [Botryotinia fuckeliana B05.10]
  misc_feature (79)..(326): NCBI GI: 156045253 Blast Desc: [Sclerotinia sclerotiorum 1980] gi|154694210|gb|EDN93948.1| [Sclerotinia sclerotiorum 1980]
  misc_feature (189)..(349): NCBI GI: 156050923 Blast Desc: [Sclerotinia sclerotiorum 1980] gi|154692449|gb|EDN92187.1| [Sclerotinia sclerotiorum 1980]
  misc_feature (186)..(302): NCBI GI: 156050923 Blast Desc: [Sclerotinia sclerotiorum 1980] gi|154692449|gb|EDN92187.1| [Sclerotinia sclerotiorum 1980]
  misc_feature (196)..(308): NCBI GI: 32565556 Blast Desc: T26A5.5 [Caenorhabditis elegans] gi|24942971|gb|AAN65292.1| T26A5.5b [Caenorhabditis elegans]
  misc_feature (196)..(343): NCBI GI: 255710689 Blast Desc: KLTH0A03960p [Lachancea thermotolerans] gi|238933005|emb|CAR21186.1| KLTH0A03960p [Lachancea thermotolerans]
MPKTRSRSEAVSSPRKSKKSKQGPKDLLSPISIEDPEVSSLLNEFLTTRTGPIAPIAAAFLDGIASADNGISKLRASRLSTLWKSLNLQKPVLIPSSTTWELMPTSYEVFVNDLISSYTKSSINVYTVGKPLEPAGEDAFVRCIWQLQEPDPECTYYAINVPTDNAKMIIPKSLKHTGVPYGKQMTTTNITPRYTFVDLHIDHGRHGLTSLFGPCIKLWALYPPTPHNLSLYSSAVTSSNPFATLSSSLEGGEFCITTSKDTLYLPPGCLHATYTLRGGLTPGFEYTTAECLDVSAKVLEINKKKFRLGAGDYEPFLEAVVLALRNGGKVSEEAERRLCAFYKVVAKHKGKVAAEIRRLTKGRVCKGCGETWKAHL

SEQ ID NO: 38040 - DNA, 1443 bp, Muscodor strobelii
  misc_feature: SGI cDNA ID NO. 573212
  misc_feature: Encodes the peptide sequence at SEQ ID NO 38041
atgttggctcctttcaccaatgaattcgatcgcatcgcaccctcgttcaaaatcgacggctctcaaatccagatcataacatcgccctcggacttttacgagacgttgaaggccaaaatacggcatgcaaagaagcgcatattcctatcgacattgtatatcggcaagtcagagaaagagctgatcgcgacattacaggaggcccttcgcaacaatccggagctaaacctgagcattttgaccgatgctctacgtgggacacgagagtcgcctgatccatcatgcgcttctcttctcgcgcctctcatcacggaattcgggccggatcgggttgagattcggatgtaccacacgcccaacttgacaggcctacgaaagaaatacatacccaagcgcatcaacgagggatggggcttgcagcatatgaagctatatggagtcgatgacgagataatcctctcaggcgcgaatctctcggaggattatttcacaaatcgtctagatcgatatcagcttttcacctcgaaggaaatcaccgagtatttctataggttataccaaggtgttacttctcttagtttccgagtcgagccatcgcaggaacctgctggatttcagcttcattggccatcaacgaacgcggctccctctccacttgagcaccctaaaaagtatatctccaagtcaacggcactgatcagcaaactcatctctctgggcaaagctcagaccaaatcgatcacaaacgacacatcgaagaaagacacaacagtctacatgctcgggcagctctcacaattgatgaggcctaattcatcaacagagctacctgtcgtcacgcatcttctaaaaaccctagcggagccccaatactccaactcttcctggacattcacagcaggttatttcaacccagacccatcactcaggaacctactactatctacagcctcacaaaacaacaccgtcataaccgcgtcgccatgggccaatggcttctatggatcgaaaggagtatctggcatgttgcccggcgcatatacctacctagcaaggaaattcctacgagaggtacatcaacggaaccgagactcttccatcgtcctcaaagaatggcgtaagggtacagtcggtgaacctggagcctggacatatcacgccaaaggattatgggttacgttaccgggcgacactggcccttctatgagtatcatcggaagctctaactacaccaagcggagctactctcacgatctggaagcgggtgctcttatcgtcaccgaaaatgagaatttgaagaagaggctcagggccgaacaggaagcgctccaagatcgcgctaagcctgtcacgcttgacgagttctcgagcacggagagaagagttggacttcatattcgcatctcaatgctcatcgtgactttagttggaggtgcactatag

SEQ ID NO: 38041 - protein, 480 aa, Muscodor strobelii
  misc_feature: SGI Peptide ID NO. 573212
  misc_feature (136)..(162): Pfam Id: PF00614 Pfam Desc: Phospholipase D Active site motif
  misc_feature (1)..(480): NCBI GI: 171693149 Blast Desc: protein product [Podospora anserina] gi|170946523|emb|CAP73324.1| protein product [Podospora anserina]
  misc_feature (1)..(480): NCBI GI: 85100876 Blast Desc: NCU01141 [Neurospora crassa OR74A] gi|7635855|emb|CAB88571.1| phosphatidylglycerophosphate synthase PEL1 [Neurospora crassa] gi|28922585|gb|EAA31812.1| NCU01141
  misc_feature (2)..(480): NCBI GI: 256727859 Blast Desc: [Nectria haematococca mpVI 77-13-4]
  misc_feature (2)..(480): NCBI GI: 46130898 Blast Desc: FG09004.1 [Gibberella zeae PH-1]
  misc_feature (1)..(471): NCBI GI: 145609361 Blast Desc: MGG_07543 [Magnaporthe grisea 70-15] gi|145016739|gb|EDK01169.1| MGG_07543 [Magnaporthe grisea 70-15]
  misc_feature (2)..(480): NCBI GI: 261359013 Blast Desc: CDP-diacylglycerol-glycerol-3-phosphate 3-phosphatidyltransferase [Verticillium albo-atrum VaMs.102]
  misc_feature (2)..(480): NCBI GI: 258572150 Blast Desc: conserved [Uncinocarpus reesii 1704] gi|237905111|gb|EEP79512.1| conserved [Uncinocarpus reesii 1704]
  misc_feature (2)..(480): NCBI GI: 212535606 Blast Desc: CDP-diacylglycerol-glycerol-3-phosphate 3-phosphatidyltransferase [Penicillium marneffei ATCC 18224] gi|210070358|gb|EEA24448.1| 3-phosphatidyltransferase marneffei
  misc_feature (2)..(480): NCBI GI: 242793539 Blast Desc: CDP-diacylglycerol-glycerol-3-phosphate 3-phosphatidyltransferase [Talaromyces stipitatus ATCC 10500] gi|218718772|gb|EED18192.1| 3-phosphatidyltransferase stipitatus
  misc_feature (2)..(480): NCBI GI: 238844411 Blast Desc: CDP-diacylglycerol-glycerol-3-phosphate 3-phosphatidyltransferase [Microsporum canis CBS 113480]
  misc_feature (16)..(473): SWISSPROT Homolog: EC 2.7.8.5 CDP-diacylglycerol--glycerol-3-phosphate 3-phosphatidyltransferase
MLAPFTNEFDRIAPSFKIDGSQIQIITSPSDFYETLKAKIRHAKKRIFLSTLYIGKSEKELIATLQEALRNNPELNLSILTDALRGTRESPDPSCASLLAPLITEFGPDRVEIRMYHTPNLTGLRKKYIPKRINEGWGLQHMKLYGVDDEIILSGANLSEDYFTNRLDRYQLFTSKEITEYFYRLYQGVTSLSFRVEPSQEPAGFQLHWPSTNAAPSPLEHPKKYISKSTALISKLISLGKAQTKSITNDTSKKDTTVYMLGQLSQLMRPNSSTELPVVTHLLKTLAEPQYSNSSWTFTAGYFNPDPSLRNLLLSTASQNNTVITASPWANGFYGSKGVSGMLPGAYTYLARKFLREVHQRNRDSSIVLKEWRKGTVGEPGAWTYHAKGLWVTLPGDTGPSMSIIGSSNYTKRSYSHDLEAGALIVTENENLKKRLRAEQEALQDRAKPVTLDEFSSTERRVGLHIRISMLIVTLVGGAL

SEQ ID NO: 38042 - DNA, 3169 bp, Muscodor strobelii
  misc_feature: SGI EST ID NO. CUFF.91420.1
  misc_feature: Variant of the nucleotide sequence at SEQ ID NO 38040
gcggtatggttttacggcatgaaagagtcaagatgcgtaatggctgggacgtatgggtgacagccttagtacaatatgctgatatttcatgagccaaatataatgagggcctgcctgttaagctgcccagatttgcttcaactctggacacatctccatatcggcagatagagagatacagctagcctttggtaacgagttcttgaatttgggcctaataatatgtacaagcttgcgcgcgaatgctcttctctctctattttctaggaacggcagtaggttcccatgcggtgatcttggatttgacactggaagcgtgttagcattggcttcccttccagcgacagcatcgaagtgttacgcacgtgctgtagggcttgtaagctccacgggtctgggtgtaattggggatgctcttgggatcggcatcctcccaggccttgcgcttgtactggaggagggggtcttcggtcgggggcttgtcgacggcgtaggacatccatgcgtgccagccgggctcgatctgggcgctaaattgcgacggaaggttagtaggatgttgggatatgccgtttgttacatcgtgacgtacgcatcgaagtcgtggaccttgtagtcaacccatctcgttcgcactagacgcaataagcatgatgtcctccagatattcccaatggtagacgtacggggtagatcctcgttgttctcaaagtatttgttgccgaagcggtcggtgccgatcagggttccggccttggtatcacctggagcacatgagtcacttgttcattcgttcattcagtactggaagtcatgtcgtcgcataccgatgtactgaagatcgcacgtcgggggttagcagagcttcggaggcgatcgcagcgtgtcgtcgaggggttaaacgtacttgcatctggcgccaggcatcctgtcgtcgcagaagaggttaggatagcgcagtttggcgggacttaagtgcactcactctgacgccgaccttccagaggttctggagggtgcgcgtgatggtcgacatggtgggcgcaagtcaattggggtgcccactgggtgtgatacgcttcgaatgttggtgatgtcgggaagcttcaattggtagaggagctctagattcatcaatcgaggtgatctctgccctgcgaatgcattagcttgtatctatcgatatatgtgcagctagccagtcagtcagcagatagcgggggatatcacgttggccgtgcgggtcgtaggtacctttgtatcgaaatgacgattgatccatttaatccctgtcgtgaattcttggagaatctgggggatcttgacgccgtcataaatccaataaaacaatcaaggcaaagacattgatcggtgttgttgattgtcgcaacgcgagctcaattgctcgaaatgatcgtacggggtacaacaagatgctgtcgcgctatccggcccattatacagcgacaggcaccacaatatgcccgtcagacacgcagacggtactctatcccagcaagcccatcaccagcaggtagcccgacgagctctgccggcatgttggctcctttcaccaatgaattcgatcgcatcgcaccctcgttcaaaatcgacggctctcaaatccagatcataacatcgccctcggacttttacgagacgttgaaggccaaaatacggcatgcaaagaagcgcatattcctatcgacattgtatatcggcaagtcagagaaagagctgatcgcgacattacaggaggcccttcgcaacaatccggagctaaacctgagcattttgaccgatgctctacgtgggacacgagagtcgcctgatccatcatgcgcttctcttctcgcgcctctcatcacggaattcgggccggatcgggttgagattcggatgtaccacacgcccaacttgacaggcctacgaaagaaatacatacccaagcgcatcaacgagggatggggcttgcagcatatgaagctatatggagtcgatgacgagataatcctctcaggcgcgaatctctcggaggattatttcacaaatcgtctagatcgatatcagcttttcacctcgaaggaaatcaccgagtatttctataggttataccaaggtgttacttctcttagtttccgagtcgagccatcgcaggaacctgctggatttcagcttcattggccatcaacgaacgcggctccctctccacttgagcaccctaaaaagtatatctccaagtcaacggcactgatcagcaaactcatctctctgggcaaagctcagaccaaatcgatcacaaacgacacatcgaagaaagacacaacagtctacatgctcgggcagctctcacaattgatgaggcctaattcatcaacagagctacctgtcgtcacgcatcttctaaaaaccctagcggagccccaatactccaactcttcctggacattcacagcaggttatttcaacccagacccatcactcaggaacctactactatctacagcctcacaaaacaacaccgtcataaccgcgtcgccatgggccaatggcttctatggatcgaaaggagtatctggcatgttgcccggcgcatatacctacctagcaaggaaattcctacgagaggtacatcaacggaaccgagactcttccatcgtcctcaaagaatggcgtaagggtacagtcggtgaacctggagcctggacatatcacgccaaaggattatgggttacgttaccgggcgacactggcccttctatgagtatcatcggaagctctaactacaccaagcggagctactctcacgatctggaagcgggtgctcttatcgtcaccgaaaatgagaatttgaagaagaggctcagggccgaacaggaagcgctccaagatcgcgctaagcctgtcacgcttgacgagttctcgagcacggagagaagagttggacttcatattcgcatctcaatgctcatcgtgactttagttggaggtgcactatagagcattagacatggctaacccgcactgcacacatattaataagtgggagaagcggagatcacaatgtattgtactatatctgttcggccacaaaatacggctgagtgtacgatgtcacatagaagatacccgtcactagaattgaagctgtcacaaagtggcctaccta

SEQ ID NO: 38043 - DNA, 417 bp, Muscodor strobelii
  misc_feature: SGI cDNA ID NO. 573213
  misc_feature: Encodes the peptide sequence at SEQ ID NO 38044
atgtcgaccatcacgcgcaccctccagaacctctggaaggtcggcgtcagagatgcctggcgccagatgcaatacatcggtgataccaaggccggaaccctgatcggcaccgaccgcttcggcaacaaatactttgagaacaacgaggatctacccctgcgaacgagatgggttgactacaaggtccacgacttcgatgccgcccagatcgagcccggctggcacgcatggatgtcctacgccgtcgacaagcccccgaccgaagaccccctcctccagtacaagcgcaaggcctgggaggatgccgatcccaagagcatccccaattacacccagacccgtggagcttacaagccctacagcactgtcaaatccaagatcaccgcatgggaacctactgccgttcctagaaaatag

SEQ ID NO: 38044 - protein, 138 aa, Muscodor strobelii
  misc_feature: SGI Peptide ID NO. 573213
  misc_feature (32)..(132): Pfam Id: PF05071 Pfam Desc: NADH ubiquinone oxidoreductase subunit NDUFA12
  misc_feature (1)..(138): NCBI GI: 46130900 Blast Desc: FG09005.1 [Gibberella zeae PH-1]
  misc_feature (1)..(137): NCBI GI: 256728019 Blast Desc: [Nectria haematococca mpVI 77-13-4]
  misc_feature (1)..(137): NCBI GI: 212535608 Blast Desc: NADH-ubiquinone oxidoreductase subunit B17.2, [Penicillium marneffei ATCC 18224] gi|210070359|gb|EEA24449.1| NADH-ubiquinone oxidoreductase subunit B17.2, [Penicillium ATCC
  misc_feature (1)..(137): NCBI GI: 238844410 Blast Desc: NADH:ubiquinone oxidoreductase kD subunit [Microsporum canis CBS 113480]
  misc_feature (1)..(138): NCBI GI: 261359012 Blast Desc: NADH:ubiquinone oxidoreductase 13.4kD subunit [Verticillium albo-atrum VaMs.102]
  misc_feature (1)..(137): NCBI GI: 154270301 Blast Desc: NADH-ubiquinone oxidoreductase subunit B17.2 [Ajellomyces capsulatus NAm1] gi|150410020|gb|EDN05408.1| NADH-ubiquinone oxidoreductase subunit B17.2 [Ajellomyces NAm1]
  misc_feature (1)..(137): NCBI GI: 225557861 Blast Desc: NADH-ubiquinone oxidoreductase [Ajellomyces capsulatus G186AR]
  misc_feature (1)..(137): NCBI GI: 242793543 Blast Desc: NADH-ubiquinone oxidoreductase subunit B17.2, [Talaromyces stipitatus ATCC 10500] gi|218718773|gb|EED18193.1| NADH-ubiquinone oxidoreductase subunit B17.2, [Talaromyces ATCC
  misc_feature (1)..(137): NCBI GI: 261198479 Blast Desc: NADH-ubiquinone oxidoreductase subunit [Ajellomyces dermatitidis SLH14081] gi|239594793|gb|EEQ77374.1| NADH-ubiquinone oxidoreductase subunit [Ajellomyces dermatitidis
  misc_feature (1)..(137): NCBI GI: 240109084 Blast Desc: NADH:ubiquinone oxidoreductase 17.2 kD subunit family protein [Coccidioides posadasii C735 delta SOWgp]
MSTITRTLQNLWKVGVRDAWRQMQYIGDTKAGTLIGTDRFGNKYFENNEDLPLRTRWVDYKVHDFDAAQIEPGWHAWMSYAVDKPPTEDPLLQYKRKAWEDADPKSIPNYTQTRGAYKPYSTVKSKITAWEPTAVPRK

SEQ ID NO: 38045 - DNA, 2976 bp, Muscodor strobelii
  misc_feature: SGI EST ID NO. CUFF.91419.0
  misc_feature: Variant of the nucleotide sequence at SEQ ID NO 38043
taggtaggccactttgtgacagcttcaattctagtgacgggtatcttctatgtgacatcgtacactcagccgtattttgtggccgaacagatatagtacaatacattgtgatctccgcttctcccacttattaatatgtgtgcagtgcgggttagccatgtctaatgctctatagtgcacctccaactaaagtcacgatgagcattgagatgcgaatatgaagtccaactcttctctccgtgctcgagaactcgtcaagcgtgacaggcttagcgcgatcttggagcgcttcctgttcggccctgagcctcttcttcaaattctcattttcggtgacgataagagcacccgcttccagatcgtgagagtagctccgcttggtgtagttagagcttccgatgatactcatagaagggccagtgtcgcccggtaacgtaacccataatcctttggcgtgatatgtccaggctccaggttcaccgactgtacccttacgccattctttgaggacgatggaagagtctcggttccgttgatgtacctctcgtaggaatttccttgctaggtaggtatatgcgccgggcaacatgccagatactcctttcgatccatagaagccattggcccatggcgacgcggttatgacggtgttgttttgtgaggctgtagatagtagtaggttcctgagtgatgggtctgggttgaaataacctgctgtgaatgtccaggaagagttggagtattggggctccgctagggtttttagaagatgcgtgacgacaggtagctctgttgatgaattaggcctcatcaattgtgagagctgcccgagcatgtagactgttgtgtctttcttcgatgtgtcgtttgtgatcgatttggtctgagctttgcccagagagatgagtttgctgatcagtgccgttgacttggagatatactttttagggtgctcaagtggagagggagccgcgttcgttgatggccaatgaagctgaaatccagcaggttcctgcgatggctcgactcggaaactaagagaagtaacaccttggtataacctatagaaatactcggtgatttccttcgaggtgaaaagctgatatcgatctagacgatttgtgaaataatcctccgagagattcgcgctggtctcatggttagccctcccagcattcaatacggtcgtcgttgagatcataccctgagaggattatctcgtcatcgactccatatagcttcatatgctgcaagccccatccctcgttgatgcgcttgggtatgtatttctttcgtaggcctgtcaagttgggcgtgtggtacatccgaatctcaacccgatccggcccgaattccgtgatgagaggcgcgagaagagaagcgcatgatggatcaggcgactctcgtgtcccacgtagagcatcggtcaaaatgctcaggtttagctccggattgttgcgaagggcctcctgtaatgtcgcgatcttatacttggtcagccagtgcacgtgattgtcgcacttgggtatgatattgcttaccagctctttctctgacttgccgatatacaatgtcgataggaatatgcgcttctttgcatgccgtattttggcctaacccatcagaattagtagatgtgttggtcgcttttgggcagatgagctggtgtgccttcaacgtctcgtaaaagtccgagggcgatgttatgatctggatttgagagccgtcgattttgaacgagggtgcgatgcgatcgaattcattggtgaaaggagccaacatgccggcagagctcgtcgggctacctgctggtgatgggcttgctgggatagagtaccgtctgcgtgtctgacgggcatattgtggtgcctgtcgctgtataatgggccggatagcgcgacagcatcttgttgtaccccgtacgatcatttcgagcaattgagctcgcgttgcgacaatcaacaacaccgatcaatgtctttgccttgattgttttattggatttatgacggcgtcaagatcccccagattctccaagaattcacgacagggattaaatggatcaatcgtcatttcgatacaaaggtacctacgacccgcacggccaacgtgatatcccccgctatctgctgactgactggctagctgcacatatatcgatagatacaagctaatgcattcgcagggcagagatcacctcgattgatgaatctagagctcctctaccaattgaagcttcccgacatcaccaacattcgaagcgtatcacacccagtgggcaccccaattgacttgcgcccaccatgtcgaccatcacgcgcaccctccagaacctctggaaggtcggcgtcagagatgcctggcgccagatgcaatacatcggtgataccaaggccggaaccctgatcggcaccgaccgcttcggcaacaaatactttgagaacaacgaggatctacccctgcgaacgagatgggttgactacaaggtccacgacttcgatgccgcccagatcgagcccggctggcacgcatggatgtcctacgccgtcgacaagcccccgaccgaagaccccctcctccagtacaagcgcaaggcctgggaggatgccgatcccaagagcatccccaattacacccagacccgtggagcttacaagccctacagcactgtcaaatccaagatcaccgcatgggaacctactgccgttcctagaaaatagagagagaagagcattcgcgcgcaagcttgtacatattattaggcccaaattcaagaactcgttaccaaaggctagctgtatctctctatctgccgatatggagatgtgtccagagttgaagcaaatctgggcagcttaacaggcaggccctcattatatttggctcatgaaatatcagcatattgtactaaggctgtcacccatacgtcccagccattacgcatcttgactctttcatgccgtaaaaccataccgc

SEQ ID NO: 38046 - DNA, 1071 bp, Muscodor strobelii
  misc_feature: SGI cDNA ID NO. 573214
  misc_feature: Encodes the peptide sequence at SEQ ID NO 38047
atggcgccgcttgtggagacctctcccaccgcgtctgatgagattttcatcaaaatcgaccctgacggagatctagagctccttgttggccacggggcaggctggccgaagcatcacttcattgtgtgctccaaggcactgtcgcgcaattcccctgtctttaaggccatgctgtacggcagcttctccgagtctaagaacaaacagacaccagcgaaagcctgggtggtagagcttccggaagacgatccctactcattggagatgctgctcagcaccatgcatggcagtttcgaaatcgatcccgtcctgacagctattggcgagagtggtgacgtcgactctctgtaccagctgactctcctcgtcgacaaatatgacctcgctaaacaattgcgaccctggacgagggagttcattgagccacgccttaacacattcgccacaaagaagcagagcttcaaaacttgcgacgagaccctcaagtggctctggatctcattcgtcattggcgaccgtgatctgttccaagccatgtcgggagccttcatcgtaacttgcgatgaacgctttggagatgaggatgatgaaagtactgaagcgacggttatccttccatctgggtttcctgagagaatcaagcaaatgcgacgagacgtcatagataattatctcgaggcactccgtattctactctctgaagcgaaggctcgtaatccaaaggagccctgcgagtggccccataaatccgagcgtagactgcttgacgtactcaaggaggttctcgaaagtcagtccctgtggccattgccatctacagacaaggtcactggaagcgcttgggacctgtctcataaggtctatgaggtcttcgaccgtctacacatgttcagcagattccctcagattgcgactgcacagggcaagcttatggatatccaagaagaggttgacgatgccctggacgagattacggatcgttacttccagaatcagcaggccttgaaatccggcttcaagggaagaaatgtcgccatccattggagaaagctattcaatctggactattga

SEQ ID NO: 38047 - protein, 356 aa, Muscodor strobelii
  misc_feature: SGI Peptide ID NO. 573214
  misc_feature (16)..(287): NCBI GI: 256724501 Blast Desc: NECHADRAFT_88143 [Nectria haematococca mpVI 77-13-4]
  misc_feature (17)..(287): NCBI GI: 39942070 Blast Desc: MGG_03115 [Magnaporthe grisea 70-15] gi|145015914|gb|EDK00404.1| MGG_03115 [Magnaporthe grisea 70-15]
  misc_feature (16)..(294): NCBI GI: 261353831 Blast Desc: conserved [Verticillium albo-atrum VaMs.102]
  misc_feature (17)..(176): NCBI GI: 85085459 Blast Desc: NCU04437 [Neurospora crassa OR74A] gi|28918606|gb|EAA28278.1| [Neurospora crassa OR74A] gi|40882183|emb|CAF06009.1| related to nuclear pore protein
  misc_feature (7)..(193): NCBI GI: 116201353 Blast Desc: CHGG_08561 [Chaetomium globosum CBS 148.51] gi|88177079|gb|EAQ84547.1| CHGG_08561 [Chaetomium globosum CBS 148.51]
  misc_feature (17)..(202): NCBI GI: 154296228 Blast Desc: BC1G_12941 [Botryotinia fuckeliana B05.10] gi|150843505|gb|EDN18698.1| BC1G_12941 [Botryotinia fuckeliana B05.10]
  misc_feature (6)..(178): NCBI GI: 40882184 Blast Desc: [Neurospora crassa]
  misc_feature (7)..(187): NCBI GI: 170940282 Blast Desc: protein product [Podospora anserina]
  misc_feature (40)..(346): NCBI GI: 256721128 Blast Desc: [Nectria haematococca mpVI 77-13-4]
  misc_feature (17)..(190): NCBI GI: 39942748 Blast Desc: MGG_03454 [Magnaporthe grisea 70-15] gi|145009998|gb|EDJ94654.1| MGG_03454 [Magnaporthe grisea 70-15]
MAPLVETSPTASDEIFIKIDPDGDLELLVGHGAGWPKHHFIVCSKALSRNSPVFKAMLYGSFSESKNKQTPAKAWVVELPEDDPYSLEMLLSTMHGSFEIDPVLTAIGESGDVDSLYQLTLLVDKYDLAKQLRPWTREFIEPRLNTFATKKQSFKTCDETLKWLWISFVIGDRDLFQAMSGAFIVTCDERFGDEDDESTEATVILPSGFPERIKQMRRDVIDNYLEALRILLSEAKARNPKEPCEWPHKSERRLLDVLKEVLESQSLWPLPSTDKVTGSAWDLSHKVYEVFDRLHMFSRFPQIATAQGKLMDIQEEVDDALDEITDRYFQNQQALKSGFKGRNVAIHWRKLFNLDY

SEQ ID NO: 38048 - DNA, 1098 bp, Muscodor strobelii
  misc_feature: SGI EST ID NO. CUFF.91172.0
  misc_feature: Variant of the nucleotide sequence at SEQ ID NO 38046
tgcttctcaatgtccttggagactggaagaagctgactcacctatatcttactccctcgtatcattgcccaggacggaggggggcagctctatcggcgccttgattgtatacactagctacgacgagtagtggcagattcattcacattgttcctgtggacaccgccatcagtgagagctgttgaaactagttgccgcctgccagccccccgcaccattcatcaccccattgacacccgggttactagcggcagaattatcggcactgttctcaacgggctcaccgcccaagcataagctgctcgaactgttgctccattgttccgccctccaatcacccgtgttaccgatggcacacggtatccccccccgccagcttcactgtccacgttgccacgtgaggttgccacatcaatgacactccgaccggccatgtaccttcgtacctctacatataaatacatccttctccccagcgtaatttcaagatcctccctctttctttcctctctccaaacctttccttacgcgcacgcctgcaactcgctctcaaagtctgcaggttcagaaccagtacataaacaccatttggcgctcgcgttaggttgcaattttcaatcatagacaattgttcacgattcttctgttcgacacggctctcttcggtgatcaaaatggcgccgcttgtggagacctctcccaccgcgtctgatgagattttcatcaaaatcgaccctgacggagatctagagctccttgttggccacggggcaggctggccgaagcatcacttcattgtgtgctccaaggcactgtcgcgcaattcccctgtctttaaggccatgctgtacggcagcttctccgagtctaagaacaaacagacaccagcgaaagcctgggtggtagagcttccggaagacgatccctactcattggagatgctgctcagcaccatgcatggcagtttcgaaatcgatcccgtcctgacagctattggcgagagtggtgacgtcgactctctgtaccagctgactctcctcgtcgacaaatatgacctcgctaaacaattgcgaccctggacgagggagttcattgagc

SEQ ID NO: 38049 - DNA, 903 bp, Muscodor strobelii
  misc_feature: SGI cDNA ID NO. 573215
  misc_feature: Encodes the peptide sequence at SEQ ID NO 38050
atgctgtacggcagcttctccgagtctaagaacaaacagacaccagcgaaagcctgggtggtagagcttccggaagacgatccctactcattggagatgctgctcagcaccatgcatggcagtttcgaaatcgatcccgtcctgacagctattggcgagagtggtgacgtcgactctctgtaccagctgactctcctcgtcgacaaatatgacctcgctaaacaattgcgaccctggacgagggagttcattgagccacgccttaacacattcgccacaaagaagcagagcttcaaaacttgcgacgagaccctcaagtggctctggatctcattcgtcattggcgaccgtgatctgttccaagccatgtcgggagccttcatcgtaacttgcgatgaacgctttggagatgaggatgatgaaagtactgaagcgacggttatccttccatctgggtttcctgagagaatcaagcaaatgcgacgagacgtcatagataattatctcgaggcactccgtattctactctctgaagcgaaggctcgtaatccaaaggagccctgcgagtggccccataaatccgagcgtagactgcttgacgtactcaaggaggttctcgaaagtcagtccctgtggccattgccatctacagacaaggtcactggaagcgcttgggacctgtctcataaggtctatgaggtcttcgaccgtctacacatgttcagcagattccctcagattgcgactgcacagggcaagcttatggatatccaagaagaggttgacgatgccctggacgagattacggatcgttacttccagaatcagcaggccttgaaatccggcttcaagggaagaaatgtcgccatccattggagaaagctattcaatctggactattga

SEQ ID NO: 38050 - protein, 300 aa, Muscodor strobelii
  misc_feature: SGI Peptide ID NO. 573215
  misc_feature (1)..(231): NCBI GI: 256724501 Blast Desc: NECHADRAFT_88143 [Nectria haematococca mpVI 77-13-4]
  misc_feature (1)..(238): NCBI GI: 261353831 Blast Desc: conserved [Verticillium albo-atrum VaMs.102]
  misc_feature (2)..(241): NCBI GI: 39942070 Blast Desc: MGG_03115 [Magnaporthe grisea 70-15] gi|145015914|gb|EDK00404.1| MGG_03115 [Magnaporthe grisea 70-15]
  misc_feature (1)..(120): NCBI GI: 85085459 Blast Desc: NCU04437 [Neurospora crassa OR74A] gi|28918606|gb|EAA28278.1| [Neurospora crassa OR74A] gi|40882183|emb|CAF06009.1| related to nuclear pore protein
  misc_feature (10)..(290): NCBI GI: 256721128 Blast Desc: [Nectria haematococca mpVI 77-13-4]
  misc_feature (1)..(137): NCBI GI: 116201353 Blast Desc: CHGG_08561 [Chaetomium globosum CBS 148.51] gi|88177079|gb|EAQ84547.1| CHGG_08561 [Chaetomium globosum CBS 148.51]
  misc_feature (1)..(122): NCBI GI: 40882184 Blast Desc: [Neurospora crassa]
  misc_feature (1)..(146): NCBI GI: 154296228 Blast Desc: BC1G_12941 [Botryotinia fuckeliana B05.10] gi|150843505|gb|EDN18698.1| BC1G_12941 [Botryotinia fuckeliana B05.10]
  misc_feature (19)..(130): NCBI GI: 170940283 Blast Desc: protein product [Podospora anserina]
  misc_feature (1)..(120): NCBI GI: 85085455 Blast Desc: NCU04436 [Neurospora crassa OR74A] gi|28918605|gb|EAA28277.1| [Neurospora crassa OR74A] gi|40882185|emb|CAF06011.1| [Neurospora crassa]
MLYGSFSESKNKQTPAKAWVVELPEDDPYSLEMLLSTMHGSFEIDPVLTAIGESGDVDSLYQLTLLVDKYDLAKQLRPWTREFIEPRLNTFATKKQSFKTCDETLKWLWISFVIGDRDLFQAMSGAFIVTCDERFGDEDDESTEATVILPSGFPERIKQMRRDVIDNYLEALRILLSEAKARNPKEPCEWPHKSERRLLDVLKEVLESQSLWPLPSTDKVTGSAWDLSHKVYEVFDRLHMFSRFPQIATAQGKLMDIQEEVDDALDEITDRYFQNQQALKSGFKGRNVAIHWRKLFNLDY

SEQ ID NO: 38051 - DNA, 780 bp, Muscodor strobelii
  misc_feature: SGI cDNA ID NO. 573216
  misc_feature: Encodes the peptide sequence at SEQ ID NO 38052
atgatggcgatcagggatgtatcccggagacttacgcaaagcggccaattaacagaagccaaggcgatgttaaatcgcttcgcccaagaaaatgcggattcgcagcgtctaaaccccttggtactgaatgcactcgggttattacatgatcaggaaggcaacacgatgcttgcgcttaacacccacaaaagcgtgctctgtgccgtggagtctgatgtaaacagtccggtattagtgtggacccagaatgaaatgggtaggatgtatagacacgcaaatgagttggagaactctgaggtcatgcataggaaggcattagaggtacttgaaacacaggtcccagcagtacaccctgagctgatatggacgttgaatactctgggttcaacgcttcggaagcaaggacgaccatcagaagcacttgttctccacaagagagcctatgatgcgaggagggatacattgggcgagaaccacccgcacacattgtggtccggtagcgatatcgccaaatgttatagagatgcaggcgaattagaagactcgctgaaatggtatcaaaggacattcgaagttcggcaatccctacttggacctgatcacccagacactttatggtctgcgaatgacataggttttgtttatgagagattggggcagaaggaggaagcaatcaagattcaaatgaccacacttgaggcccaggagagagttctcggtgtggatcatgcgcacacgaggtggactgagaacgtacttcggcagctcgctaactcgtag

SEQ ID NO: 38052 - protein, 259 aa, Muscodor strobelii
  misc_feature: SGI Peptide ID NO. 573216
  misc_feature (2)..(256): NCBI GI: 154316971 Blast Desc: BC1G_03903 [Botryotinia fuckeliana B05.10] gi|150845515|gb|EDN20708.1| BC1G_03903 [Botryotinia fuckeliana B05.10]
  misc_feature (2)..(249): NCBI GI: 156054868 Blast Desc: SS1G_06282 [Sclerotinia sclerotiorum 1980] gi|154704062|gb|EDO03801.1| SS1G_06282 [Sclerotinia sclerotiorum 1980]
  misc_feature (2)..(253): NCBI GI: 154320528 Blast Desc: BC1G_01736 [Botryotinia fuckeliana B05.10] gi|150853425|gb|EDN28617.1| BC1G_01736 [Botryotinia fuckeliana B05.10]
  misc_feature (42)..(253): NCBI GI: 115443450 Blast Desc: [Aspergillus terreus NIH2624] gi|114188401|gb|EAU30101.1| [Aspergillus terreus NIH2624]
  misc_feature (1)..(253): NCBI GI: 255934965 Blast Desc: Pc13g00600 [Penicillium chrysogenum Wisconsin 54-1255] gi|211583129|emb|CAP91129.1| Pc13g00600 [Penicillium chrysogenum Wisconsin 54-1255]
  misc_feature (42)..(259): NCBI GI: 218438775 Blast Desc: Tetratricopeptide TPR_2 repeat protein [Cyanothece sp. PCC 7424] gi|218171503|gb|ACK70236.1| Tetratricopeptide TPR_2 repeat protein [Cyanothece sp. PCC 7424]
  misc_feature (11)..(253): NCBI GI: 255934897 Blast Desc: Pc13g00220 [Penicillium chrysogenum Wisconsin 54-1255] gi|211583095|emb|CAP91091.1| Pc13g00220 [Penicillium chrysogenum Wisconsin 54-1255]
  misc_feature (17)..(253): NCBI GI: 255934967 Blast Desc: Pc13g00620 [Penicillium chrysogenum Wisconsin 54-1255] gi|211583130|emb|CAP91131.1| Pc13g00620 [Penicillium chrysogenum Wisconsin 54-1255]
  misc_feature (3)..(253): NCBI GI: 255934967 Blast Desc: Pc13g00620 [Penicillium chrysogenum Wisconsin 54-1255] gi|211583130|emb|CAP91131.1| Pc13g00620 [Penicillium chrysogenum Wisconsin 54-1255]
  misc_feature (1)..(253): NCBI GI: 255934967 Blast Desc: Pc13g00620 [Penicillium chrysogenum Wisconsin 54-1255] gi|211583130|emb|CAP91131.1| Pc13g00620 [Penicillium chrysogenum Wisconsin 54-1255]
MMAIRDVSRRLTQSGQLTEAKAMLNRFAQENADSQRLNPLVLNALGLLHDQEGNTMLALNTHKSVLCAVESDVNSPVLVWTQNEMGRMYRHANELENSEVMHRKALEVLETQVPAVHPELIWTLNTLGSTLRKQGRPSEALVLHKRAYDARRDTLGENHPHTLWSGSDIAKCYRDAGELEDSLKWYQRTFEVRQSLLGPDHPDTLWSANDIGFVYERLGQKEEAIKIQMTTLEAQERVLGVDHAHTRWTENVLRQLANS

SEQ ID NO: 38053 - DNA, 497 bp, Muscodor strobelii
  misc_feature: SGI EST ID NO. CUFF.91174.0
  misc_feature: Variant of the nucleotide sequence at SEQ ID NO 38051
aatgaccacacttgaggcccaggagagagttctcggtgtggatcatgcgcacacgaggtggactgagaacgtacttcggcagctcgctaactcgtagaaatgacgttaccatagtctacggcttggtgagattgtcgtggggggttgttgtgggctactctgagagttcggtagctctttcattctactgacttgaggtcacagttaatacgaagtctcaacgagtctaacctcgttgtcagatgtcacaaatgactatacatggattacacgaggtaaatttgagtccagcaagaaagactccgattaggcgtctaggagggaatcgcgttgtgcatctactctgaattcatcgagataaatagcacgaccagcttcaaaacaatgattacttgcttgccaaactgcttgcttttgttgagagcgtcttaaatctctacactgaggcttttagttcgtggttgctccttgtagaaattcccgttgtaatctctccg

SEQ ID NO: 38054 - DNA, 1032 bp, Muscodor strobelii
  misc_feature: SGI cDNA ID NO. 573217
  misc_feature: Encodes the peptide sequence at SEQ ID NO 38055
atggcgtgtatgataatacactctagcgccgaggagatccgccttagacacaaggcttctcgtgactcaactgctgcttatgtgttgcagcgagatttaagcacacacgtccaagtatgtgcgagctatgcagagcaaaatctgaaatgtaacatcgcaagcatcgtccctcgtgaatgcgcgttgactttctctatgttcttcgtgaatgagaggaagtacgagagcgcaatcacgatgctgaagaccgtactagagcttgagacgggcgagtccgatcttctcactgcaaacactgcaaagagatattcgtctcttacatttcgcagaatgaatcgccttcatgaggcagaggctatccaaaaggaggcagtacaggaattggaagatttaatacaaaacaccggttatgacgccgactgtgagcaagatataagaggtagtctgcttcgagcacaggccgagcttgccacgatttatcgagacatgaagagatttaccgatgcgcacaggcttcaaagtagcgtggtgaggcgaatgacaagtctttttggtcttgagtcgctcgagacactacacgaaatgtcgtgctttggaataatcatgcatcgaagcgataaactcaatgaggccgaagctctagaaagacaagttctcgatatttacgagaggaggtaccctgatcgaccagaattgctggacaagaaaagaaacctagccatcacgctgtatgctttgagccgatatgaagaggcaattgagatggagcgtcaagtgctagatgggaaacgcgagctgtatgggaaaggacacatcgaggtcgcgggagcgatgcacaatctcgcgacgagctacaaggatacaagacaatatgacaaggctgtcaaattgtttattgaggcccttgcgattcggaaacgtgtgcttggagattctcatcgggcaacacagaagacagatgtgaatctgcgcgaaacaaggctgcgatggcgcagggtagactcgggcatcggcggaatagaagcagcatga

SEQ ID NO: 38055 - protein, 343 aa, Muscodor strobelii
  misc_feature: SGI Peptide ID NO. 573217
  misc_feature (92)..(323): NCBI GI: 242787670 Blast Desc: kinesin light chain 1 and, [Talaromyces stipitatus ATCC 10500] gi|218721210|gb|EED20629.1| kinesin light chain 1 and, [Talaromyces stipitatus ATCC 10500]
  misc_feature (68)..(323): NCBI GI: 242787670 Blast Desc: kinesin light chain 1 and, [Talaromyces stipitatus ATCC 10500] gi|218721210|gb|EED20629.1| kinesin light chain 1 and, [Talaromyces stipitatus ATCC 10500]
  misc_feature (107)..(326): NCBI GI: 242795697 Blast Desc: kinesin, [Talaromyces stipitatus ATCC 10500] gi|218719233|gb|EED18653.1| kinesin, [Talaromyces stipitatus ATCC 10500]
  misc_feature (107)..(332): NCBI GI: 145241229 Blast Desc: An08g11610 [Aspergillus niger] gi|134077791|emb|CAK45831.1| protein product [Aspergillus niger]
  misc_feature (82)..(334): NCBI GI: 242799395 Blast Desc: kinesin, [Talaromyces stipitatus ATCC 10500] gi|218716714|gb|EED16135.1| kinesin, [Talaromyces stipitatus ATCC 10500]
  misc_feature (133)..(323): NCBI GI: 256729456 Blast Desc: NECHADRAFT_47331 [Nectria haematococca mpVI 77-13-4]
  misc_feature (150)..(334): NCBI GI: 242795697 Blast Desc: kinesin, [Talaromyces stipitatus ATCC 10500] gi|218719233|gb|EED18653.1| kinesin, [Talaromyces stipitatus ATCC 10500]
  misc_feature (82)..(334): NCBI GI: 242773172 Blast Desc: kinesin, [Talaromyces stipitatus ATCC 10500] gi|218721805|gb|EED21223.1| kinesin, [Talaromyces stipitatus ATCC 10500]
  misc_feature (68)..(335): NCBI GI: 116200362 Blast Desc: CHGG_10726 [Chaetomium globosum CBS 148.51] gi|88175440|gb|EAQ82908.1| CHGG_10726 [Chaetomium globosum CBS 148.51]
  misc_feature (149)..(326): NCBI GI: 242787670 Blast Desc: kinesin light chain 1 and, [Talaromyces stipitatus ATCC 10500] gi|218721210|gb|EED20629.1| kinesin light chain 1 and, [Talaromyces stipitatus ATCC 10500]
MACMIIHSSAEEIRLRHKASRDSTAAYVLQRDLSTHVQVCASYAEQNLKCNIASIVPRECALTFSMFFVNERKYESAITMLKTVLELETGESDLLTANTAKRYSSLTFRRMNRLHEAEAIQKEAVQELEDLIQNTGYDADCEQDIRGSLLRAQAELATIYRDMKRFTDAHRLQSSVVRRMTSLFGLESLETLHEMSCFGIIMHRSDKLNEAEALERQVLDIYERRYPDRPELLDKKRNLAITLYALSRYEEAIEMERQVLDGKRELYGKGHIEVAGAMHNLATSYKDTRQYDKAVKLFIEALAIRKRVLGDSHRATQKTDVNLRETRLRWRRVDSGIGGIEAA

SEQ ID NO: 38056 - DNA, 1895 bp, Muscodor strobelii
  misc_feature: SGI EST ID NO. CUFF.91181.0
  misc_feature: Variant of the nucleotide sequence at SEQ ID NO 38054
cctgtcaagtctgtgtctcgaactcggatatttgccactagcgattactcaggcggcctgctatatgaagtttcgaggcgtgcgtccagaacgctatttatctgagctgaaaagagcaccgaattgtgttctctcttgggaacctcagtggacaacatataaaaaatccgtgttcacagtttgggaaagctcaatggcatgcatagaaagtcaaaatcaatatgcgtatgactggtttcacctggcttgtttcttagacagaacggtccaacactcaatttttcagcgggcttgggaattcttacaagttcgaacgcatccctacactgctctgcaattcaattccttagactggttattcgcaacaacgctaaaagaatggtggaccgtattctacatggaaaatcagatctacgaccttgagcgtctgtctctcattaacgcgagttattcacatgaccaagtcacaatgacacattttcatcctttggtacagatttgggctcgcatgcgattatcacttcaacaacagaaacattatctcaagatggcgtgtatgataatacactctagcgccgaggagatccgccttagacacaaggcttctcgtgactcaactgctgcttatgtgttgcagcgagatttaagcacacacgtccaagtatgtgcgagctatgcagagcaaaatctgaaatgtaacatcgcaagcatcgtccctcgtgaatgcgcgttgactttctctatgttcttcgtgaatgagaggaagtacgagagcgcaatcacgatgctgaagaccgtactagagcttgagacgggcgagtccgatcttctcactgcaaacactgcaaagagatattcgtctcttacatttcgcagaatgaatcgccttcatgaggcagaggctatccaaaaggaggcagtacaggaattggaagatttaatacaaaacaccggttatgacgccgactgtgagcaagatataagaggtagtctgcttcgagcacaggccgagcttgccacgatttatcgagacatgaagagatttaccgatgcgcacaggcttcaaagtagcgtggtgaggcgaatgacaagtctttttggtcttgagtcgctcgagacactacacgaaatgtcgtgctttggaataatcatgcatcgaagcgataaactcaatgaggccgaagctctagaaagacaagttctcgatatttacgagaggaggtaccctgatcgaccagaattgctggacaagaaaagaaacctagccatcacgctgtatgctttgagccgatatgaagaggcaattgagatggagcgtcaagtgctagatgggaaacgcgagctgtatgggaaaggacacatcgaggtcgcgggagcgatgcacaatctcgcgacgagctacaaggatacaagacaatatgacaaggctgtcaaattgtttattgaggcccttgcgattcggaaacgtgtgcttggagattctcatcgggcaacacagaagacagatgtgaatctgcgcgaaacaaggctgcgatggcgcagggtagactcgggcatcggcggaatagaagcagcatgaaaatatggactagtcttaaggcttttgaataggcaagattcctcgtgccatacaccatgtgattgcattaagtgcgcaccacaactcgtgcacgattagaaagagagtgcagtgtggtaatcctcttcaatcttcccgggcgaagcagctgaaatggctgacaattgcggtcggggcagagcggtaaggatgcgaatggcactagctccaatgatctagtggcgctgcaccgcccttgtcagaggcagagcctgctgcatgccacataccgaaacttgcagaattgttaaccttaactagattccgctgcatggcg

SEQ ID NO: 38057 - DNA, 1941 bp, Muscodor strobelii
  misc_feature: SGI cDNA ID NO. 573218
  misc_feature: Elevated expression when VOC is produced
  misc_feature: Encodes the peptide sequence at SEQ ID NO 38058
atgcaaagaccagcccctgcatcacctcacatcgagctagagcaatggcaacgagtacatgcgcctttagtcggcctcttgagagacgaaatggaccgaaaaattgatgatttcatgagcaagactgggttggcagaaatggatcgacccatcatcatccgtggcgcctttcttgctcaagacagaggcaattttaaactatcgagccatgcaactgcgtctttctcagatccagatagtgactggaagaggaactccaagaacatctcttcgcttccccaagccaattcttattcgacgtatagcaacgagcacctcatcgacacagaaggcagggtcctcgttagcgaggaggaagaacaaagcttacgagttgaggctgaagatgtggtattcaaattcagattttggcagaagggcggaaacctctggaataaactgaagacttatccatggcctctgtactcggtcatcgtctgctgctctctgagtgctatggtccaggggctcgaccaaacaaccgtcaacggggcgcaggttttctatggcaaagcgttcggaataaatactgcaactagccttgaccagactgcgaagctgggcttggtgaatgctgcaccctacctttcgggagctatcgtatctctgttcaatcaaaagctcaataggctgtttcgtgggagacgactactgatattcgtgacctgtttgatatctttcgctacttgcctggggcaaggcgccacaaactcgtggtggaagctgctgatcgctaggctgttccttggagttggtattgggcctaaaaggtacaaagtcatgacctcgctgcgcaacaattcccacatatgcgagcgaatgcgccccgcccaattgcgcggggggcttgtcgcgatgtggcaggtttggactgccttcggaattgctctgggatatgccttcggtgcaggattttggacgattgggggagagtgtcgagtggaaggcatcgtatcccttccttgcagttggaactggcgtctcatgttaggtgtaccggcgctgccaccaattgtcgtccttttattcgtcttcacgttgcccgaatctccgaggttcttgatccaacaggctaccaggatgagcaagatagatgacaaccacagtcgtcagaaagcccaaacttattatcaaaaggcctttgactctctgaagagactgaaccctacgagcctacaagcagctcgtgaactattcctgatattccattccatacaagaggaacaccacagctcttcgaacgccctaatcatattacaaaacatgtggaaacagaagcggtccttcagagctatcagagccagcctgatcgtcatgtttttccagcagtattgcggaatgaatgttcttacgaactattcggacactatcgttcaattgcaaaaacggaagagggtgtatttcgaggcgtcggacggccctgaaccattttatttttcacttggtttcggtatcctgaactggctttcctcgatcccggccctcttcttgatggatacaatagctggcaaggtttatgcatccgagagcataccccatcatcaccgtgaccatggcatgggacttacaacatttgtcaactggatcttcaattttgttctgacaatatcgtggccattgctcgtacaaaggacatccgaaactattgctttcagctactatgcgggttgctacgtccgcgagaccaaaggagaaactctagaggggatggacagagtttttaatgcgccagactctattcacatgagatttgccatcctagagctgaagtggttctatacgagctacgtcaagcgacttttgaccttctgccttcaactaccgccggaaacgcgccccagaccgatattttcggagtacgtcaagcaatataggacagacaaaaagacatcagaaatttga

SEQ ID NO: 38058 - protein, 646 aa, Muscodor strobelii
  misc_feature: SGI Peptide ID NO. 573218
  misc_feature (157)..(587): Pfam Id: PF00083 Pfam Desc: Sugar (and other) transporter
  misc_feature (289)..(368): Pfam Id: PF00083 Pfam Desc: Sugar (and other) transporter
  misc_feature (157)..(267): Pfam Id: PF00083 Pfam Desc: Sugar (and other) transporter
  misc_feature (396)..(512): Pfam Id: PF00083 Pfam Desc: Sugar (and other) transporter
  misc_feature (151)..(612): NCBI GI: 121711607 Blast Desc: MFS sugar transporter, [Aspergillus clavatus NRRL 1] gi|119401570|gb|EAW11993.1| MFS sugar transporter, [Aspergillus clavatus NRRL 1]
  misc_feature (111)..(612): NCBI GI: 70986881 Blast Desc: MFS sugar transporter [Aspergillus fumigatus Af293] gi|66846557|gb|EAL86889.1| MFS sugar transporter, [Aspergillus fumigatus Af293]
  misc_feature (104)..(612): NCBI GI: 242810130 Blast Desc: MFS sugar transporter, [Talaromyces stipitatus ATCC 10500] gi|218716142|gb|EED15564.1| MFS sugar transporter, [Talaromyces stipitatus ATCC 10500]
  misc_feature (111)..(612): NCBI GI: 159123304 Blast Desc: MFS sugar transporter, [Aspergillus fumigatus A1163]
  misc_feature (95)..(612): NCBI GI: 238841654 Blast Desc: proton myo-inositol cotransporter [Microsporum canis CBS 113480]
  misc_feature (151)..(612): NCBI GI: 255943889 Blast Desc: Pc20g01530 [Penicillium chrysogenum Wisconsin 54-1255] gi|211587447|emb|CAP85482.1| Pc20g01530 [Penicillium chrysogenum Wisconsin 54-1255]
  misc_feature (73)..(612): NCBI GI: 212537133 Blast Desc: MFS sugar transporter, [Penicillium marneffei ATCC 18224] gi|210068464|gb|EEA22555.1| MFS sugar transporter, [Penicillium marneffei ATCC 18224]
  misc_feature (157)..(612): NCBI GI: 119483004 Blast Desc: MFS sugar transporter, [Neosartorya fischeri NRRL 181] gi|119409685|gb|EAW19633.1| MFS sugar transporter, [Neosartorya fischeri NRRL 181]
  misc_feature (151)..(606): NCBI GI: 164427957 Blast Desc: NCU01494 [Neurospora crassa OR74A] gi|157071952|gb|EAA26691.2| NCU01494 [Neurospora crassa OR74A]
  misc_feature (101)..(610): NCBI GI: 240107309 Blast Desc: Sugar transporter family protein [Coccidioides posadasii C735 delta SOWgp]
  misc_feature: Useful for introducing or modulating the production of volatile compounds
MQRPAPASPHIELEQWQRVHAPLVGLLRDEMDRKIDDFMSKTGLAEMDRPIIIRGAFLAQDRGNFKLSSHATASFSDPDSDWKRNSKNISSLPQANSYSTYSNEHLIDTEGRVLVSEEEEQSLRVEAEDVVFKFRFWQKGGNLWNKLKTYPWPLYSVIVCCSLSAMVQGLDQTTVNGAQVFYGKAFGINTATSLDQTAKLGLVNAAPYLSGAIVSLFNQKLNRLFRGRRLLIFVTCLISFATCLGQGATNSWWKLLIARLFLGVGIGPKRYKVMTSLRNNSHICERMRPAQLRGGLVAMWQVWTAFGIALGYAFGAGFWTIGGECRVEGIVSLPCSWNWRLMLGVPALPPIVVLLFVFTLPESPRFLIQQATRMSKIDDNHSRQKAQTYYQKAFDSLKRLNPTSLQAARELFLIFHSIQEEHHSSSNALIILQNMWKQKRSFRAIRASLIVMFFQQYCGMNVLTNYSDTIVQLQKRKRVYFEASDGPEPFYFSLGFGILNWLSSIPALFLMDTIAGKVYASESIPHHHRDHGMGLTTFVNWIFNFVLTISWPLLVQRTSETIAFSYYAGCYVRETKGETLEGMDRVFNAPDSIHMRFAILELKWFYTSYVKRLLTFCLQLPPETRPRPIFSEYVKQYRTDKKTSEI

SEQ ID NO: 38059 - DNA, 2810 bp, Muscodor strobelii
  misc_feature: SGI EST ID NO. CUFF.91294.2
  misc_feature: Variant of the nucleotide sequence at SEQ ID NO 38057
gctgtttcagccatcctaaacaaagcacgcattctatatctcccatcgtagtcatccgaccctctactgtgttctgtcagccacgtcacgaatctcccgttctgtcggcctcagatcttacaatgcaaagaccagcccctgcatcacctcacatcgagctagagcaatggcaacgagtacatgcgcctttagtcggcctcttgagagacgaaatggaccgaaaaattgatgatttcatgagcaagactgggttggcagaaatggatcgacccatcatcatccgtggcgcctttcttgctcaagacagaggcaattttaaactatcgagccatgcaactgcgtctttctcagatccagatagtgactggaagaggaactccaagaacatctcttcgcttccccaagccaattcttattcgacgtatagcaacgagcacctcatcgacacagaaggcagggtcctcgttagcgaggaggaagaacaaagcttacgagttgaggctgaagatgtggtattcaaattcagattttggcagaagggcggaaacctctggaataaactgaagacttatccatggcctctgtactcggtcatcgtctgctgctctctgagtgctatggtccaggggctcgaccaaacaaccgtcaacggggttagatcagtttaactactcacacttttatagcgcaggttttctatggcaaagcgttcggaataaatactgcaactagccttgaccagactgcgaagctgggcttggtgaatgctgcaccctacctttcgggagctatcgtatctctgttcaatcaaaagctcaataggctgtttcgtgggagacgactactgatattcgtgacctgtttgatatctttcgctacttgcctggggcaaggcgccacaaactcgtggtggaagctgctgatcgctaggctgttccttggagttggtattgggcctaaaagcgcaacaattcccacatatgcgagcgaatgcgccccgcccaattgcgcggggggcttgtcgcgatgtggcaggtttggactgccttcggaattgctctgggatatgccttcggtgcaggattttggacgattgggggagagtgtcgagtggaaggcatcgtatcccttccttgcagttggaactggcgtctcatgttaggtgtaccggcgctgccaccaattgtcgtccttttattcgtcttcacgttgcccgaatctccgaggttcttgatccaacaggctaccaggatgagcaagatagatgacaaccacagtcgtcagaaagcccaaacttattatcaaaaggcctttgactctctgaagagactgaaccctacgagcctacaagcagctcgtgaactattcctgatattccattccatacaagaggaacaccacagctcttcgaacgccctaatcatattacaaaacatgtggaaacagaagcggtccttcagagctatcagagccagcctgatcgtcatgtttttccagcagtattgcggaatgaatgttcttacgaactattcggacactatcgttcaattgcaaaaacggaagagggtgtatttcgaggcgtcggacggccctgaaccattttatttttcacttggtttcggtatcctgaactggctttcctcgatcccggccctcttcttgatggatacaataggtcggcggggtttgctccttttcacatttccttttctggctatattccaagcactgatggctgcaacggcatggataaatagtttcgctggacttgtgagctcgatgtatctgttctgcatcttctattctattggagaaggccctgttgcatttgtttatgcatccgagagcataccccatcatcaccgtgaccatggcatgggacttacaacatttgtcaactggatcttcaattttgttctgacaatatcgtggccattgctcgtacaaaggacatccgaaactattgctttcagctactatgcgggttggtgtgtcgttggaacaattctggtttacttctacgtccgcgagaccaaaggagaaactctagaggggatggacagagtttttaatgcgccagactctattcacatgagatttgccatcctagagctgaagtggttctatacgagctacgtcaagcgacttttgaccttctgccttcaactaccgccggaaacgcgccccagaccgatattttcggagtacgtcaagcaatataggacagacaaaaagacatcagaaatttgaagcacagatatcatactgattttcgaacggtagcatattcaggaccatgactatttgacacgagagcgcatattattttcatgggggctttagttattttggatgactattcctctatttttagggtcaaggcagtcccttcgggcttggttagcttcaaaacaaaagagaagaaaaaaagaagaaagaaaagaaggaaccagtaatattttcatgtcaacgagagctatgttcggagctcgtccgtctatgcctgcgacttatctatatttttctacgccacttagaattactttgccattcactttgacattctggcattccctatacttctcaagtcagttaaaatgacttggccgcgtaggaatgaaagccacacactacaatgctgaaaacaacacaatggtaccgtgtataaacataatagcatgaaaatgatggtgaaggacgcatacagtataggcaatgcacgccactagtaagcatggcagttggccttctgatatatgggttgtgctgaaattatagcgacattttgaggtcattgacaaaagtatctg

SEQ ID NO: 38060 - DNA, 579 bp, Muscodor strobelii
  misc_feature: SGI cDNA ID NO. 573219
  misc_feature: Elevated expression when VOC is produced
  misc_feature: Encodes the peptide sequence at SEQ ID NO 38061
atggcggactcaatctacccaggcaagaaggacaacatggagtcgaactggccccagcgagctctttacttcacgatatgtctcctcttcatcgctgaggtggtcgctgccagcatgtcgttgcacgatgtacctgcattgccatctttgatcggcaacacatttgtgtatactttcatgggcttcatttttggcttggttggcgctgtctggttcgctcttctgctcggaaccactttctaccgggttggccacaggaacacctaccttcgcaagattgtcgcacctctcgccgcagctattgtcaacttccagttctgcatttacggatgcatcttgatggccgtctatggcagccctctcctgactgctgcagtttatgcacaagccaacgaggacgctcactggacggcacaagttgctgactatgccggtcgcatgggctctactgaagctcaagaagtcttggtcgtactgattgttgctttcatccttggaagcgctagcttcgacttcttcactgccatcgttggtatcaccaagatcaacgagttctctcctggtaccagcatggtttaa

SEQ ID NO: 38061 - protein, 192 aa, Muscodor strobelii
  misc_feature: SGI Peptide ID NO. 573219
  misc_feature: Useful for introducing or modulating the production of volatile compounds
MADSIYPGKKDNMESNWPQRALYFTICLLFIAEVVAASMSLHDVPALPSLIGNTFVYTFMGFIFGLVGAVWFALLLGTTFYRVGHRNTYLRKIVAPLAAAIVNFQFCIYGCILMAVYGSPLLTAAVYAQANEDAHWTAQVADYAGRMGSTEAQEVLVVLIVAFILGSASFDFFTAIVGITKINEFSPGTSMV

SEQ ID NO: 38062 - DNA, 1243 bp, Muscodor strobelii
  misc_feature: SGI EST ID NO. CUFF.91264.0
  misc_feature: Variant of the nucleotide sequence at SEQ ID NO 38060
gtcgtgtcctttctcatcaccagaatggggctcttaagctagtctcgtagcgtcgaagtagtctatgtgcttggcttccattttaagcctccaagggtacatgctgactgtcgagatgtcttcaaagatctaggcaggccaaagggctcctggcataggcgaaatggctcctaggatctgtgatatttagataaccaccttgccgtgctacctcaccaattttttcatcattccaaaacatctcgataacaatcgctcatcatcacacctcgacggcgtcgactcgattcaatacaattcattcattggctggtaccacttcgtttcgaactcatctcaacgcaacgacaacaaggctttgacccaaagggcaatcaacagatacaatggcggactcaatctacccaggcaagaaggacaacatggagtcgaactggccccagcgagctctttacttcacgatatgtctcctcttcatcgctgaggtggtcgctgccagcatgtcgttgcacgatgtacctgcattgccatctttgatcggcaacacatttgtgtatactttcatgggcttcatttttggcttggttggcgctgtctggttcgctcttctgctcggaaccactttctaccgggttggccacaggaacacctaccttcgcaagattgtcgcacctctcgccgcagctattgtcaacttccagttctgcatttacggatgcatcttgatggccgtctatggcagccctctcctgactgctgcagtttatgcacaagccaacgaggacgctcactggacggcacaagttgctgactatgccggtcgcatgggctctactgaagctcaagaagtcttggtcgtactgattgttgctttcatccttggaagcgctagcttcgacttcttcactgccatcgttggtatcaccaagatcaacgagttctctcctggtaccagcatggtttaagcgggctggattggggttttcgcattaacaatggcgctttggcaatttgatttcacttttttggcccatttccactttttagattacgacccggaccatcggaatggtatagattcgatttttacaaatataccctaccccgtcgtagacattagacaccgtcatggctttacgaacaaagatctcagaacacctcagatagaaacttgattttagatccgcaggttgaaaaccaaaaccggccaaaaatagaacgagaattatatcttggatccagc

SEQ ID NO: 38063 - DNA, 483 bp, Muscodor strobelii
  misc_feature: SGI cDNA ID NO. 573220
  misc_feature: Encodes the peptide sequence at SEQ ID NO 38064
atggactatgacactgcaagacgcaagactgaagactctatcatgacaaagtcaattttctgggtctcgacgataagcgctatcacaatgggcgacgcgaaagcaaacactcaacctcccaagccgcaaaccgaatccgaaaagcaaggatactacgagtgggcgaagcagaaatatggcgagcaatacgaagcatggatgccgtggatcgaagaccatttcttgaagtacttcactaaagacaacaaagcaagctacgcaactcgagaacaactcaacaagaccaaggtcactggcgtcaagcaagtagacaacattcaggatggagtcaacaatctagtgactggccaggtcggccaaggtggtctacttcaacctgtcggcgatatgctgtcgagggaaggtgtcaaccgcgccgagcgacaaggcaaagatgataagggcggttatctaccttcaggtctccccggccttgggaaatga

SEQ ID NO: 38064 - protein, 160 aa, Muscodor strobelii
  misc_feature: SGI Peptide ID NO. 573220
  misc_feature (53)..(152): NCBI GI: 256724503 Blast Desc: NECHADRAFT_9659 [Nectria haematococca mpVI 77-13-4]
  misc_feature (53)..(159): NCBI GI: 46127035 Blast Desc: FG07895.1 [Gibberella zeae PH-1]
  misc_feature (51)..(148): NCBI GI: 189188404 Blast Desc: conserved [Pyrenophora tritici-repentis Pt-1C-BFP] gi|187972147|gb|EDU39646.1| conserved [Pyrenophora tritici-repentis Pt-1C-BFP]
  misc_feature (53)..(152): NCBI GI: 116200768 Blast Desc: CHGG_10929 [Chaetomium globosum CBS 148.51] gi|88175643|gb|EAQ83111.1| CHGG_10929 [Chaetomium globosum CBS 148.51]
  misc_feature (42)..(150): NCBI GI: 145234833 Blast Desc: An03g01630 [Aspergillus niger] gi|134057739|emb|CAK38136.1| [Aspergillus niger]
  misc_feature (44)..(152): NCBI GI: 85090603 Blast Desc: NCU09277 [Neurospora crassa OR74A] gi|28919863|gb|EAA29260.1| [Neurospora crassa OR74A]
  misc_feature (42)..(150): NCBI GI: 242788441 Blast Desc: conserved [Talaromyces stipitatus ATCC 10500] gi|218721366|gb|EED20785.1| conserved [Talaromyces stipitatus ATCC 10500]
  misc_feature (45)..(150): NCBI GI: 119485827 Blast Desc: NFIA_099950 [Neosartorya fischeri NRRL 181] gi|119410412|gb|EAW20359.1| conserved [Neosartorya fischeri NRRL 181]
  misc_feature (43)..(150): NCBI GI: 154298439 Blast Desc: BC1G_11404 [Botryotinia fuckeliana B05.10] gi|150858000|gb|EDN33192.1| BC1G_11404 [Botryotinia fuckeliana B05.10]
  misc_feature (45)..(150): NCBI GI: 156042309 Blast Desc: SS1G_11705 [Sclerotinia sclerotiorum 1980] gi|154696088|gb|EDN95826.1| SS1G_11705 [Sclerotinia sclerotiorum 1980]
MDYDTARRKTEDSIMTKSIFWVSTISAITMGDAKANTQPPKPQTESEKQGYYEWAKQKYGEQYEAWMPWIEDHFLKYFTKDNKASYATREQLNKTKVTGVKQVDNIQDGVNNLVTGQVGQGGLLQPVGDMLSREGVNRAERQGKDDKGGYLPSGLPGLGK

SEQ ID NO: 38065 - DNA, 1002 bp, Muscodor strobelii
  misc_feature: SGI EST ID NO. CUFF.91404.2
  misc_feature: Variant of the nucleotide sequence at SEQ ID NO 38063
agccacccagtgacgtagttggagcgcgccacaccctccaccatcccttcctgacctgcacatgagagctactctcatggatagggtttgcatgccagagcgatcttaaggcgatgatgataaggctagcaaaacctgctgcgattgaagtaaagtgtgagatcatagtctgattgaaggagatagaaatgggacagcattcctctagcttttaaaatgatttaaccctctttgactatcccctccaaactctgcaactaggtcgcaacaactagaatacacttactccaattcctgctacttagaagcgctatcacaatgggcgacgcgaaagcaaacactcaacctcccaagccgcaaaccgaatccgaaaagcaaggatactacgagtgggcgaagcagaaatatggcgagcaatacgaagcatggatgccgtggatcgaagaccatttcttgaagtacttcactaaagacaacaaagcaagctacgcaactcgagaacaactcaacaagaccaaggtcactggcgtcaagcaagtagacaacattcaggatggagtcaacaatctagtgactggccaggtcggccaaggtggtctacttcaacctgtcggcgatatgctgtcgagggaaggtgtcaaccgcgccgagcgacaaggcaaagatgataagggcggttatctaccttcaggtctccccggccttgggaaatgaagaaggcgcccctacgattgacgagatatgatgatctatgacgagggattgcgaagttctactcccatacacacatgtacgagacgcgggttccatacacgacatatttttggtatgagcattcgggctggcaggccggcgtaaataggcaggattatcaatctggcgttgaagttataggtcagtgtttttgagaatcaggacatatgtatcaaagattggtcgatcctgctatttattcaaagaatatcaatgaattcatgatcaaagccatggacgacagttgcg

SEQ ID NO: 38066 - DNA, 3327 bp, Muscodor strobelii
  misc_feature: SGI cDNA ID NO. 573221
  misc_feature: Elevated expression when VOC is produced
  misc_feature: Encodes the peptide sequence at SEQ ID NO 38067
atgatccccgttgccttttcgcgcccggcgctggtcgccaaccatgcttctcctcgcgcgacacagcgtcttacgcagagggctgtctctcgcctcctagatctgacgccgcatgctgtccctgctgctccgacctgcattcgacgacagtggagcagtacccatgctaagcagccgactgtgctgccagctctaccgaaacatcaattttctgggaatcgaaacgctgcaagcagagtcattcctgtaacttcttattcgacagttgtagaatcactaccatcgatcccctacgcgaacttgactgttggtgtgcctcgcgagacgttcgccaatgaacgccgcgttgcaatctcaccccaaaatgtggctcttctgaaaaagaagggctttggtaaggtcataattgagcgcggtgctggcgtcgaagccgattttcacgatgaggcgtatgaaaaagctggcgctacactagtcgcgcccggcactgtttggggtgccgccgacatcgtgctgaaagtgcgcgggcccaacctaactgagatcgaccgcctgaaagagggtgctacgatcatctcaatgctgcagcccgcccagaacaaggatcttgtcgaacgccttgcagcgcgcaaagtgacatcattcgcgatggacatggtgccgcgcatctcgcgagctcaggtctttgacgcactgagctcaatggctaatatcgccggctacaaggccgttctcgaagcgtccaacaactttggtcgcttcttgactggccaggtcactgcagccggcaagattccgccatgcaaagttttggtcattggggctggtgttgctggattaagtgccatcgccactgcacgtagaatgggtgctattgtgagggggtttgacacccgatctgccgctcgagaacaagtgcagtctctaggtgctgagtttgtcgaggtcgaaattgaggaagatgggtctggagcaggcggctacgccaaggaaatgtctccagagtttatcgccgccgaaatgaagttgttcaaggaacaggctcaagaagtcgacataatcattacgaccgcattgatcccgggccgtccggctcccaaacttatcacgaaggatatgctcgatgtcatgaagccggggtcggttgttgtcgatttggcagcagaggctggtggcaattgcgagaagaccgaggctggaaaattggtcacttacaacgatgtcaagatcattggatatactgacttgccgtcgagattgcctacccagtcatctactttgtactcgaacaatatcgtgaagctgttattgtcaatggcaccgcaagacaagtcatttggaattgatctgagcgacgaagtcgttcgcgcctctattgtcactctcaatggcgaaattctccccactgcgccccggcccgctccgccaccagctccagcgcccaaagccgcccctaaagccgaagaagccgtagttgctctaactcccttccagaagacaacacgtgaagtagctggtgtcagcgcaggcatgggcacagctctcgctctcggcgcagtgactggacctgtctttatgggaaatgccttcacctttgctttagcttcgctcatcggatatcgtgttgtgtggggtgtgaccccagctttacactctccgctgatgagtgtgacaaatgctatttcagggatggttggtattggaggattcttcgtcatgggaggcggctatctgccaggaagtatccctcaagccctcggagctgcatctgttttactcgcattcgtcaacgtgtctggaggattcgttatcacaaaaagaatgctcgatatgttcaagaggccaactgacccgcctgagtatccctggctatgggccgttcctggtgttctattcggcggtggtttcttggctgctgcttctactggtgctactggacttgttcaagcaggatatctcgtcagctcgatcctgtgtattagctccctctctggtcttgcttctcagaccacggcgcggatgggtaacctgcttggtatcctcggtgtcggttctggtgtccttgcctcattattggcagttggctttagcccggaggttctcacccaatttggtacactcgctacaatcggtagtatcctcggtttcgtcattggaaaacggatcacacccacagacctcccccagacagtggctgcacttcattcggttgtcggtcttgcagccgtgctgacaagtattggcagtgtcatgggcggcctcgaccacatcactacgctgcatcttgtgacagcttacatgggcgtgctcatcggcggtatcacatttacaggatctctcgtcgccttcatgaaactcgcaggtagaatgtcttcgaaaccactcatttttcgcgggcgacatgccgtcaatggcggtatgctggctacgaatatcgccacgatgggggcatttgtgacaatggctcctggatcaccgatgattgctgcatgcgcactgggggccaacacaattctatccttcgccaaaggatttacgacaacgtctgctattggtggagccgatatgccggtggttatcaccgtgctcaacgcgtattccggatttgctcttgtagcagaaggatttatgttggagaatccgttactgacgaccgtcggcgctctcataggcgtgtctggttctatcctgtcatacatcatgtgtgttgcgatgaatcggtccttgacaaacgtcttgttcggcggtatagctgcgcccgctgcgacgacagagtacaaagtcgaaggatcaatcgtgcagactaatgtggaagatacagcagaagcccttgtcaacgcggagaatgtgatcatcgtggtgggatacggtatggcggttgccaaggcgcaatacgctatcagtgagataacgaagaatctgcgatcgaagaacatcaacgtgcgcttcgccattcatcctgttgctggtcgcatgcccggacaatgtaacgtgctcctagcagaagcgagcgtgccgtatgatattgtattggagatggatgagatcaatgatgacttcggtgacaccgacgtcacacttgttataggggcgaacgacactgtcaatccaattgcgctcgaaccaggaagccccattgcaggaatgccagttctccatgcctggaagagtaaacaggtcattgtcatgaagagaggaatggcttctggctatgctgatgtgcccaatccgatgttctacatgcccgggactaagatgttgttcggcgatgcaaaagtcacttgtgatgctatcaaatctgccgtcgagtctcgaacatcgtcatag

SEQ ID NO: 38067 - protein, 1108 aa, Muscodor strobelii
  misc_feature: SGI Peptide ID NO. 573221
  misc_feature (248)..(418): Pfam Id: PF01262 Pfam Desc: Alanine dehydrogenase/PNT, C-terminal domain
  misc_feature (104)..(239): Pfam Id: PF05222 Pfam Desc: Alanine dehydrogenase/PNT, N-terminal domain
  misc_feature (646)..(1102): Pfam Id: PF02233 Pfam Desc: NAD(P) transhydrogenase beta subunit
  misc_feature (266)..(314): Pfam Id: PF00107 Pfam Desc: Zinc-binding dehydrogenase
  misc_feature (28)..(1105): NCBI GI: 39972475 Blast Desc: conserved [Magnaporthe grisea 70-15] gi|145016736|gb|EDK01166.1| conserved [Magnaporthe grisea 70-15]
  misc_feature (8)..(1105): NCBI GI: 171693143 Blast Desc: protein product [Podospora anserina] gi|170946520|emb|CAP73321.1| protein product [Podospora anserina]
  misc_feature (94)..(1105): NCBI GI: 164426165 Blast Desc: NAD(P) transhydrogenase, mitochondrial precursor [Neurospora crassa OR74A] gi|157071223|gb|EAA31811.2| NAD(P) transhydrogenase, mitochondrial precursor [Neurospora crassa
  misc_feature (94)..(1096): NCBI GI: 16416047 Blast Desc: related to mitochondrial nicotinamide nucleotide transhydrogenase [Neurospora crassa]
  misc_feature (8)..(1096): NCBI GI: 256727858 Blast Desc: [Nectria haematococca mpVI 77-13-4]
  misc_feature (35)..(1105): NCBI GI: 212534854 Blast Desc: nicotinamide nucleotide transhydrogenase, [Penicillium marneffei ATCC 18224] gi|210069982|gb|EEA24072.1| nicotinamide nucleotide transhydrogenase, [Penicillium marneffei ATCC 18224]
  misc_feature (40)..(1105): NCBI GI: 242791342 Blast Desc: nicotinamide nucleotide transhydrogenase, [Talaromyces stipitatus ATCC 10500] gi|218718326|gb|EED17746.1| nicotinamide nucleotide transhydrogenase, [Talaromyces stipitatus ATCC 10500]
  misc_feature (93)..(1105): NCBI GI: 240109890 Blast Desc: NAD(P) transhydrogenase, mitochondrial precursor, [Coccidioides posadasii C735 delta SOWgp]
  misc_feature (77)..(1105): NCBI GI: 255956237 Blast Desc: Pc21g18800 [Penicillium chrysogenum Wisconsin 54-1255] gi|211590582|emb|CAP96777.1| Pc21g18800 [Penicillium chrysogenum Wisconsin 54-1255]
  misc_feature (93)..(1105): NCBI GI: 145233473 Blast Desc: An02g09810 [Aspergillus niger] gi|134057040|emb|CAK37849.1| protein product [Aspergillus niger]
  misc_feature (94)..(1103): SWISSPROT Homolog: EC 1.6.1.2 NAD(P)(+) transhydrogenase (AB-specific)
  misc_feature: Useful for introducing or modulating the production of volatile compounds
MIPVAFSRPALVANHASPRATQRLTQRAVSRLLDLTPHAVPAAPTCIRRQWSSTHAKQPTVLPALPKHQFSGNRNAASRVIPVTSYSTVVESLPSIPYANLTVGVPRETFANERRVAISPQNVALLKKKGFGKVIIERGAGVEADFHDEAYEKAGATLVAPGTVWGAADIVLKVRGPNLTEIDRLKEGATIISMLQPAQNKDLVERLAARKVTSFAMDMVPRISRAQVFDALSSMANIAGYKAVLEASNNFGRFLTGQVTAAGKIPPCKVLVIGAGVAGLSAIATARRMGAIVRGFDTRSAAREQVQSLGAEFVEVEIEEDGSGAGGYAKEMSPEFIAAEMKLFKEQAQEVDIIITTALIPGRPAPKLITKDMLDVMKPGSVVVDLAAEAGGNCEKTEAGKLVTYNDVKIIGYTDLPSRLPTQSSTLYSNNIVKLLLSMAPQDKSFGIDLSDEVVRASIVTLNGEILPTAPRPAPPPAPAPKAAPKAEEAVVALTPFQKTTREVAGVSAGMGTALALGAVTGPVFMGNAFTFALASLIGYRVVWGVTPALHSPLMSVTNAISGMVGIGGFFVMGGGYLPGSIPQALGAASVLLAFVNVSGGFVITKRMLDMFKRPTDPPEYPWLWAVPGVLFGGGFLAAASTGATGLVQAGYLVSSILCISSLSGLASQTTARMGNLLGILGVGSGVLASLLAVGFSPEVLTQFGTLATIGSILGFVIGKRITPTDLPQTVAALHSVVGLAAVLTSIGSVMGGLDHITTLHLVTAYMGVLIGGITFTGSLVAFMKLAGRMSSKPLIFRGRHAVNGGMLATNIATMGAFVTMAPGSPMIAACALGANTILSFAKGFTTTSAIGGADMPVVITVLNAYSGFALVAEGFMLENPLLTTVGALIGVSGSILSYIMCVAMNRSLTNVLFGGIAAPAATTEYKVEGSIVQTNVEDTAEALVNAENVIIVVGYGMAVAKAQYAISEITKNLRSKNINVRFAIHPVAGRMPGQCNVLLAEASVPYDIVLEMDEINDDFGDTDVTLVIGANDTVNPIALEPGSPIAGMPVLHAWKSKQVIVMKRGMASGYADVPNPMFYMPGTKMLFGDAKVTCDAIKSAVESRTSS

SEQ ID NO: 38068 - DNA, 4009 bp, Muscodor strobelii
  misc_feature: SGI EST ID NO. CUFF.91267.0
  misc_feature: Variant of the nucleotide sequence at SEQ ID NO 38066
ctggtggtcccctctccaattcctcgagaccttgagggacgcgctggccttttctctctttcatcaatctaaacgattgctattcgaggctgtttttgaccttgagacgagctgaccgactgtcgccatcagcacgtgttgctcacctcatgcttggtatgctccgaatgcgactggtggccctgcgaaggtgaagagatcctatagttgatctcggactgcatggccgcctgctgttaaaatccgctgttgctacgcctcttgctgttgtttccgacgccatgatccccgttgccttttcgcgcccggcgctggtcgccaaccatgcttctcctcgcgcgacacagcgtcttacgcagagggctgtctctcgcctcctagatctgacgccgcatgctgtccctgctgctccgacctgcattcgacgacagtggagcagtacccatgctaagcagccgactgtgctgccagctctaccgaaacatcaattttctgggaatcgaaacgctgcaagcagagtcattcctgtaacttcttattcgacagttgtagaatcactaccatcgatcccctacgcgaacttgactgttggtgtgcctcgcgagacgttcgccaatgaacgccgcgttgcaatctcaccccaaaatgtggctcttctgaaaaagaagggctttggtaaggtcataattgagcgcggtgctggcgtcgaagccgattttcacgatgaggcgtatgaaaaagctggcgctacactagtcgcgcccggcactgtttggggtgccgccgacatcgtgctgaaagtgcgcgggcccaacctaactgagatcgaccgcctgaaagagggtgctacgatcatctcaatgctgcagcccgcccagaacaaggatcttgtcgaacgccttgcagcgcgcaaagtgacatcattcgcgatggacatggtgccgcgcatctcgcgagctcaggtctttgacgcactgagctcaatggctaatatcgccggctacaaggccgttctcgaagcgtccaacaactttggtcgcttcttgactggccaggtcactgcagccggcaagattccgccatgcaaagttttggtcattggggctggtgttgctggattaagtgccatcgccactgcacgtagaatgggtgctattgtgagggggtttgacacccgatctgccgctcgagaacaagtgcagtctctaggtgctgagtttgtcgaggtcgaaattgaggaagatgggtctggagcaggcggctacgccaaggaaatgtctccagagtttatcgccgccgaaatgaagttgttcaaggaacaggctcaagaagtcgacataatcattacgaccgcattgatcccgggccgtccggctcccaaacttatcacgaaggatatgctcgatgtcatgaagccggggtcggttgttgtcgatttggcagcagaggctggtggcaattgcgagaagaccgaggctggaaaattggtcacttacaacgatgtcaagatcattggatatactgacttgccgtcgagattgcctacccagtcatctactttgtactcgaacaatatcgtgaagctgttattgtcaatggcaccgcaagacaagtcatttggaattgatctgagcgacgaagtcgttcgcgcctctattgtcactctcaatggcgaaattctccccactgcgccccggcccgctccgccaccagctccagcgcccaaagccgcccctaaagccgaagaagccgtagttgctctaactcccttccagaagacaacacgtgaagtagctggtgtcagcgcaggcatgggcacagctctcgctctcggcgcagtgactggacctgtctttatgggaaatgccttcacctttgctttagcttcgctcatcggatatcgtgttgtgtggggtgtgaccccagctttacactctccgctgatgagtgtgacaaatgctatttcagggatggttggtattggaggattcttcgtcatgggaggcggctatctgccaggaagtatccctcaagccctcggagctgcatctgttttactcgcattcgtcaacgtgtctggaggattcgttatcacaaaaagaatgctcgatatgttcaagaggccaactgacccgcctgagtatccctggctatgggccgttcctggtgttctattcggcggtggtttcttggctgctgcttctactggtgctactggacttgttcaagcaggatatctcgtcagctcgatcctgtgtattagctccctctctggtcttgcttctcagaccacggcgcggatgggtaacctgcttggtatcctcggtgtcggttctggtgtccttgcctcattattggcagttggctttagcccggaggttctcacccaatttggtacactcgctacaatcggtagtatcctcggtttcgtcattggaaaacggatcacacccacagacctcccccagacagtggctgcacttcattcggttgtcggtcttgcagccgtgctgacaagtattggcagtgtcatgggcggcctcgaccacatcactacgctgcatcttgtgacagcttacatgggcgtgctcatcggcggtatcacatttacaggatctctcgtcgccttcatgaaactcgcaggtagaatgtcttcgaaaccactcatttttcgcgggcgacatgccgtcaatggcggtatgctggctacgaatatcgccacgatgggggcatttgtgacaatggctcctggatcaccgatgattgctgcatgcgcactgggggccaacacaattctatccttcgccaaaggatttacgacaacgtctgctattggtggagccgatatgccggtggttatcaccgtgctcaacgcgtattccggatttgctcttgtagcagaaggatttatgttggagaatccgttactgacgaccgtcggcgctctcataggcgtgtctggttctatcctgtcatacatcatgtgtgttgcgatgaatcggtccttgacaaacgtcttgttcggcggtatagctgcgcccgctgcgacgacagagtacaaagtcgaaggatcaatcgtgcagactaatgtggaagatacagcagaagcccttgtcaacgcggagaatgtgatcatcgtggtgggatacggtatggcggttgccaaggcgcaatacgctatcagtgagataacgaagaatctgcgatcgaagaacatcaacgtgcgcttcgccattcatcctgttgctggtcgcatgcccggacaatgtaacgtgctcctagcagaagcgagcgtgccgtatgatattgtattggagatggatgagatcaatgatgacttcggtgacaccgacgtcacacttgttataggggcgaacgacactgtcaatccaattgcgctcgaaccaggaagccccattgcaggaatgccagttctccatgcctggaagagtaaacaggtcattgtcatgaagagaggaatggcttctggctatgctgatgtgcccaatccgatgttctacatgcccgggactaagatgttgttcggcgatgcaaaagtcacttgtgatgctatcaaatctgccgtcgagtctcgaacatcgtcatagatctttgcctaaactagaaactgctttcgcattggtcaggtttctcagcattatataccgcatactctgttttagatagagatcttgaatgcttgtcgctttgcatcttatatgtcggcccgtgatgcatgagagttctcggcgctttctacatgcactattttctagacgatgtcgcttatatccgctattggcttacagttatttgatcgatctagacggatgtgaggatacagcgctaggtcgtttcagatgacgtgatgtagcttgcgtgcaatgcaggatagagttgattgcaatgtaatctttctgctgagagaattcgatgagagatgtaagggtctttgtttctctccatatatctagatatcaatttcaatggatatcaaatcaactgggat

SEQ ID NO: 38069 - DNA, 3348 bp, Muscodor strobelii
  misc_feature: SGI cDNA ID NO. 573222
  misc_feature: Encodes the peptide sequence at SEQ ID NO 38070
atgatccccgttgccttttcgcgcccggcgctggtcgccaaccatgcttctcctcgcgcgacacagcgtcttacgcagagggctgtctctcgcctcctagatctgacgccgcatgctgtccctgctgctccgacctgcattcgacgacagtggagcagtacccatgctaagcagccgactgtgctgccagctctaccgaaacatcaattttctgggaatcgaaacgctgcaagcagagtcattcctgtaacttcttattcgacagttgtagaatcactaccatcgatcccctacgcgaacttgactgttggtgtgcctcgcgagacgttcgccaatgaacgccgcgttgcaatctcaccccaaaatgtggctcttctgaaaaagaagggctttggtaaggtcataattgagcgcggtgctggcgtcgaagccgattttcacgatgaggcgtatgaaaaagctggcgctacactagtcgcgcccggcactgtttggggtgccgccgacatcgtgctgaaagtgcgcgggcccaacctaactgagatcgaccgcctgaaagagggtgctacgatcatctcaatgctgcagcccgcccagaacaaggatcttgtcgaacgccttgcagcgcgcaaagtgacatcattcgcgatggacatggtgccgcgcatctcgcgagctcaggtctttgacgcactgagctcaatggctaatatcgccggctacaaggccgttctcgaagcgtccaacaactttggtcgcttcttgactggccaggtcactgcagccggcaagattccgccatgcaaagttttggtcattggggctggtgttgctggattaagtgccatcgccactgcacgtagaatgggtgctattgtgagggggtttgacacccgatctgccgctcgagaacaagtgcagtctctaggtgctgagtttgtcgaggtcgaaattgaggaagatgggtctggagcaggcggctacgccaaggaaatgtctccagagtttatcgccgccgaaatgaagttgttcaaggaacaggctcaagaagtcgacataatcattacgaccgcattgatcccgggccgtccggctcccaaacttatcacgaaggatatgctcgatgtcatgaagccggggtcggttgttgtcgatttggcagcagaggctggtggcaattgcgagaagaccgaggctggaaaattggtcacttacaacgatgtcaagatcattggatatactgacttgccgtcgagattgcctacccagtcatctactttgtactcgaacaatatcgtgaagctgttattgtcaatggcaccgcaagacaagtcatttggaattgatctgagcgacgaagtcgttcgcgcctctattgtcactctcaatggcgaaattctccccactgcgccccggcccgctccgccaccagctccagcgcccaaagccgcccctaaagccgaagaagccgtagttgctctaactcccttccagaagacaacacgtgaagtagctggtgtcagcgcaggcatgggcacagctctcgctctcggcgcagtgactggacctgtctttatgggaaatgccttcacctttgctttagcttcgctcatcggatatcgtgttgtgtggggtgtgaccccagctttacactctccgctgatgagtgtgacaaatgctatttcagggatggttggtattggaggattcttcgtcatgggaggcggctatctgccaggaagtatccctcaagccctcggagctgcatctgttttactcgcattcgtcaacgtgtctggaggattcgttatcacaaaaagaatgctcgatatgttcaagaggccaactgacccgcctgagtatccctggctatgggccgttcctggtgttctattcggcggtggtttcttggctgctgcttctactggtgctactggacttgttcaagcaggatatctcgtcagctcgatcctgtgtattagctccctctctggtcttgcttctcagaccacggcgcggatgggtaacctgcttggtatcctcggtgtcggttctggtgtccttgcctcattattggcagttggctttagcccggaggttctcacccaatttggtacactcgctacaatcggtagtatcctcggtttcgtcattggaaaacggatcacacccacagacctcccccagacagtggctgcacttcattcggttgtcggtcttgcagccgtgctgacaagtattggcagtgtcatgggcggcctcgaccacatcactacgctgcatcttgtgacagcttacatgggcgtgctcatcggcggtatcacatttacaggatctctcgtcgccttcatgaaactcgcaggtagaatgtcttcgaaaccactcatttttcgcgggcgacatgccgtcaatggcggtatgctggctacgaatatcgccacgatgggggcatttgtgacaatggctcctggatcaccgatgattgctgcatgcgcactgggggccaacacaattctatccttcgccaaaggatttacgacaacgtctgctattggtggagccgatatgccggtggttatcaccgtgctcaacgcgtattccggatttgctcttgtagcagaaggatttatgttggagaatccgttactgacgaccgtcggcgctctcataggcgtgtctggttctatcctgtcatacatcatgtgtgttgcgatgaatcggtccttgacaaacgtcttgttcggcggtatagctgcgcccgctgcgacgacagagtacaaagtcgaaggatcaatcgtgcagactaatgtggaagatacagcagaagcccttgtcaacgcggagaatgtgatcatcgtggtgggatacggtatggcggttgccaaggcgcaatacgctatcagtgagataacgaagaatctgcgatcgaagaacatcaacgtgcgcttcgccattcatcctgttgctggtcgcatgcccggacaatgtaacgtgctcctagcagaagcgagcgtgccgtatgatattgtattggagatggatgagatcaatgatgacttcggtgacaccgacgtcacacttgttataggggcgaacgacactgtcaatccaattgcgctcgaaccaggaagccccattgcaggaatgccagttctccatgcctggaagagtaaacaggtcattgtcatgaagagaggaatggcttctggctatgctgatgtgcccaatccgatgttctacatgcccgggactaagatgttgttcggcgatgcaaaagtcacttgtgatggtacgttaagcagtctgcccctcatacatccgatacaaccccatagccccgattactga

SEQ ID NO: 38070 - protein, 1115 aa, Muscodor strobelii
  misc_feature: SGI Peptide ID NO. 573222
  misc_feature (248)..(418): Pfam Id: PF01262 Pfam Desc: Alanine dehydrogenase/PNT, C-terminal domain
  misc_feature (104)..(239): Pfam Id: PF05222 Pfam Desc: Alanine dehydrogenase/PNT, N-terminal domain
  misc_feature (646)..(1102): Pfam Id: PF02233 Pfam Desc: NAD(P) transhydrogenase beta subunit
  misc_feature (266)..(314): Pfam Id: PF00107 Pfam Desc: Zinc-binding dehydrogenase
  misc_feature (98)..(1106): NCBI GI: 184186125 Blast Desc: NAD(P) transhydrogenase [Strongylocentrotus purpuratus] gi|115697801|ref|XP_001202943.1| : similar to Nicotinamide nucleotide transhydrogenase [Strongylocentrotus
  misc_feature (111)..(1102): NCBI GI: 156349276 Blast Desc: [Nematostella vectensis] gi|156208371|gb|EDO29891.1| [Nematostella vectensis]
  misc_feature (111)..(1102): NCBI GI: 156375124 Blast Desc: [Nematostella vectensis] gi|156216943|gb|EDO37869.1| [Nematostella vectensis]
  misc_feature (235)..(959): NCBI GI: 238503029 Blast Desc: nADP transhydrogenase, [Aspergillus flavus NRRL3357] gi|220691558|gb|EED47906.1| nADP transhydrogenase, [Aspergillus flavus NRRL3357]
  misc_feature (94)..(1096): NCBI GI: 224090423 Blast Desc: [Taeniopygia guttata]
  misc_feature (96)..(1096): NCBI GI: 260813695 Blast Desc: BRAFLDRAFT_115609 [Branchiostoma floridae] gi|229286850|gb|EEN57564.1| BRAFLDRAFT_115609 [Branchiostoma floridae]
  misc_feature (94)..(1096): NCBI GI: 189230300 Blast Desc: LOC100158572 [Xenopus (Silurana) tropicalis] gi|183985931|gb|AAI66246.1| LOC100158572 protein [Xenopus (Silurana) tropicalis]
  misc_feature (96)..(1095): NCBI GI: 66826971 Blast Desc: NAD+ transhydrogenase [Dictyostelium discoideum AX4] gi|60475176|gb|EAL73112.1| NAD+ transhydrogenase [Dictyostelium discoideum AX4]
  misc_feature (70)..(1096): NCBI GI: 47550793 Blast Desc: nicotinamide nucleotide transhydrogenase [Danio rerio] gi|42542857|gb|AAH66499.1| Nicotinamide nucleotide transhydrogenase [Danio rerio] gi|161611474|gb|AAI55746.1| [Danio
  misc_feature (94)..(1102): NCBI GI: 145513172 Blast Desc: [Paramecium tetraurelia strain d4-2] gi|124409850|emb|CAK75100.1| protein product [Paramecium tetraurelia]
  misc_feature (94)..(1096): SWISSPROT Homolog: EC 1.6.1.2 NAD(P)(+) transhydrogenase (AB-specific)
MIPVAFSRPALVANHASPRATQRLTQRAVSRLLDLTPHAVPAAPTCIRRQWSSTHAKQPTVLPALPKHQFSGNRNAASRVIPVTSYSTVVESLPSIPYANLTVGVPRETFANERRVAISPQNVALLKKKGFGKVIIERGAGVEADFHDEAYEKAGATLVAPGTVWGAADIVLKVRGPNLTEIDRLKEGATIISMLQPAQNKDLVERLAARKVTSFAMDMVPRISRAQVFDALSSMANIAGYKAVLEASNNFGRFLTGQVTAAGKIPPCKVLVIGAGVAGLSAIATARRMGAIVRGFDTRSAAREQVQSLGAEFVEVEIEEDGSGAGGYAKEMSPEFIAAEMKLFKEQAQEVDIIITTALIPGRPAPKLITKDMLDVMKPGSVVVDLAAEAGGNCEKTEAGKLVTYNDVKIIGYTDLPSRLPTQSSTLYSNNIVKLLLSMAPQDKSFGIDLSDEVVRASIVTLNGEILPTAPRPAPPPAPAPKAAPKAEEAVVALTPFQKTTREVAGVSAGMGTALALGAVTGPVFMGNAFTFALASLIGYRVVWGVTPALHSPLMSVTNAISGMVGIGGFFVMGGGYLPGSIPQALGAASVLLAFVNVSGGFVITKRMLDMFKRPTDPPEYPWLWAVPGVLFGGGFLAAASTGATGLVQAGYLVSSILCISSLSGLASQTTARMGNLLGILGVGSGVLASLLAVGFSPEVLTQFGTLATIGSILGFVIGKRITPTDLPQTVAALHSVVGLAAVLTSIGSVMGGLDHITTLHLVTAYMGVLIGGITFTGSLVAFMKLAGRMSSKPLIFRGRHAVNGGMLATNIATMGAFVTMAPGSPMIAACALGANTILSFAKGFTTTSAIGGADMPVVITVLNAYSGFALVAEGFMLENPLLTTVGALIGVSGSILSYIMCVAMNRSLTNVLFGGIAAPAATTEYKVEGSIVQTNVEDTAEALVNAENVIIVVGYGMAVAKAQYAISEITKNLRSKNINVRFAIHPVAGRMPGQCNVLLAEASVPYDIVLEMDEINDDFGDTDVTLVIGANDTVNPIALEPGSPIAGMPVLHAWKSKQVIVMKRGMASGYADVPNPMFYMPGTKMLFGDAKVTCDGTLSSLPLIHPIQPHSPDY

SEQ ID NO: 38071 - DNA, 4009 bp, Muscodor strobelii; identical to SEQ ID NO: 38068
  misc_feature: SGI EST ID NO. CUFF.91267.0
  misc_feature: Variant of the nucleotide sequence at SEQ ID NO 38069

SEQ ID NO: 38072 - DNA, 474 bp, Muscodor strobelii
  misc_feature: SGI cDNA ID NO. 573223
  misc_feature: Encodes the peptide sequence at SEQ ID NO 38073
atgccacgctatacccgctctcaggctgcctcccaggctactggagccaaccctccccccgctagcccacctaccggtctccccaacgccctcagcaccaagcttctcaagtgtagtgtcgcagggtgcaactttgatgccaatacccagaagggcatcgacgagcacgtgcgcaaagtgcatatcggcactaagtgcctatacccaggccccgaaggcgtttgtggctttgtccctgttgagggcaactcgttgccggaccatctcaagtccgcccaccctgttgttcaagtcggcaacaagtggaagtccgagtggccgaacgccccggagaagttcacggtggcctgcaaggacaagggcagcgcagagcgcaaccaggcgttctgccactaccaccactaccagctcaccatcaacaacgccgccgccaccgctgccgccgcactcctgctcctccacgatggtttttaa

SEQ ID NO: 38073 - protein, 157 aa, Muscodor strobelii
  misc_feature: SGI Peptide ID NO. 573223
MPRYTRSQAASQATGANPPPASPPTGLPNALSTKLLKCSVAGCNFDANTQKGIDEHVRKVHIGTKCLYPGPEGVCGFVPVEGNSLPDHLKSAHPVVQVGNKWKSEWPNAPEKFTVACKDKGSAERNQAFCHYHHYQLTINNAAATAAAALLLLHDGF

SEQ ID NO: 38074 - DNA, 999 bp, Muscodor strobelii
  misc_feature: SGI cDNA ID NO. 573224
  misc_feature: Elevated expression when VOC is produced
  misc_feature: Encodes the peptide sequence at SEQ ID NO 38075
atgaagctgtcactcgtcgctttctcgctcctggctgctctcgtcagcgcggctccgacgccaacagaggatggtcctctagaggctcgcaccgttgaaaaaagagcgaccatcactgatgcttgtaccgttggctactgcacacagaatggcggaaccactggcggcactggcggcactacgaccacggtaacgagcttggcccagttcactgctgctgtgcagtctgcaggaaaggccgtcgttgttctcaatggcaatctatccggtgcagtcaaggtcaacgtcacttcggacaaaaccattattggcaagaagggatccagcttgacaggtatcggtttgacgttgctcaacgtacaaaacgtcatcatccgtaaccttaagagctctctcgtccttgctgaatacggcgatgtcgtgactgtacaggcatccaagaacgtgtggattgattcgtgtgacttctcgggtgatctcagcgccggcaaagacgactacgacggcttaatcgacattgtccacgcttccgagtgggtcactgttagcaacgttaagatgcatgaccattggaagggcggccttgtcggccactctagcaacaaccacgatgaggatacgggccacctgcacgtcaccttcaccggagtctggtgggacgcaatcaacagccgcacgccgatgtatcgcttcggagaaggacatataatcaactcatatatttcgaacggcggcgacacatgcgtcaacacacgcgacgctgcgcagctccttattgagagtgtcgtattcgagtccgacccgaagaaggcaattttcagcaatgacagcaattatggtcctggctatgccgtcgtcagagatgtcgacctgggtggcagtgagaacctcgtcgaagccggaacgctcacatccgtgccctatagctacacgctccttggttccgccaaaaccaaggcatacgtcacggctaatgctggacaagtcctaactatttag

SEQ ID NO: 38075 - protein, 332 aa, Muscodor strobelii
  misc_feature: SGI Peptide ID NO. 573224
  misc_feature (79)..(264): Pfam Id: PF00544 Pfam Desc: Pectate lyase
  misc_feature (79)..(238): Pfam Id: PF00544 Pfam Desc: Pectate lyase
  misc_feature (3)..(330): NCBI GI: 67516919 Blast Desc: PEL_EMENI Pectate lyase precursor [Aspergillus nidulans FGSC A4] gi|3914273|sp|Q00645.1|PELA_EMENI RecName: Full=Pectate lyase; Flags: Precursor gi|452482|gb|AAA80568.1| A4]
  misc_feature (3)..(330): NCBI GI: 1084967 Blast Desc: PEL_EMENI Pectate lyase precursor [Aspergillus nidulans FGSC A4] gi|3914273|sp|Q00645.1|PELA_EMENI RecName: Full=Pectate lyase; Flags: Precursor gi|452482|gb|AAA80568.1| A4]
  misc_feature (3)..(330): NCBI GI: 169783612 Blast Desc: [Aspergillus oryzae RIB40] gi|238493445|ref|XP_002377959.1| pectate lyase precursor, [Aspergillus flavus NRRL3357] gi|83775012|dbj|BAE65135.1| protein
  misc_feature (20)..(330): NCBI GI: 133779825 Blast Desc: pectate lyase A precursor [Emericella nidulans]
  misc_feature (1)..(330): NCBI GI: 46116132 Blast Desc: FG03908.1 [Gibberella zeae PH-1]
  misc_feature (19)..(330): NCBI GI: 5453416 Blast Desc: AF156985_1 pectate lyase 2 [Colletotrichum gloeosporioides f. sp. malvae]
  misc_feature (1)..(330): NCBI GI: 261360945 Blast Desc: pectate lyase B [Verticillium albo-atrum VaMs.102]
  misc_feature (3)..(332): NCBI GI: 256728451 Blast Desc: polysaccharide lyase family 1 [Nectria haematococca mpVI 77-13-4]
  misc_feature (3)..(330): NCBI GI: 115402687 Blast Desc: pectate lyase precursor [Aspergillus terreus NIH2624] gi|114189266|gb|EAU30966.1| pectate lyase precursor [Aspergillus terreus NIH2624]
  misc_feature (1)..(330): NCBI GI: 256722474 Blast Desc: polysaccharide lyase family 1 [Nectria haematococca mpVI 77-13-4]
  misc_feature (20)..(330): SWISSPROT Homolog: EC 4.2.2.2 Pectate lyase
  misc_feature: Useful for introducing or modulating the production of volatile compounds
MKLSLVAFSLLAALVSAAPTPTEDGPLEARTVEKRATITDACTVGYCTQNGGTTGGTGGTTTTVTSLAQFTAAVQSAGKAVVVLNGNLSGAVKVNVTSDKTIIGKKGSSLTGIGLTLLNVQNVIIRNLKSSLVLAEYGDVVTVQASKNVWIDSCDFSGDLSAGKDDYDGLIDIVHASEWVTVSNVKMHDHWKGGLVGHSSNNHDEDTGHLHVTFTGVWWDAINSRTPMYRFGEGHIINSYISNGGDTCVNTRDAAQLLIESVVFESDPKKAIFSNDSNYGPGYAVVRDVDLGGSENLVEAGTLTSVPYSYTLLGSAKTKAYVTANAGQVLTI

SEQ ID NO: 38076 - DNA, 1397 bp, Muscodor strobelii
  misc_feature: SGI EST ID NO. CUFF.91280.0
  misc_feature: Variant of the nucleotide sequence at SEQ ID NO 38074
atcgacaaccagggagtccgttcccgattgacaagcctcaagctgggcaatgagggcatcactttcatgtacgaaagcagtcctggctccgagccagagtatctgtcggaaaaactcgacatgaagtcgactgggtcagcatttaagtacccgcggccatgccatgagcgtagaggctgaggatgccggagtctgtcacgttttcaagactcatcatagactgattcatctgacagggacattcgttcatgatgaagctgtcactcgtcgctttctcgctcctggctgctctcgtcagcgcggctccgacgccaacagaggatggtcctctagaggctcgcaccgttgaaaaaagagcgaccatcactgatgcttgtaccgttggctactgcacacagaatggcggaaccactggcggcactggcggcactacgaccacggtaacgagcttggcccagttcactgctgctgtgcagtctgcaggaaaggccgtcgttgttctcaatggcaatctatccggtgcagtcaaggtcaacgtcacttcggacaaaaccattattggcaagaagggatccagcttgacaggtatcggtttgacgttgctcaacgtacaaaacgtcatcatccgtaaccttaagagctctctcgtccttgctgaatacggcgatgtcgtgactgtacaggcatccaagaacgtgtggattgattcgtgtgacttctcgggtgatctcagcgccggcaaagacgactacgacggcttaatcgacattgtccacgcttccgagtgggtcactgttagcaacgttaagatgcatgaccattggaagggcggccttgtcggccactctagcaacaaccacgatgaggatacgggccacctgcacgtcaccttcaccggagtctggtgggacgcaatcaacagccgcacgccgatgtatcgcttcggagaaggacatataatcaactcatatatttcgaacggcggcgacacatgcgtcaacacacgcgacgctgcgcagctccttattgagagtgtcgtattcgagtccgacccgaagaaggcaattttcagcaatgacagcaattatggtcctggctatgccgtcgtcagagatgtcgacctgggtggcagtgagaacctcgtcgaagccggaacgctcacatccgtgccctatagctacacgctccttggttccgccaaaaccaaggcatacgtcacggctaatgctggacaagtcctaactatttagaggccttcacaatcttacgctagtctagatattggaaattagggaatgattgaatgaatgcaagaatatagagaggaagcaagatttctcagcccttcaatgcctagatttgtaagaaactactaccgaatcattacttatttccgt

SEQ ID NO: 38077 - DNA, 819 bp, Muscodor strobelii
  misc_feature: SGI cDNA ID NO. 573225
  misc_feature: Encodes the peptide sequence at SEQ ID NO 38078
atggaatcaggcaacttgcctgcgaatgtctccgcgactctgaaaggagtctcagtctcggaccaagactgccctttccttgcccttcctatcgagatcaaattcatgatctttgagactctcacggacacctatgaccttcagagactcgcgctatcctgtcgcaaactctacaatatcatcaagcaatcggagagtcagcttgccgccaagatcgtctttcacaacattccacaacgctaccgcccgctcgttgacctgaattatcaaatgcaagcagtcgtcaaagatttctttgtcaatggctttatctctgttgatccaggtgtggaagtcagagcacagctagccaacgttgtaccgtgggattcttcgacgtggcagttcattgtggccggcatttgcgccactttgacccataaggcattatccaatcccaatagccagtggcagtgttacgctcacattgccacttttaaagctgcacaatattgtctggaccttcattgcgtcgtcatgaactacgtcggctgcctcagcgacttggcattgagaaacgcgccgcttgccattcgccagtatggatatccgaattcggggctatctgaatctgaacatttcagattcgggaacgcattataccaattgcagtttatgtgctccttctgtgccttcaagcacttgaccgggtccgtccattccagggactacttcgattggacattgacgcacttctttagccgctctattccgtgggtccatggtcacatccatcaagttcttcggttgttggcacagcatgtacaggatggtaagtaa

SEQ ID NO: 38078 - protein, 272 aa, Muscodor strobelii
  misc_feature: SGI Peptide ID NO. 573225
  misc_feature (24)..(72): Pfam Id: PF00646 Pfam Desc: F-box domain
MESGNLPANVSATLKGVSVSDQDCPFLALPIEIKFMIFETLTDTYDLQRLALSCRKLYNIIKQSESQLAAKIVFHNIPQRYRPLVDLNYQMQAVVKDFFVNGFISVDPGVEVRAQLANVVPWDSSTWQFIVAGICATLTHKALSNPNSQWQCYAHIATFKAAQYCLDLHCVVMNYVGCLSDLALRNAPLAIRQYGYPNSGLSESEHFRFGNALYQLQFMCSFCAFKHLTGSVHSRDYFDWTLTHFFSRSIPWVHGHIHQVLRLLAQHVQDGK

SEQ ID NO: 38079 - DNA, 1731 bp, Muscodor strobelii
  misc_feature: SGI cDNA ID NO. 573226
  misc_feature: Encodes the peptide sequence at SEQ ID NO 38080
atgagtatggagaggctcgccaacatgccacaggctctgcgcccgatcatgtggggaatcgtctcggtggtatcattatttgctctatgggtgacaaagcaaatctttgacggcgtctccgctaggaggagattcatttccatgcgagcccgtggagttcccatcatggaaccctactcgaggctatggggacatctgccactgatgaaggcagttggagaacgatttccatctgatgcgcacccgacgtattccaacgtggaggttgtccaaaactggaggaaatattttccaactgcaacagagtgtccaccggttatctacattgatttatggccaatcatgccagagccgatggttttgatcacctctcctcagctcgcctcacaattgacgcaagaaacgccacagcccagacatcccatgttcaggtggtctctgaagccagtaactgatggtctagatattttgtctatgggtccagccgaccacaaactctggcgatctcgacttttcccgggattctcttctcgcaacctcggtgatcatctacctgcagtggcaataagtgatctgaactatcagatattaagaaccagccctttattggaagaagcagacgtattcgctaaagtcctgaaagagaaggctggcgaaaatgggaactggggcgacatgttcactttttacgacaaagccgttgccttgacctttgatgtgataactccattcacgaccggccatagaactcatgaacaaactggagcgcatgagccgatgctcgtgtcttttcgtgcgctccttaacttcgtcaaattcaacaacctgagaaatcgaatagcgcgctacacgcctgcatttaaaagcaaggtctcgtaccatgcgaaggtcatacgtgacgtcgtgtaccctcaaatcattgctcagctgaaatcctccaccaagcccagccatcacaagacagtggtagacatggcaatcaaagagatgaaagccagcaatcaaaacccagatacaacattcatcgacactgtgatcgccaatgtgaagatccttcttttcggcggtcatgacacaactgcacagactctatcttgggtattttatgaagcagtccagcacccagaagtactcgggaggcttcgtgaagaatacgatgaggtattaggccccgaccggatgcgtgcaaaggagacgcttctaggaaaatatcaaaagctcaatgaaatgcggtacacttctgcagtaatcaaagagacactgagattacactctccagcagcaagctttcggcaggtaaatcctaaatttcaactggttcaggatggaacgatctggccggtttggcaagatgctgtagtccagacagctccatccgcaatgcatatccgcacggacctgtggccacgagcgacagagtttgtaccagagcggttcttagtctcggaagaagacccgttgcatcctgtgaagaatgctttccgaccatttgaactgggtaacacgcgatgtctaggagaggaactcgcgatgatggagatgaagcttgcactcgtgctcactctgcgtgaattggacttcgactttaactatgaaaaatggaatgagattcagggcagcaacgacacgagaatggtaaatggtcagagggcatatcggagtggccagggaatgggatttattaagaacaatttgccggtgagagtgaaggtgcgcgcacaagatgtgtag

SEQ ID NO: 38080 - protein, 576 aa, Muscodor strobelii
  misc_feature: SGI Peptide ID NO. 573226
  misc_feature (56)..(556): Pfam Id: PF00067 Pfam Desc: Cytochrome P450
  misc_feature (342)..(427): Pfam Id: PF00067 Pfam Desc: Cytochrome P450
  misc_feature (451)..(528): Pfam Id: PF00067 Pfam Desc: Cytochrome P450
  misc_feature (20)..(575): NCBI GI: 238839665 Blast Desc: VerA [Microsporum canis CBS 113480]
  misc_feature (38)..(572): NCBI GI: 240275889 Blast Desc: sterigmatocystin biosynthesis P450 monooxygenase StcS [Ajellomyces capsulatus H143]
  misc_feature (19)..(566): NCBI GI: 154281857 Blast Desc: [Ajellomyces capsulatus NAm1] gi|150411920|gb|EDN07308.1| [Ajellomyces capsulatus NAm1]
  misc_feature (38)..(572): NCBI GI: 225563301 Blast Desc: sterigmatocystin biosynthesis P450 monooxygenase StcS [Ajellomyces capsulatus G186AR]
  misc_feature (16)..(529): NCBI GI: 239610541 Blast Desc: cytochrome P450 [Ajellomyces dermatitidis ER-3]
  misc_feature (22)..(573): NCBI GI: 115402821 Blast Desc: conserved [Aspergillus terreus NIH2624] gi|114189333|gb|EAU31033.1| conserved [Aspergillus terreus NIH2624]
  misc_feature (39)..(572): NCBI GI: 261354657 Blast Desc: cytochrome P450 4V3 [Verticillium albo-atrum VaMs.102]
  misc_feature (59)..(557): NCBI GI: 171677496 Blast Desc: protein product [Podospora anserina] gi|170936816|emb|CAP61474.1| protein product [Podospora anserina]
  misc_feature (3)..(569): NCBI GI: 156042896 Blast Desc: SS1G_11247 [Sclerotinia sclerotiorum 1980] gi|154695632|gb|EDN95370.1| SS1G_11247 [Sclerotinia sclerotiorum 1980]
  misc_feature (52)..(572): NCBI GI: 154301127 Blast Desc: BC1G_10536 [Botryotinia fuckeliana B05.10] gi|150856284|gb|EDN31476.1| BC1G_10536 [Botryotinia fuckeliana B05.10]
  misc_feature (117)..(532): SWISSPROT Homolog: EC 1.14.14.1 Unspecific monooxygenase
MSMERLANMPQALRPIMWGIVSVVSLFALWVTKQIFDGVSARRRFISMRARGVPIMEPYSRLWGHLPLMKAVGERFPSDAHPTYSNVEVVQNWRKYFPTATECPPVIYIDLWPIMPEPMVLITSPQLASQLTQETPQPRHPMFRWSLKPVTDGLDILSMGPADHKLWRSRLFPGFSSRNLGDHLPAVAISDLNYQILRTSPLLEEADVFAKVLKEKAGENGNWGDMFTFYDKAVALTFDVITPFTTGHRTHEQTGAHEPMLVSFRALLNFVKFNNLRNRIARYTPAFKSKVSYHAKVIRDVVYPQIIAQLKSSTKPSHHKTVVDMAIKEMKASNQNPDTTFIDTVIANVKILLFGGHDTTAQTLSWVFYEAVQHPEVLGRLREEYDEVLGPDRMRAKETLLGKYQKLNEMRYTSAVIKETLRLHSPAASFRQVNPKFQLVQDGTIWPVWQDAVVQTAPSAMHIRTDLWPRATEFVPERFLVSEEDPLHPVKNAFRPFELGNTRCLGEELAMMEMKLALVLTLRELDFDFNYEKWNEIQGSNDTRMVNGQRAYRSGQGMGFIKNNLPVRVKVRAQDV

SEQ ID NO: 38081 - DNA, 1454 bp, Muscodor strobelii
  misc_feature: SGI EST ID NO. CUFF.91289.0
  misc_feature: Variant of the nucleotide sequence at SEQ ID NO 38079
taaagtcctgaaagagaaggctggcgaaaatgggaactggggcgacatgttcactttttacgacaaagccgttgccttgacctttgatgtgataactccattcacgacgtaagtgtgctagtcaatggaataatccatttataatgcgcccctgctaataattgagtctgaagcggccatagaactcatgaacaaactggagcgcatgagccgatgctcgtgtcttttcgtgcgctccttaacttcgtcaaattcaacaacctgagaaatcgaatagcgcgctacacgcctgcatttaaaagcaaggtctcgtaccatgcgaaggtcatacgtgacgtcgtgtaccctcaaatcattgctcagctgaaatcctccaccaagcccagccatcacaagacagtggtagacatggcaatcaaagagatgaaagccagcaatcaaaacccagatacaacattcatcgacactgtgatcgccaatgtgaagatccttcttttcggcggtcatgacacaactgcacagactctatcttgggtattttatgaagcagtccagcacccagaagtactcgggaggcttcgtgaagaatacgatgaggtattaggccccgaccggatgcgtgcaaaggagacgcttctaggaaaatatcaaaagctcaatgaaatgcggtacacttctgcagtaatcaaagagacactgagattacactctccagcagcaagctttcggcaggtaaatcctaaatttcaactggttcaggatggaacgatctggccggtttggcaagatgctgtagtccagacagctccatccgcaatgcatatccgcacggacctgtggccacgagcgacagagtttgtaccagagcggttcttagtctcggaagaagacccgttgcatcctgtgaagaatgctttccgaccatttgaactgggtaacacgcgatgtctaggagaggaactcgcgatgatggagatgaagcttgcactcgtgctcactctgcgtgaattggacttcgactttaactatgaaaaatggaatgagattcagggcagcaacgacacgagaatggtaaatggtcagagggcatatcggagtggccagggaatgggatttattaagaacaatttgccggtgagagtgaaggtgcgcgcacaagatgtgtagcactccccccaagattggggtattcctcccctttgagcttcaactaaacagacgctgtcatggccatgacccaaagcactgtccagagaggaatgcatcattgggtaattatagatgacggaagcattgcatagagatataggtggacagaagttcataatatagtagctaacaaagcttcgaccttacagactcttgacggatgtatatatgctctttccaactactcagtttagacgtttactgctgtaatctgcacaaataagaacaactcaagctaagctcgg

SEQ ID NO: 38082 - DNA, 558 bp, Muscodor strobelii
  misc_feature: SGI cDNA ID NO. 573227
  misc_feature: Elevated expression when VOC is produced
  misc_feature: Encodes the peptide sequence at SEQ ID NO 38083
atgggtgtaacttggtccaacccgccgggagcccccgtcactaccgagcacccaagagatgcccttggcgacaacctcactataacaggtctggcttctgcgtttccagagcttcttgttgggcctgatgagctcagaaagtgggctgaggaactctatgcaccagatgcaccttggttacaaaagctcctcacagtcaatgcccaagccggtatcgaaactcgagccgttctgggctgctggaatgaccctatgtggaaggccccaacaccaccaacaatcgaagatgtccacgaagcattcgacaaatatgccccaccactgactgcgcaggcagcacgcaaggccttgctagaaagtggcatacccgcttcatcaatcacacatatggtgtccgtcacagcaaccaactgcaaatgtccgggatatgatcaccttgttgcgagagaattaggcatttcaggagacgcagaaagatcgctgatctcgggttcgggctgtgccggtggtctggccgcccttcgtgtcgcaaatagtgtaagtgacctaattcgttaa

SEQ ID NO: 38083 - protein, 185 aa, Muscodor strobelii
  misc_feature: SGI Peptide ID NO. 573227
  misc_feature (106)..(177): Pfam Id: PF00195 Pfam Desc: Chalcone and stilbene synthases, N-terminal domain
  misc_feature (1)..(181): NCBI GI: 145236447 Blast Desc: An06g00430 [Aspergillus niger] gi|134075325|emb|CAK44959.1| protein product [Aspergillus niger]
  misc_feature (13)..(177): NCBI GI: 116202099 Blast Desc: CHGG_08934 [Chaetomium globosum CBS 148.51] gi|88177452|gb|EAQ84920.1| CHGG_08934 [Chaetomium globosum CBS 148.51]
  misc_feature (26)..(177): NCBI GI: 197305162 Blast Desc: CHGG_08934 [Chaetomium globosum CBS 148.51] gi|88177452|gb|EAQ84920.1| CHGG_08934 [Chaetomium globosum CBS 148.51]
  misc_feature (26)..(177): NCBI GI: 85097336 Blast Desc: NCU04801 [Neurospora crassa OR74A] gi|28921918|gb|EAA31191.1| conserved [Neurospora crassa OR74A]
  misc_feature (26)..(177): NCBI GI: 211939441 Blast Desc: NCU04801 [Neurospora crassa OR74A] gi|28921918|gb|EAA31191.1| conserved [Neurospora crassa OR74A]
  misc_feature (26)..(177): NCBI GI: 212375055 Blast Desc: NCU04801 [Neurospora crassa OR74A] gi|28921918|gb|EAA31191.1| conserved [Neurospora crassa OR74A]
  misc_feature (28)..(175): NCBI GI: 171691442 Blast Desc: protein product [Podospora anserina] gi|170945669|emb|CAP71782.1| protein product [Podospora anserina]
  misc_feature (26)..(177): NCBI GI: 145614534 Blast Desc: MGG_04643 [Magnaporthe grisea 70-15] gi|145021441|gb|EDK05570.1| MGG_04643 [Magnaporthe grisea 70-15]
  misc_feature (25)..(177): NCBI GI: 154311997 Blast Desc: BC1G_06032 [Botryotinia fuckeliana B05.10] gi|150850682|gb|EDN25875.1| BC1G_06032 [Botryotinia fuckeliana B05.10]
  misc_feature (25)..(181): NCBI GI: 169612988 Blast Desc: SNOG_09622 [Phaeosphaeria nodorum SN15] gi|160702623|gb|EAT82887.2| SNOG_09622 [Phaeosphaeria nodorum SN15]
  misc_feature: Useful for introducing or modulating the production of volatile compounds
MGVTWSNPPGAPVTTEHPRDALGDNLTITGLASAFPELLVGPDELRKWAEELYAPDAPWLQKLLTVNAQAGIETRAVLGCWNDPMWKAPTPPTIEDVHEAFDKYAPPLTAQAARKALLESGIPASSITHMVSVTATNCKCPGYDHLVARELGISGDAERSLISGSGCAGGLAALRVANSVSDLIR

SEQ ID NO: 38084 - DNA, 744 bp, Muscodor strobelii
  misc_feature: SGI EST ID NO. CUFF.91316.0
  misc_feature: Variant of the nucleotide sequence at SEQ ID NO 38082
aaacagaacgaactatattaatgagcggataatctccaatcgttcaatgagatatctcacacaattctttgagatcatacagtctagcgtagacggtagtgccagttgccgaagttccttatcatttatcctgcaatcttgacttcctttgactgactaacatgggtgtaacttggtccaacccgccgggagcccccgtcactaccgagcacccaagagatgcccttggcgacaacctcactataacaggtctggcttctgcgtttccagagcttcttgttgggcctgatgagctcagaaagtgggctgaggaactctatgcaccagatgcaccttggttacaaaagctcctcacagtcaatgcccaagccggtatcgaaactcgagccgttctgggctgctggaatgaccctatgtggaaggccccaacaccaccaacaatcgaagatgtccacgaagcattcgacaaatatgccccaccactgactgcgcaggcagcacgcaaggccttgctagaaagtggcatacccgcttcatcaatcacacatatggtgtccgtcacagcaaccaactgcaaatgtccgggatatgatcaccttgttgcgagagaattaggcatttcaggagacgcagaaagatcgctgatctcgggttcgggctgtgccggtggtctggccgcccttcgtgtcgcaaatagtgtaagtgacctaattcgttaattattaaaaactagccctttgtttt

SEQ ID NO: 38085 - DNA, 1149 bp, Muscodor strobelii
  misc_feature: SGI cDNA ID NO. 573229
  misc_feature: Encodes the peptide sequence at SEQ ID NO 38086
atggccgcgccccttcaccgccaccaatcatcacttgaagtcatcctcaacttctcttcttcgcacccacctcccttgcagacggagctgcgcaaccatgctagtcgtagattccacgacatctgtcaacacttcgacacaggcctatccgtcgataactatagccgtcctcgccttgttcgttctacctatgaatgttcgctctctcaggaatctggagattacttcttacgctttttcttcaaagcggtcgatcttctaattgatgggagtgaacctattaatttcgaagatgtgcgcgccaagttctttgagtttgccgagtatctttttgacaacttcttcctgcctgtgaaagcttctaccaagaagactccacagccctccccagccttgcattctgcagtccaagaaacgcaaggtcgcagcgggcagcagtatgtcgggactggacctcgattgtcagttcttcggagggactgtcttatccgtgaccgtcaccgttgcgtgatttcgcggaagtttgatttctctgaagcaatcaaaaggtctcgggctccaggcggccctcaagacgatgaaggcaacttgatagcaaatgacccaattgagccggctccgctggaagtggcccatatcctaccacactccctcacgaaagcgaatgagagtggtgaactggatgcttccagacaatccgcacttgcaatacttgacatgttcgatgttggtgttgccgaactgattcgaggccctgagattgaccggccacgcaatgctcttacccttactcaagactttcatcaatatttcggtgattttcaggtttacttcgaacccgttcctcacagagaccatgtatatacgatcaaaacacacatatctggagacttcttcttccggccatcactacctttaactcgcgagctttacattactccggagagaacgatcgagcctccagcacctcgactgctagcgattcattgtgctattgcacgcatcctgcatctttcgggagctggtgaatatatcgataggatatatcgtgacatggaggaatatggtgtgcaggcggatgggtctacgccactaggtcgctttgtatctcttgctattagcaagcagagctcttctgtttgtacctag

SEQ ID NO: 38086 - protein, 382 aa, Muscodor strobelii
  misc_feature: SGI Peptide ID NO. 573229
  misc_feature (7)..(374): NCBI GI: 240107750 Blast Desc: CPC735_043730 [Coccidioides posadasii C735 delta SOWgp]
  misc_feature (8)..(374): NCBI GI: 119177157 Blast Desc: CIMG_07559 [Coccidioides immitis RS]
  misc_feature (6)..(374): NCBI GI: 119196283 Blast Desc: CIMG_02516 [Coccidioides immitis RS]
  misc_feature (4)..(373): NCBI GI: 240273104 Blast Desc: conserved [Ajellomyces capsulatus H143]
  misc_feature (6)..(374): NCBI GI: 240106703 Blast Desc: CPC735_014880 [Coccidioides posadasii C735 delta SOWgp]
  misc_feature (6)..(374): NCBI GI: 240111365 Blast Desc: CPC735_072000 [Coccidioides posadasii C735 delta SOWgp]
  misc_feature (3)..(371): NCBI GI: 225680687 Blast Desc: conserved [Paracoccidioides brasiliensis Pb03]
  misc_feature (4)..(381): NCBI GI: 238844088 Blast Desc: conserved [Microsporum canis CBS 113480]
  misc_feature (4)..(373): NCBI GI: 256722270 Blast Desc: NECHADRAFT_54350 [Nectria haematococca mpVI 77-13-4]
  misc_feature (16)..(382): NCBI GI: 238844939 Blast Desc: conserved [Microsporum canis CBS 113480]
MAAPLHRHQSSLEVILNFSSSHPPPLQTELRNHASRRFHDICQHFDTGLSVDNYSRPRLVRSTYECSLSQESGDYFLRFFFKAVDLLIDGSEPINFEDVRAKFFEFAEYLFDNFFLPVKASTKKTPQPSPALHSAVQETQGRSGQQYVGTGPRLSVLRRDCLIRDRHRCVISRKFDFSEAIKRSRAPGGPQDDEGNLIANDPIEPAPLEVAHILPHSLTKANESGELDASRQSALAILDMFDVGVAELIRGPEIDRPRNALTLTQDFHQYFGDFQVYFEPVPHRDHVYTIKTHISGDFFFRPSLPLTRELYITPERTIEPPAPRLLAIHCAIARILHLSGAGEYIDRIYRDMEEYGVQADGSTPLGRFVSLAISKQSSSVCT

SEQ ID NO: 38087 - DNA, 6352 bp, Muscodor strobelii
  misc_feature: SGI EST ID NO. CUFF.91811.0
  misc_feature: Variant of the nucleotide sequence at SEQ ID NO 38085
gtttgcttagtccccttttcaagcaccagctcacctcctactcctttgtgagtatgttataagcttccaccatctgggatttccaaggctgaacgaagaaaaaatggccgcgccccttcaccgccaccaatcatcacttgaagtcatcctcaacttctcttcttcgcacccacctcccttgcagacggagctgcgcaaccatgctagtcgtagattccacgacatctgtcaacacttcgacacaggcctatccgtcgataactatagccgtcctcgccttgttcgttctacctatgaatgttcgctctctcaggaatctggagattacttcttacgctttttcttcaaagcggtcgatcttctaattgatgggagtgaacctattaatttcgaagatgtgcgcgccaagttctttgagtttgccgagtatctttttgacaacttcttcctgcctgtgaaagcttctaccaagaagactccacagccctccccagccttgcattctgcagtccaagaaacgcaaggtcgcagcgggcagcagtatgtcgggactggacctcgattgtcagttcttcggagggactgtcttatccgtgaccgtcaccgttgcgtgatttcgcggaagtttgatttctctgaagcaatcaaaaggtctcgggctccaggcggccctcaagacgatgaaggcaacttgatagcaaatgacccaattgagccggctccgctggaagtggcccatatcctaccacactccctcacgaaagcgaatgagagtggtgaactggatgcttccagacaatccgcacttgcaatacttgacatgttcgatgttggtgttgccgaactgattcgaggccctgagattgaccggccacgcaatgctcttacccttactcaagactttcatcaatatttcggtgattttcaggtttacttcgaacccgttcctcacagagaccatgtatatacgatcaaaacacacatatctggagacttcttcttccggccatcactacctttaactcgcgagctttacattactccggagagaacgatcgagcctccagcacctcgactgctagcgattcattgtgctattgcacgcatcctgcatctttcgggagctggtgaatatatcgataggatatatcgtgacatggaggaatatggtgtgcaggcggatgggtctacgccactaggtcgctttgtatctcttgctattagcaagcagagctcttctgtttgtacctaggagtcagaacagtaagtgccagctttggggatgatgtggctaggaggggttcgcagaggaaaaccagagctttacacatgactcaatcggagcgattcgacatgcgggatataactccaaagactggcgtgacgggctttctgagaatgataccaagtgctcaaggctgagcttgaattatatccaaagtctatcatagcgacagcactgatgcatttagccatggcgactcccagattgtcgacaaggggcatatcgggttgcatgcaacataatgaattcacaactagaactagaaaagaccaaactgttcctagctagcgagctgcatagctaaaacgtaagctctctttcatttcctctagaatgcttctcgtataccgctcaccagctcttttatcagtatcacgtaaccatctgttccatcctgctcacatacaactcttgcagacggcgctgttcataggatgggcacgactgccagcacgccaggccataatgaaaggcacgaggaccttggcaatcctggtcttgcgggcagtcgacagctcttgatcggcccctcttgtatccttgctacatgctctggtccaccactgcatgcgactcaggtttccagcctcgagacggattggagaaacccaacgaccctgctcctggttgatcttgcggtattcgggccatgagacagcgacagccttctgttgggcctcggtggcgagcaggacttgggcaaggcgggcggggttggacagggtcatggctttgtcggcgtatcgctcgagttggcgtgaggtctcggtggcggacagatcgaaggcgtcgtgggcttgggtagcgaggccaaaggtgccatccgcgttggcccatcgttcaatatcgtccaatttgatggcggggaagccgacttctgccatggtgatggcgatgttcaagggctggtcgcgttccaaggcggcaaatgcgtcacgtatatcccatgcttggaccctgcaagtagacagataggtgatcagtacagtaaagacagagggagacagagggaaacagagccgagacgacaagttcgaacataccaggtagcctcgtcgaggatgctctcctagagctccttcggactggggcagaccacttggatggtcgcttgtctaccgggcggaacatggtccttgctgcaacgcgcacaagtcgcgacgatgctgactttgtaggtggcagggctccagaaaggaacctggttcttggtggcgctcatgatgtggcggccgagactgtttcctctgtacttgtgcaggattggatgtggttgctgagtgtgagataggcgacgacagtgaaaagcgtggaggtggatggggatatgggagtgggagtgggagagggaaagatggctggcggggtggaagggaaggcagtgactaattgcttatagtgcggagtggctgccacaaatcatctctctgtgtagaaatcgtaactttgcaatgcgctcctacccgacattaacgagaacaaaatcaactccttcctagcatacttggaaattgtagaatggaataatggtctagcacttgtacggtgcgaggctactgcgatcccggcggtcgcgatggtcccattatgatattccctgtcagcccacacacgcgttcctccttaccaacaggcatcgataactcaggccaggggagacgtgtcgcgacagcatcgccatcagccaccgatacgagatcgcgtctctacaatactgtgtgaggatagcgatgaattcaagatggtctcgatcgtgttcacactctttattgtccgcacagacgtttaagacctggatgtgagcacatgtatcttggacatgtctctggccagcctcgctactaccaagtcaactaggacatcccatttcacacccgacctctatatttgtataactctgggccgaccaccgactacatatgatgtccaccacggcacgaccataaaaacgcctcgtcccgcccagcctgcttctacttcctagtatgccgtttcatcacttcgcctcccgccaatcgcataatgttccccaagtatgcctgcagctatgtcgcagcagcatggtgtcctatactgctcgcctagtggttacagcagagctcgaggcctttccctacatgatggagtagggccttttagccaatcgattccagaagcgacagtcttcttgcagataggctggctggcatggctcagcttgtacgcagttcagcccgcgaggcagagcagagagaatccggttttcctgtttacatccgaatgagcagaccaacctactttgagccgattgaatgtgcttcctgtcatatctaccataactcacagtaacgagtccagatggctactcagcctcacacccataatgactatagtgtgggatggatctgcgcgctaccgaaggagcagactgcggctatcgcgatgcttgacgagagacatgacgacttgtctaaaccacagaatgaccacaatacgtacactctcggatccatccgcaaacacaacattgtcattgcctgcctcccaattggcaagattggcaccgtctccgcagcaacagttgccacacatatggttcacgcctttccgtctgtcaagttcggcttgatggtcggtataggtggaggcatccccccaaaagtcaggctcggtgatgttgtagttggcatcccgataggtcaatatccaggagtagtacagtgggatctggggaaagaagagaaaaatggaaagttcacacggactggctcgctgaataaccctcctggctccctcctgagtgccgtgtcgaagctacaatcagaacacgacttggcagaatcaaaaaataccgttctatctggatgatatagcgtcaaaatatcccaaattagcattgaaatgccgacgatctgactcgtcccaagacgtgctcttcaggtcttcctatgaccacaatgaagccacaccaaacccaaccgatgcgcaatttttagaggaggaagacgaagagcagggagaagagacttgtcgatactgcgacaagactcagatgattcagaggaggccccgagacatgcgtatctactatggcctaatcgcatccggcaatcgcgtcatcaaaaacgccagtttccgagacaacctacgccgggaccttgggcaagacgtgctatgtgttgaaatggaggcagctggactaacggaaagtttcccttgcatcgtcatacgagggatttgtgattatgcagactcgcacaaaaacaaggcctggcaggagcacgcagctgccgtggccgcagcatatgccaaagaacttttgggatatgtccagacaagtgacgtcgataaagaaagggcagtcaaggatgtacttcatagcatacaaagtgatacgacgtatacaagaagctatctcaataagaaagaagatatcgaaatcctcgattggctcgtatcgactgactacggaccacaacaaaccgactatttacggagacgacaatcagggacaggagagtggctacttgactcagaagagtaccagagctggatcaaagagtcaaacaaaacgctgttttgtccaggtatccccggagctggcaagaccatcttgacatcaattgtcgtgaacgaccttgagactagattccgcagcgagacaactactacaatagcttatgtctactgcaattacaaacgtcaaagcgagcagaccatcgaaaacttattatctagtctacttaaacaactagctcagagccagccatctttacttcataatctgaaagagctctatgatcggcataaagggaaacggacccggccgtccttagacgagatctcagaggcactcgaattaatcattcttcagaattctagggtcttcatcatcgttgatgccctagatgaatgtcaagtttctgatagctgtcgtacgaggtttctgtcgacaatcttgaatctccagctcaaaactagaataaatctttttgcaacttcaagaatgatacaagaagtcacggagacattcaaagaatgtctctccatcgagatccgcgcaactgaacatgacattcgcagatatttacaaggacacttaccacagctgtcgagatttatcactagtcaacccgaccttcaagatgagattacaacaagcatgacgaagactgtcgatgggatgtttctacttgcccaacttcatctcgattctttaagaggcgaggatacgcgaaaaggtatacgtacagcattgaaaaagctggcagacacatcaaatacttccactactgctgatgatactgcttacgatacagcctacgaatctgcaatggagcgaattcaaggacaactccaaaagcaggcaaagcgagccaagcaagtcttatcgtggatcacttgtgcaaaaagaccgttaacaaaagtggaactccaacatgcattagccgtcgaagtgaacgagatacgacttgatgaagataatcttccgcagatcgaggacgccgtctctttctgtgctgggctggtcacagtagatgaaaaaagcagcgtcgttcgattagttcattacacgacacaagactactttgtacgaacccagagcaagtggtttccagtagcagagctttctattacggaaatctgtaccacgtacctttcttatcaagactttgcggatggctattctgagacagacgaaaaatttgaggagcggctaagattgcaccccttttacaattacgccgctcgtaattggggtcatcatagccgtaaagtatcggcctgtcagaatactatttcctttctccagaaggcagctcaagttaaggcatcaagtcaagccctcatggttggcgatagatttaggtataaagactacagtcagagtgccacaaagcaaatgacagggttacacctggcaacatatttcggcctggatgatatcattgcagccatgatcacagactatgatgcagatgcacgggatagccatggccggacgccgctgtcgtgggcggcagggggagggcacgaagccgtggtgaagctgctgctggcgaccgagaaggtcgacgccgacgcgag

SEQ ID NO: 38088 - DNA, 636 bp, Muscodor strobelii
  misc_feature: SGI cDNA ID NO. 573230
  misc_feature: Encodes the peptide sequence at SEQ ID NO 38089
atgagcgccaccaagaaccaggttcctttctggagccctgccacctacaaagagagcatcctcgacgaggctacctgggtccaagcatgggatatacgtgacgcatttgccgccttggaacgcgaccagcccttgaacatcgccatcaccatggcagaagtcggcttccccgccatcaaattggacgatattgaacgatgggccaacgcggatggcacctttggcctcgctacccaagcccacgacgccttcgatctgtccgccaccgagacctcacgccaactcgagcgatacgccgacaaagccatgaccctgtccaaccccgcccgccttgcccaagtcctgctcgccaccgaggcccaacagaaggctgtcgctgtctcatggcccgaataccgcaagatcaaccaggagcagggtcgttgggtttctccaatccgtctcgaggctggaaacctgagtcgcatgcagtggtggaccagagcatgtagcaaggatacaagaggggccgatcaagagctgtcgactgcccgcaagaccaggattgccaaggtcctcgtgcctttcattatggcctggcgtgctggcagtcgtgcccatcctatgaacagcgccgtctgcaagagttgtatgtga

SEQ ID NO: 38089 - protein, 211 aa, Muscodor strobelii
  misc_feature: SGI Peptide ID NO. 573230
MSATKNQVPFWSPATYKESILDEATWVQAWDIRDAFAALERDQPLNIAITMAEVGFPAIKLDDIERWANADGTFGLATQAHDAFDLSATETSRQLERYADKAMTLSNPARLAQVLLATEAQQKAVAVSWPEYRKINQEQGRWVSPIRLEAGNLSRMQWWTRACSKDTRGADQELSTARKTRIAKVLVPFIMAWRAGSRAHPMNSAVCKSCM

SEQ ID NO: 38090 - DNA, 2692 bp, Muscodor strobelii
  misc_feature: SGI EST ID NO. CUFF.91812.2
  misc_feature: Variant of the nucleotide sequence at SEQ ID NO 38088
cgcgggctgaactgcgtacaagctgagccatgccagccagcctatctgcaagaagactgtcgcttctggaatcgattggctaaaaggccctactccatcatgtagggaaaggcctcgagctctgctgtaaccactaggcgagcagtataggacaccatgctgctgcgacatagctgcaggcatacttggggaacattatgcgattggcgggaggcgaagtgatgaaacggcatactaggaagtagaagcaggctgggcgggacgaggcgtttttatggtcgtgccgtggtggacatcatatgtagtcggtggtcggcccagagttatacaaatatagaggtcgggtgtgaaatgggactactccgatttagtctatgcttggaagctaccatatatgtcgtcaagataaactgactgtcctagttgacttggtagtagcgaggctggccagagacatgtccaagatacatgtgctcacatccaggtcttaaacgtctgtgcggacaataaagagtgtgaacacgatcgagaccatcttgaattcatcgctatcctcacacagtattgtagagacgcgatctcgtatcggtggctgatggcgatgctgtcgcgacacgtctcccctggcctgagttatcgatgcctgttggtaaggaggaacgcgtgtgtgggctgacagggaatatcataatgggaccatcgcgaccgccgggatcgcagtagcctcgcaccgtacaagtgctagaccattattccattctacaatttccaagtatgctaggaaggagttgattttgttctcgttaatgtcgggtaggagcgcattgcaaagttacgatttctacacagagagatgatttgtggcagccactccgcactataagcaattagtcactgccttcccttccaccccgccagccatctttccctctcccactcccactcccatatccccatccacctccacgcttttcactgtcgtcgcctatctcacactcagcaaccacatccaatcctgcacaagtacagaggaaacagtctcggccgccacatcatgagcgccaccaagaaccaggttcctttctggagccctgccacctacaaagtcagcatcgtcgcgacttgtgcgcgttgcagcaaggaccatgttccgcccggtagacaagcgaccatccaagtggtctgccccagtccgaaggagctctaggagagcatcctcgacgaggctacctgggtccaagcatgggatatacgtgacgcatttgccgccttggaacgcgaccagcccttgaacatcgccatcaccatggcagaagtcggcttccccgccatcaaattggacgatattgaacgatgggccaacgcggatggcacctttggcctcgctacccaagcccacgacgccttcgatctgtccgccaccgagacctcacgccaactcgagcgatacgccgacaaagccatgaccctgtccaaccccgcccgccttgcccaagtcctgctcgccaccgaggcccaacagaaggctgtcgctgtctcatggcccgaataccgcaagatcaaccaggagcagggtcgttgggtttctccaatccgtctcgaggctggaaacctgagtcgcatgcagtggtggaccagagcatgtagcaaggatacaagaggggccgatcaagagctgtcgactgcccgcaagaccaggattgccaaggtcctcgtgcctttcattatggcctggcgtgctggcagtcgtgcccatcctatgaacagcgccgtctgcaagagttgtatgtgagcaggatggaacagatggttacgtgatactgataaaagagctggtgagcggtatacgagaagcattctagaggaaatgaaagagagcttacgttttagctatgcagctcgctagctaggaacagtttggtcttttctagttctagttgtgaattcattatgttgcatgcaacccgatatgccccttgtcgacaatctgggagtcgccatggctaaatgcatcagtgctgtcgctatgatagactttggatataattcaagctcagccttgagcacttggtatcattctcagaaagcccgtcacgccagtctttggagttatatcccgcatgtcgaatcgctccgattgagtcatgtgtaaagctctggttttcctctgcgaacccctcctagccacatcatccccaaagctggcacttactgttctgactcctaggtacaaacagaagagctctgcttgctaatagcaagagatacaaagcgacctagtggcgtagacccatccgcctgcacaccatattcctccatgtcacgatatatcctatcgatatattcaccagctcccgaaagatgcaggatgcgtgcaatagcacaatgaatcgctagcagtcgaggtgctggaggctcgatcgttctctccggagtaatgtaaagctcgcgagttaaaggtagtgatggccggaagaagaagtctccagatatgtgtgttttgatcgtatatacatggtctctgtgaggaacgggttcgaagtaaacctgaaaatcaccgaaatattgatgaaagtcttgagtaagggtaagagcattgcgtggccggtcaatctcagggcctcgaatcagttcggcaacaccaacatcgaacatgtcaagtattgcaagtgcggattgtctggaagcatcc

SEQ ID NO: 38091 - DNA, 510 bp, Muscodor strobelii
  misc_feature: SGI cDNA ID NO. 573231
  misc_feature: Encodes the peptide sequence at SEQ ID NO 38092
atggctactcagcctcacacccataatgactatagtgtgggatggatctgcgcgctaccgaaggagcagactgcggctatcgcgatgcttgacgagagacatgacgacttgtctaaaccacagaatgaccacaatacgtacactctcggatccatccgcaaacacaacattgtcattgcctgcctcccaattggcaagattggcaccgtctccgcagcaacagttgccacacatatggttcacgcctttccgtctgtcaagttcggcttgatggtcggtataggtggaggcatccccccaaaagtcaggctcggtgatgttgtagttggcatcccgataggtcaatatccaggagtagtacagtgggatctggggaaagaagagaaaaatggaaagttcacacggactggctcgctgaataaccctcctggctccctcctgagtgccgtgtcgaagctacaatcagaacacgacttggcagaatcaaaaaataccgttctatctggatga

SEQ ID NO: 38092 - protein, 169 aa, Muscodor strobelii
  misc_feature: SGI Peptide ID NO. 573231
  misc_feature (2)..(163): NCBI GI: 171693393 Blast Desc: protein product [Podospora anserina] gi|170946645|emb|CAP73448.1| protein product [Podospora anserina]
  misc_feature (1)..(163): NCBI GI: 212541358 Blast Desc: serine/threonine-protein kinase ripk4, [Penicillium marneffei ATCC 18224] gi|210068133|gb|EEA22225.1| serine/threonine-protein kinase ripk4, [Penicillium marneffei
  misc_feature (3)..(163): NCBI GI: 46139821 Blast Desc: FG11425.1 [Gibberella zeae PH-1]
  misc_feature (1)..(163): NCBI GI: 169773129 Blast Desc: [Aspergillus oryzae RIB40] gi|83768894|dbj|BAE59031.1| protein product [Aspergillus oryzae]
  misc_feature (1)..(163): NCBI GI: 238491078 Blast Desc: ankyrin repeat-containing protein, [Aspergillus flavus NRRL3357] gi|220697189|gb|EED53530.1| ankyrin repeat-containing protein, [Aspergillus flavus NRRL3357]
  misc_feature (1)..(163): NCBI GI: 225557065 Blast Desc: ankyrin repeat protein [Ajellomyces capsulatus G186AR]
  misc_feature (1)..(163): NCBI GI: 154285314 Blast Desc: conserved [Ajellomyces capsulatus NAm1] gi|150407093|gb|EDN02634.1| conserved [Ajellomyces capsulatus NAm1]
  misc_feature (7)..(163): NCBI GI: 115390338 Blast Desc: conserved [Aspergillus terreus NIH2624] gi|114195070|gb|EAU36770.1| conserved [Aspergillus terreus NIH2624]
  misc_feature (1)..(159): NCBI GI: 46127555 Blast Desc: FG08155.1 [Gibberella zeae PH-1]
  misc_feature (7)..(163): NCBI GI: 70989976 Blast Desc: AFUA_1G00850 [Aspergillus fumigatus Af293] gi|66847469|gb|EAL87799.1| AFUA_1G00850 [Aspergillus fumigatus Af293]
MATQPHTHNDYSVGWICALPKEQTAAIAMLDERHDDLSKPQNDHNTYTLGSIRKHNIVIACLPIGKIGTVSAATVATHMVHAFPSVKFGLMVGIGGGIPPKVRLGDVVVGIPIGQYPGVVQWDLGKEEKNGKFTRTGSLNNPPGSLLSAVSKLQSEHDLAESKNTVLSG

SEQ ID NO: 38093 - DNA, 6352 bp, Muscodor strobelii; identical to SEQ ID NO: 38087
  misc_feature: SGI EST ID NO. CUFF.91811.0
  misc_feature: Variant of the nucleotide sequence at SEQ ID NO 38091

SEQ ID NO: 38094 - DNA, 519 bp, Muscodor strobelii
  misc_feature: SGI cDNA ID NO. 573232
  misc_feature: Encodes the peptide sequence at SEQ ID NO 38095
atggagtcgctcacctcaccactaccgcctcctttgagtgccaatcctcgcctcatcactgccgctcagccatcagagtactggaccggcagattcatggctctccaggatcgtttccagtccgagaccatgctcccacgcaacctcgacacgctcgctcataccaacacaccctcgcgatcgatgccaccgccttcgggcattccacgctcttccacaatgaactcgctcattcccttcaagaacaagaaccggccaaccacgagcaccagggtacccgtcacccaaagggagactgcgacagacaacggtgcctcgctcctgctcgacgaggataaccgcacccgtagagtctttgtacatcttgaagctatgtgtatgacacctgaagcgagagagagtctgcacgcttggcagcaagtttatgctcgacgcatgggcaaggagtacttacttccggacggtagcaagcgtcgcgagaagagttgggttagccgttttctaggcgacaagcactag

SEQ ID NO: 38095 - protein, 172 aa, Muscodor strobelii
  misc_feature: SGI Peptide ID NO. 573232
  misc_feature (15)..(168): NCBI GI: 256733856 Blast Desc: NECHADRAFT_67033 [Nectria haematococca mpVI 77-13-4]
  misc_feature (105)..(168): NCBI GI: 145611416 Blast Desc: [Magnaporthe grisea 70-15] gi|145018711|gb|EDK02990.1| [Magnaporthe grisea 70-15]
  misc_feature (5)..(171): NCBI GI: 46127845 Blast Desc: FG08300.1 [Gibberella zeae PH-1]
  misc_feature (91)..(155): NCBI GI: 164425577 Blast Desc: NCU05524 [Neurospora crassa OR74A] gi|157070981|gb|EAA31250.2| NCU05524 [Neurospora crassa OR74A]
  misc_feature (95)..(155): NCBI GI: 171681600 Blast Desc: protein product [Podospora anserina] gi|170940759|emb|CAP66408.1| protein product [Podospora anserina]
  misc_feature (10)..(57): NCBI GI: 171681600 Blast Desc: protein product [Podospora anserina] gi|170940759|emb|CAP66408.1| protein product [Podospora anserina]
  misc_feature (6)..(153): NCBI GI: 156057717 Blast Desc: [Sclerotinia sclerotiorum 1980] gi|154702375|gb|EDO02114.1| [Sclerotinia sclerotiorum 1980]
  misc_feature (9)..(52): NCBI GI: 164425577 Blast Desc: NCU05524 [Neurospora crassa OR74A] gi|157070981|gb|EAA31250.2| NCU05524 [Neurospora crassa OR74A]
  misc_feature (107)..(158): NCBI GI: 116201903 Blast Desc: CHGG_08836 [Chaetomium globosum CBS 148.51] gi|88177354|gb|EAQ84822.1| CHGG_08836 [Chaetomium globosum CBS 148.51]
  misc_feature (8)..(53): NCBI GI: 116201903 Blast Desc: CHGG_08836 [Chaetomium globosum CBS 148.51] gi|88177354|gb|EAQ84822.1| CHGG_08836 [Chaetomium globosum CBS 148.51]
MESLTSPLPPPLSANPRLITAAQPSEYWTGRFMALQDRFQSETMLPRNLDTLAHTNTPSRSMPPPSGIPRSSTMNSLIPFKNKNRPTTSTRVPVTQRETATDNGASLLLDEDNRTRRVFVHLEAMCMTPEARESLHAWQQVYARRMGKEYLLPDGSKRREKSWVSRFLGDKH

SEQ ID NO: 38096 - DNA, 552 bp, Muscodor strobelii
  misc_feature: SGI cDNA ID NO. 573233
  misc_feature: Elevated expression when VOC is produced
  misc_feature: Encodes the peptide sequence at SEQ ID NO 38097
atggctcgatctgctgtcacaaagacgaacaatgtatcactcatccctgcctgggtgaatccggatctggatcgcctcatggtcgtcaactcgaagccaggggagtaccaagcatgggcacaatcgctcgtcaacctccctgcaggtgccgtttttgcacggattaacaaagtgactgccgccgagtctccgacatatacgtccattcagaccggccttggtcagcatgtcgagctgaactcagacctggtatacatcaaccatagctgtgatccgaccttggagctagacaccgagacgatggagttcaaagttgcgcgacacagaccgcttcaacgaggagacgtcctttctttcttctatcccagctcggagtggcgtatggcacagccattcaaatgttggtgcggctctggcgataagaaatgcctcggtcagattgagggcgctggcaagatggatccggagaaacttcgcatgtatcatccgaaccctcatgtggtgaaacaacttggcgagaattatgacaatggtgacaaaattgtagagtaa

SEQ ID NO: 38097 - protein, 183 aa, Muscodor strobelii
  misc_feature: SGI Peptide ID NO. 573233
  misc_feature (13)..(178): NCBI GI: 169618487 Blast Desc: SNOG_12434 [Phaeosphaeria nodorum SN15] gi|111059127|gb|EAT80247.1| SNOG_12434 [Phaeosphaeria nodorum SN15]
  misc_feature (14)..(167): NCBI GI: 169774751 Blast Desc: [Aspergillus oryzae RIB40] gi|238496651|ref|XP_002379561.1| galactose-proton symport, [Aspergillus flavus NRRL3357] gi|83769706|dbj|BAE59841.1| protein
  misc_feature (10)..(173): NCBI GI: 242796775 Blast Desc: conserved [Talaromyces stipitatus ATCC 10500] gi|218719459|gb|EED18879.1| conserved [Talaromyces stipitatus ATCC 10500]
  misc_feature (51)..(174): NCBI GI: 145611950 Blast Desc: MGG_00019 [Magnaporthe grisea 70-15] gi|145019153|gb|EDK03432.1| MGG_00019 [Magnaporthe grisea 70-15]
  misc_feature (26)..(173): NCBI GI: 70992097 Blast Desc: conserved [Aspergillus fumigatus Af293] gi|66848530|gb|EAL88859.1| conserved [Aspergillus fumigatus Af293] gi|159124467|gb|EDP49585.1| conserved [Aspergillus A1163]
  misc_feature (7)..(173): NCBI GI: 189200969 Blast Desc: conserved [Pyrenophora tritici-repentis Pt-1C-BFP] gi|187983920|gb|EDU49408.1| conserved [Pyrenophora tritici-repentis Pt-1C-BFP]
  misc_feature (26)..(173): NCBI GI: 119471197 Blast Desc: NFIA_055870 [Neosartorya fischeri NRRL 181] gi|119406287|gb|EAW16238.1| conserved [Neosartorya fischeri NRRL 181]
  misc_feature (5)..(173): NCBI GI: 121699220 Blast Desc: conserved [Aspergillus clavatus NRRL 1] gi|119396090|gb|EAW06522.1| conserved [Aspergillus clavatus NRRL 1]
  misc_feature (26)..(176): NCBI GI: 115399064 Blast Desc: conserved [Aspergillus terreus NIH2624] gi|114192004|gb|EAU33704.1| conserved [Aspergillus terreus NIH2624]
  misc_feature (12)..(173): NCBI GI: 255946501 Blast Desc: Pc20g15460 [Penicillium chrysogenum Wisconsin 54-1255] gi|211588753|emb|CAP86875.1| Pc20g15460 [Penicillium chrysogenum Wisconsin 54-1255]
  misc_feature: Useful for introducing or modulating the production of volatile compounds
MARSAVTKTNNVSLIPAWVNPDLDRLMVVNSKPGEYQAWAQSLVNLPAGAVFARINKVTAAESPTYTSIQTGLGQHVELNSDLVYINHSCDPTLELDTETMEFKVARHRPLQRGDVLSFFYPSSEWRMAQPFKCWCGSGDKKCLGQIEGAGKMDPEKLRMYHPNPHVVKQLGENYDNGDKIVE

SEQ ID NO: 38098 - DNA, 935 bp, Muscodor strobelii
  misc_feature: SGI EST ID NO. CUFF.91324.0
  misc_feature: Variant of the nucleotide sequence at SEQ ID NO 38096
cacaagatgcttaggtgagacgacactgcaatatatgtgatagtatgtgatagaccggaaatgcggatagtgaacaagtgggatatggagatgattgaattatgcggaagattcaaagatataaagtccttactggaccgttctcgatctactgaccaataggcaatgacctacaccctcctttttcgataacacaaagcatcttcatcgcagctctgacgctcaaaacatcagccaagtaaacaccacaatggctcgatctgctgtcacaaagacgaacaatgtatcactcatccctgcctgggtgaatccggatctggatcgcctcatggtcgtcaactcgaagccaggggagtaccaagcatgggcacaatcgctcgtcaacctccctgcaggtgccgtttttgcacggattaacaaagtgactgccgccgagtctccgacatatacgtccattcagaccggccttggtcagcatgtcgagctgaactcagacctggtatacatcaaccatagctgtgatccgaccttggagctagacaccgagacgatggagttcaaagttgcgcgacacagaccgcttcaacgaggagacgtcctttctttcttctatcccagctcggagtggcgtatggcacagccattcaaatgttggtgcggctctggcgataagaaatgcctcggtcagattgagggcgctggcaagatggatccggagaaacttcgcatgtatcatccgaaccctcatgtggtgaaacaacttggcgagaattatgacaatggtgacaaaattgtagagtaacggacggtggtggtgcattatccgatgatgatgttatacatggaatggacgcctgcatatcgacaccaggccctcttccggaacttaagacgatcatgcagattaaatcacaacatgatatttgaaaagccca

SEQ ID NO: 38099 - DNA, 1323 bp, Muscodor strobelii
  misc_feature: SGI cDNA ID NO. 573234
  misc_feature: Encodes the peptide sequence at SEQ ID NO 38100
atgtcgtcatcagagaatgcttctacagccaagcttgtaccgttcagcgaagacacggtctcatgcgaaagctctacgggtgtagatctctctcctctcaaaccaggacccgtgataggcaacagcgagcagatttatcttgcgcgatcttctgcgtacccggtcatattcgtactgtctctagtggcattcacagctagcgtctcgacgggtctactgacatcgtcaattcccattatcattacagacttgtcgataccaccgagcagatcatacttaccgctgtccgtttatgggttaacaagcggcgcgatgctcctcatctccggctctgtggcagatgcaatcggttccggagtcgtgtttctgacgggtgctttcttacaatcgggtttcattttagcctgcggcttggccaagaccgacatacaactgattatgttccgcgcctttcagggcatttccgttgcgctctgcctgccgacgactattggaattttgacaaatgcggttgccccagggcgcctccggaacgtagggcttgcgtgcaccggactcggccaattgctaggctactcaatgggccttgtcctcggcggtcttttcgtgaatacattaggatggcgggcgggatggttcatcgcttcagcaatgtcgttcttcctcttcgttgcggctctttacttcttgccgagagacaggatcgatcaacctcgaatgcttcacaacttgcgtactgggactgattgggtcggcgcagtgattatctctacagctctcgctatgctcgcatatgtactgggcgaggtgtcaggatacgggaatgccatccacgtacccaagaatatcgccttgcttgccatcagcatgggtctgttcttgatgtttgcatactggcagcatattgcgacgaagaaggggttgccgatcctcattcccagccatctctggaaagaaaaggcatttgcaagcgtctgcgtaatgatactgctggcatatggtgcattgcagacaatggagctcttctgcacattattctttcagaatctgcagggagtcagtcccttgcagtcatcacttcagcagctgccaaacctggttgtcgggtctatcatcgggctgtcgactgggttcttcgtgcaccatacctcacctaaatatttggtgctttcatcttcgttactttgttctggtgcgtcgctgatcatggctctcgcaaatccagagtggccgtattggtgggcgtcgttccctgctcagcttttacagccggtgagtgggacatggttcaagttgtcaaccgcgatttggcgtggacgctga

SEQ ID NO: 38100 - protein, 440 aa, Muscodor strobelii
  misc_feature: SGI Peptide ID NO. 573234
  misc_feature (59)..(438): Pfam Id: PF07690 Pfam Desc: Major Facilitator Superfamily
  misc_feature (59)..(422): Pfam Id: PF07690 Pfam Desc: Major Facilitator Superfamily
  misc_feature (46)..(426): NCBI GI: 145611952 Blast Desc: MGG_00018 [Magnaporthe grisea 70-15] gi|145019154|gb|EDK03433.1| MGG_00018 [Magnaporthe grisea 70-15]
  misc_feature (55)..(426): NCBI GI: 212543215 Blast Desc: MFS transporter, [Penicillium marneffei ATCC 18224] gi|210066669|gb|EEA20762.1| MFS transporter, [Penicillium marneffei ATCC 18224]
  misc_feature (55)..(426): NCBI GI: 115402835 Blast Desc: conserved [Aspergillus terreus NIH2624] gi|114189340|gb|EAU31040.1| conserved [Aspergillus terreus NIH2624]
  misc_feature (59)..(426): NCBI GI: 256726455 Blast Desc: NECHADRAFT_93115 [Nectria haematococca mpVI 77-13-4]
  misc_feature (48)..(427): NCBI GI: 145229617 Blast Desc: An01g06940 [Aspergillus niger] gi|134055225|emb|CAK43812.1| protein product [Aspergillus niger]
  misc_feature (19)..(426): NCBI GI: 121700460 Blast Desc: MFS transporter, [Aspergillus clavatus NRRL 1] gi|119396637|gb|EAW07069.1| MFS transporter, [Aspergillus clavatus NRRL 1]
  misc_feature (15)..(426): NCBI GI: 189206201 Blast Desc: efflux pump protein [Pyrenophora tritici-repentis Pt-1C-BFP] gi|187975528|gb|EDU42154.1| efflux pump protein [Pyrenophora tritici-repentis Pt-1C-BFP]
  misc_feature (5)..(426): NCBI GI: 256728372 Blast Desc: NECHADRAFT_87739 [Nectria haematococca mpVI 77-13-4]
  misc_feature (3)..(426): NCBI GI: 46126509 Blast Desc: FG07632.1 [Gibberella zeae PH-1]
  misc_feature (91)..(426): NCBI GI: 169771723 Blast Desc: [Aspergillus oryzae RIB40] gi|83768190|dbj|BAE58329.1| protein product [Aspergillus oryzae]
MSSSENASTAKLVPFSEDTVSCESSTGVDLSPLKPGPVIGNSEQIYLARSSAYPVIFVLSLVAFTASVSTGLLTSSIPIIITDLSIPPSRSYLPLSVYGLTSGAMLLISGSVADAIGSGVVFLTGAFLQSGFILACGLAKTDIQLIMFRAFQGISVALCLPTTIGILTNAVAPGRLRNVGLACTGLGQLLGYSMGLVLGGLFVNTLGWRAGWFIASAMSFFLFVAALYFLPRDRIDQPRMLHNLRTGTDWVGAVIISTALAMLAYVLGEVSGYGNAIHVPKNIALLAISMGLFLMFAYWQHIATKKGLPILIPSHLWKEKAFASVCVMILLAYGALQTMELFCTLFFQNLQGVSPLQSSLQQLPNLVVGSIIGLSTGFFVHHTSPKYLVLSSSLLCSGASLIMALANPEWPYWWASFPAQLLQPVSGTWFKLSTAIWRGR

SEQ ID NO: 38101 - DNA, 2682 bp, Muscodor strobelii
  misc_feature: SGI EST ID NO. CUFF.91333.1
  misc_feature: Variant of the nucleotide sequence at SEQ ID NO 38099
cagacttgtcgataccaccgagcagatcatacttaccgctgtccgtttatgggttaacaagcggcgcgatgctcctcatctccggctctgtggcagatgcaatcggttccggagtcgtgtttctgacgggtgctttcttacaatcgggtttcattttagcctgcggcttggccaagaccgacatacaactgattatgttccgcgcctttcagggcatttccgttgcgctctgcctgccgacgactattggaattttgacaaatgcggttgccccagggcgcctccggaacgtagggcttgcgtgcaccggactcggccaattgctaggctactcaatgggccttgtcctcggcggtcttttcgtgaatacattaggatggcgggcgggatggttcatcgcttcagcaatgtcgttcttcctcttcgttgcggctctttacttcttgccgagagacaggatcgatcaacctcgaatgcttcacaacttgcgtactgggactgattgggtcggcgcagtgattatctctacagctctcgctatgctcgcatatgtactgggcgaggtgtcaggatacgggaatgccatccacgtacccaagaatatcgccttgcttgccatcagcatgggtctgttcttgatgtttgcatactggcagcatattgcgacgaagaaggggttgccgatcctcattcccagccatctctggaaagaaaaggcatttgcaagcgtctgcgtaatgatactgctggcatatggtgcattgcagacaatggagctcttctgcacattattctttcagaatctgcagggagtcagtcccttgcagtcatcacttcagcagctgccaaacctggttgtcgggtctatcatcgggctgtcgactgggttcttcgtgcaccatacctcacctaaatatttggtgctttcatcttcgttactttgttctggtgcgtcgctgatcatggctctcgcaaatccagagtggccgtattggtgggcgtcgttccctgctcagcttttacagccggtgagtgggacatggttcaagttgtcaaccgcgatttggcgtggacgctgacttctctaataatgattaggcttctatagacgtgctgttttgcgttggtttagtagtagcgagcgaagttttccccagcgacacgcagtcccttgctggagccgtgttcaatactgcaagccaattcggcatatcgctcggccttgccctgacgggcgtattgtcggatgaaatcatccaagcggccaagcataagcataactatgctccggaatcacaagccttgagagagggatactcagccgcgttctggcttgcatttggatggatgctattggtgtgtttcattgctctcataggactcagaacttctcaccgagttggacttgagcagaaacaggtcgaaattgagcataatggcgacgtattcaaagtgtagtcatagcagagccactcattacctctatcggccatgccagccacggggcccagtagttgccgaggaagtcaacggtgcttcgaataataaacgcgccggcatcgccaaatacccaggactctcttgcttcgtgtacgacgaccccgtagtaagccattattactaacgcctcggcccgtcgctgctcgacgagcttgacgaattctgatggcacagtgaccatccaccgtagcacacgaagggccttgaatcctggcgacgtcttgtgtgcagcgtcaagggcagggagagcacaaagcaagtccagtgcagcgaaacacggttttgagatagtagggctgacatctttatcttccaagaggcgtcggacaggatggaatttggtcgagaagacggtaccgagtccagtttgtgatgaactccagacatgttccatgcccagaagctccgatcccgtttgctggcgatattccgttgcaagagactcaaagtccctaccagccatgacccttactccgccgcacaagcggaaccccttcgtcagctcgtccaagaagatggcaaaatcagcacgactagctagggcgtcgaagagagcatggtagcacagaaggattgagaatagaaacgctggaagacactcatcctcggctttcgcatttggtgagagactgaacatggtcaaagcccgtgtctgccgacgagtcgcttcgtggcggtagaaagacgcgtcgtgtagcgcttgagtgcccatgtgcgctgcagagagtgccagtaattgttccattaagtagggccggtcgaacgactgtttgacaatggcttcgccgaagcgtagagatacgttggcgccatctgcagataggtcctggcagacattggtagtgaaattgtgaaaaagctttatgtcatgcaatttaaacgtctgatcagtcaaggagacattgggcgcggactgcgtcgcagtttcgcgggatctaccctgatcaagttgatggccatattggctatccttctgcgactcgtgaggcgaacgcgaccgtgatgtacgacaactaggcgtggctgaatgagctatttgaagctgtgctagcgatgaaggtgtttcgtcacgtggggcaggattaggtgaaaggatcgagacattctgggaagacggtaacttgacactaagagtcgcgataaaggagcaatctaataggcgaatctgacaattgcgacagg

SEQ ID NO: 38102 - DNA, 1320 bp, Muscodor strobelii
  misc_feature: SGI cDNA ID NO. 573235
  misc_feature: Encodes the peptide sequence at SEQ ID NO 38103
atgaagcggcggtccgctggtagatctagacatggctgtaaagagtgcaaacgtcgccacgtcaagtgcgacgaaggcaaacctacctgtcgcaattgtcagattcgcctattagattgctcctttatcgcgactcttagtgtcaagttaccgtcttcccagaatgtctcgatcctttcacctaatcctgccccacgtgacgaaacaccttcatcgctagcacagcttcaaatagctcattcagccacgcctagttgtcgtacatcacggtcgcgttcgcctcacgagtcgcagaaggatagccaatatggccatcaacttgatcagggtagatcccgcgaaactgcgacgcagtccgcgcccaatgtctccttgactgatcagacgtttaaattgcatgacataaagctttttcacaatttcactaccaatgtctgccaggacctatctgcagatggcgccaacgtatctctacgcttcggcgaagccattgtcaaacagtcgttcgaccggccctacttaatggaacaattactggcactctctgcagcgcacatgggcactcaagcgctacacgacgcgtctttctaccgccacgaagcgactcgtcggcagacacgggctttgaccatgttcagtctctcaccaaatgcgaaagccgaggatgagtgtcttccagcgtttctattctcaatccttctgtgctaccatgctctcttcgacgccctagctagtcgtgctgattttgccatcttcttggacgagctgacgaaggggttccgcttgtgcggcggagtaagggtcatggctggtagggactttgagtctcttgcaacggaatatcgccagcaaacgggatcggagcttctgggcatggaacatgtctggagttcatcacaaactggactcggtaccgtcttctcgaccaaattccatcctgtccgacgcctcttggaagataaagatgtcagccctactatctcaaaaccgtgtttcgctgcactggacttgctttgtgctctccctgcccttgacgctgcacacaagacgtcgccaggattcaaggcccttcgtgtgctacggtggatggtcactgtgccatcagaattcgtcaagctcgtcgagcagcgacgggccgaggcgttagtaataatggcttactacggggtcgtcgtacacgaagcaagagagtcctgggtatttggcgatgccggcgcgtttattattcgaagcaccgttgacttcctcggcaactactgggccccgtggctggcatggccgatagaggtaatgagtggctctgctatgactacactttga

SEQ ID NO: 38103 - protein, 439 aa, Muscodor strobelii
  misc_feature: SGI Peptide ID NO. 573235
  misc_feature (11)..(50): Pfam Id: PF00172 Pfam Desc: Fungal Zn(2)-Cys(6) binuclear cluster domain
  misc_feature (1)..(436): NCBI GI: 67902232 Blast Desc: AN8103.2 [Aspergillus nidulans FGSC A4] gi|40740535|gb|EAA59725.1| AN8103.2 [Aspergillus nidulans FGSC A4] gi|259480866|tpe|CBF73893.1| TPA: Zn(II)2Cys6 transcription
  misc_feature (1)..(431): NCBI GI: 119473723 Blast Desc: NFIA_001890 [Neosartorya fischeri NRRL 181] gi|119406890|gb|EAW16840.1| conserved [Neosartorya fischeri NRRL 181]
  misc_feature (3)..(435): NCBI GI: 256729968 Blast Desc: NECHADRAFT_45340 [Nectria haematococca mpVI 77-13-4]
  misc_feature (1)..(431): NCBI GI: 212540058 Blast Desc: conserved [Penicillium marneffei ATCC 18224] gi|210067483|gb|EEA21575.1| conserved [Penicillium marneffei ATCC 18224]
  misc_feature (3)..(431): NCBI GI: 70983698 Blast Desc: C6 finger domain protein [Aspergillus fumigatus Af293] gi|66845002|gb|EAL85338.1| C6 finger domain protein, [Aspergillus fumigatus Af293]
  misc_feature (3)..(431): NCBI GI: 159123619 Blast Desc: C6 finger domain protein, [Aspergillus fumigatus A1163]
  misc_feature (4)..(438): NCBI GI: 119484956 Blast Desc: NFIA_098530 [Neosartorya fischeri NRRL 181] gi|119410276|gb|EAW20223.1| conserved [Neosartorya fischeri NRRL 181]
  misc_feature (3)..(428): NCBI GI: 169617507 Blast Desc: SNOG_11933 [Phaeosphaeria nodorum SN15] gi|111059857|gb|EAT80977.1| SNOG_11933 [Phaeosphaeria nodorum SN15]
  misc_feature (1)..(432): NCBI GI: 145233031 Blast Desc: An02g07550 [Aspergillus niger] gi|134056812|emb|CAK37718.1| protein product [Aspergillus niger]
  misc_feature (135)..(432): NCBI GI: 70985839 Blast Desc: conserved [Aspergillus fumigatus Af293] gi|66846054|gb|EAL86387.1| conserved [Aspergillus fumigatus Af293] gi|159128439|gb|EDP53554.1| conserved [Aspergillus A1163]
MKRRSAGRSRHGCKECKRRHVKCDEGKPTCRNCQIRLLDCSFIATLSVKLPSSQNVSILSPNPAPRDETPSSLAQLQIAHSATPSCRTSRSRSPHESQKDSQYGHQLDQGRSRETATQSAPNVSLTDQTFKLHDIKLFHNFTTNVCQDLSADGANVSLRFGEAIVKQSFDRPYLMEQLLALSAAHMGTQALHDASFYRHEATRRQTRALTMFSLSPNAKAEDECLPAFLFSILLCYHALFDALASRADFAIFLDELTKGFRLCGGVRVMAGRDFESLATEYRQQTGSELLGMEHVWSSSQTGLGTVFSTKFHPVRRLLEDKDVSPTISKPCFAALDLLCALPALDAAHKTSPGFKALRVLRWMVTVPSEFVKLVEQRRAEALVIMAYYGVVVHEARESWVFGDAGAFIIRSTVDFLGNYWAPWLAWPIEVMSGSAMTTL

SEQ ID NO: 38104 - DNA, 3359 bp, Muscodor strobelii
  misc_feature: SGI EST ID NO. CUFF.91334.0
  misc_feature: Variant of the nucleotide sequence at SEQ ID NO 38102
ccacgtcaagtgcgacgaaggcaaacctacctgtcgcaattgtcagattcgcctattagattgctcctttatcgcgactcttagtgtcaagttaccgtcttcccagaatgtctcgatcctttcacctaatcctgccccacgtgacgaaacaccttcatcgctagcacagcttcaaatagctcattcagccacgcctagttgtcgtacatcacggtcgcgttcgcctcacgagtcgcagaaggatagccaatatggccatcaacttgatcagggtagatcccgcgaaactgcgacgcagtccgcgcccaatgtctccttgactgatcagacgtttaaattgcatgacataaagctttttcacaatttcactaccaatgtctgccaggacctatctgcagatggcgccaacgtatctctacgcttcggcgaagccattgtcaaacagtcgttcgaccggccctacttaatggaacaattactggcactctctgcagcgcacatgggcactcaagcgctacacgacgcgtctttctaccgccacgaagcgactcgtcggcagacacgggctttgaccatgttcagtctctcaccaaatgcgaaagccgaggatgagtgtcttccagcgtttctattctcaatccttctgtgctaccatgctctcttcgacgccctagctagtcgtgctgattttgccatcttcttggacgagctgacgaaggggttccgcttgtgcggcggagtaagggtcatggctggtagggactttgagtctcttgcaacggaatatcgccagcaaacgggatcggagcttctgggcatggaacatgtctggagttcatcacaaactggactcggtaccgtcttctcgaccaaattccatcctgtccgacgcctcttggaagataaagatgtcagccctactatctcaaaaccgtgtttcgctgcactggacttgctttgtgctctccctgcccttgacgctgcacacaagacgtcgccaggattcaaggcccttcgtgtgctacggtggatggtcactgtgccatcagaattcgtcaagctcgtcgagcagcgacgggccgaggcgttagtaataatggcttactacggggtcgtcgtacacgaagcaagagagtcctgggtatttggcgatgccggcgcgtttattattcgaagcaccgttgacttcctcggcaactactgggccccgtggctggcatggccgatagaggtaatgagtggctctgctatgactacactttgaatacgtcgccattatgctcaatttcgacctgtttctgctcaagtccaactcggtgagaagttctgagtcctatgagagcaatgaaacacaccaatagcatccatccaaatgcaagccagaacgcggctgagtatccctctctcaaggcttgtgattccggagcatagttatgcttatgcttggccgcttggatgatttcatccgacaatacgcccgtcagggcaaggccgagcgatatgccgaattggcttgcagtattgaacacggctccagcaagggactgcgtgtcgctggggaaaacttcgctcgctactactaaaccaacgcaaaacagcacgtctatagaagcctaatcattattagagaagtcagcgtccacgccaaatcgcggttgacaacttgaaccatgtcccactcaccggctgtaaaagctgagcagggaacgacgcccaccaatacggccactctggatttgcgagagccatgatcagcgacgcaccagaacaaagtaacgaagatgaaagcaccaaatatttaggtgaggtatggtgcacgaagaacccagtcgacagcccgatgatagacccgacaaccaggtttggcagctgctgaagtgatgactgcaagggactgactccctgcagattctgaaagaataatgtgcagaagagctccattgtctgcaatgcaccatatgccagcagtatcattacgcagacgcttgcaaatgccttttctttccagagatggctgggaatgaggatcggcaaccccttcttcgtcgcaatatgctgccagtatgcaaacatcaagaacagacccatgctgatggcaagcaaggcgatattcttgggtacgtggatggcattcccgtatcctgacacctcgcccagtacatatgcgagcatagcgagagctgtagagataatcactgcgccgacccaatcagtcccagtacgcaagttgtgaagcattcgaggttgatcgatcctgtctctcggcaagaagtaaagagccgcaacgaagaggaagaacgacattgctgaagcgatgaaccatcccgcccgccatcctaatgtattcacgaaaagaccgccgaggacaaggcccattgagtagcctagcaattggccgagtccggtgcacgcaagccctacgttccggaggcgccctggggcaaccgcatttgtcaaaattccaatagtcgtcggcaggcagagcgcaacggaaatgccctgaaaggcgcggaacataatcagttgtatgtcggtcttggccaagccgcaggctaaaatgaaacccgattgtaagaaagcacccgtcagaaacacgactccggaaccgattgcatctgccacagagccggagatgaggagcatcgcgccgcttgttaacccataaacggacagcgacccgtcgagacgctagctgtgaatgccactagagacagtacgaatatgaccgggtacgcagaagatcgcgcaagataaatctgctcgctgttgcctatcacgggtcctggtttgagaggagagagatctacacccgtagagctttcgcatgagaccgtgtcttcgctgaacggtacaagcttggctgtagaagcattctctgatgacgacatctccgcgctttgatcggtagatcaagatgatctcagaggacaagtagggctgatactggcataaaataacattttccatcgagaacatgaagcaaaaagtacagcagagacaatagtagagggataatcctgcaagcgacgttcgtgtttatgccgcgggaaccggctcgataccacttcggctcctgtggatacagatacaacatggcgaatctctacgaatcggcccataggacacagaagcccaagggtcctccattaggagtcggtataggcgactgtcttatggggtccagaattatgtaacattttcgtgttgtaatgcagatttcacagcctcagttgtaactaatagacatgcaaagggcaaccaatgatatctcccctaaatggttactaagcggcataatcctttaagcaagaaatccatcgttccagacgctacaaatacggaatagggtggcatcgcat

SEQ ID NO: 38105 - DNA, 798 bp, Muscodor strobelii
  misc_feature: SGI cDNA ID NO. 573236
  misc_feature: Encodes the peptide sequence at SEQ ID NO 38106
atggaacaattactggcactctctgcagcgcacatgggcactcaagcgctacacgacgcgtctttctaccgccacgaagcgactcgtcggcagacacgggctttgaccatgttcagtctctcaccaaatgcgaaagccgaggatgagtgtcttccagcgtttctattctcaatccttctgtgctaccatgctctcttcgacgccctagctagtcgtgctgattttgccatcttcttggacgagctgacgaaggggttccgcttgtgcggcggagtaagggtcatggctggtagggactttgagtctcttgcaacggaatatcgccagcaaacgggatcggagcttctgggcatggaacatgtctggagttcatcacaaactggactcggtaccgtcttctcgaccaaattccatcctgtccgacgcctcttggaagataaagatgtcagccctactatctcaaaaccgtgtttcgctgcactggacttgctttgtgctctccctgcccttgacgctgcacacaagacgtcgccaggattcaaggcccttcgtgtgctacggtggatggtcactgtgccatcagaattcgtcaagctcgtcgagcagcgacgggccgaggcgttagtaataatggcttactacggggtcgtcgtacacgaagcaagagagtcctgggtatttggcgatgccggcgcgtttattattcgaagcaccgttgacttcctcggcaactactgggccccgtggctggcatggccgatagaggtaatgagtggctctgctatgactacactttga

SEQ ID NO: 38106 - protein, 265 aa, Muscodor strobelii
  misc_feature: SGI Peptide ID NO. 573236
  misc_feature (1)..(258): NCBI GI: 70985839 Blast Desc: conserved [Aspergillus fumigatus Af293] gi|66846054|gb|EAL86387.1| conserved [Aspergillus fumigatus Af293] gi|159128439|gb|EDP53554.1| conserved [Aspergillus A1163]
  misc_feature (1)..(258): NCBI GI: 119473723 Blast Desc: NFIA_001890 [Neosartorya fischeri NRRL 181] gi|119406890|gb|EAW16840.1| conserved [Neosartorya fischeri NRRL 181]
  misc_feature (1)..(264): NCBI GI: 119484956 Blast Desc: NFIA_098530 [Neosartorya fischeri NRRL 181] gi|119410276|gb|EAW20223.1| conserved [Neosartorya fischeri NRRL 181]
  misc_feature (1)..(264): NCBI GI: 159123619 Blast Desc: C6 finger domain protein, [Aspergillus fumigatus A1163]
  misc_feature (1)..(264): NCBI GI: 70983698 Blast Desc: C6 finger domain protein [Aspergillus fumigatus Af293] gi|66845002|gb|EAL85338.1| C6 finger domain protein, [Aspergillus fumigatus Af293]
  misc_feature (1)..(260): NCBI GI: 115390154 Blast Desc: conserved [Aspergillus terreus NIH2624] gi|114194978|gb|EAU36678.1| conserved [Aspergillus terreus NIH2624]
  misc_feature (22)..(265): NCBI GI: 169776792 Blast Desc: [Aspergillus oryzae RIB40] gi|83771598|dbj|BAE61729.1| protein product [Aspergillus oryzae]
  misc_feature (1)..(257): NCBI GI: 169594848 Blast Desc: SNOG_00153 [Phaeosphaeria nodorum SN15] gi|111070528|gb|EAT91648.1| SNOG_00153 [Phaeosphaeria nodorum SN15]
  misc_feature (1)..(261): NCBI GI: 256729968 Blast Desc: NECHADRAFT_45340 [Nectria haematococca mpVI 77-13-4]
  misc_feature (22)..(265): NCBI GI: 238502119 Blast Desc: conserved [Aspergillus flavus NRRL3357] gi|220691103|gb|EED47451.1| conserved [Aspergillus flavus NRRL3357]
MEQLLALSAAHMGTQALHDASFYRHEATRRQTRALTMFSLSPNAKAEDECLPAFLFSILLCYHALFDALASRADFAIFLDELTKGFRLCGGVRVMAGRDFESLATEYRQQTGSELLGMEHVWSSSQTGLGTVFSTKFHPVRRLLEDKDVSPTISKPCFAALDLLCALPALDAAHKTSPGFKALRVLRWMVTVPSEFVKLVEQRRAEALVIMAYYGVVVHEARESWVFGDAGAFIIRSTVDFLGNYWAPWLAWPIEVMSGSAMTTL

SEQ ID NO: 38107 - DNA, 2682 bp, Muscodor strobelii
  misc_feature: SGI EST ID NO. CUFF.91333.1
  misc_feature: Variant of the nucleotide sequence at SEQ ID NO 38105
cctgtcgcaattgtcagattcgcctattagattgctcctttatcgcgactcttagtgtcaagttaccgtcttcccagaatgtctcgatcctttcacctaatcctgccccacgtgacgaaacaccttcatcgctagcacagcttcaaatagctcattcagccacgcctagttgtcgtacatcacggtcgcgttcgcctcacgagtcgcagaaggatagccaatatggccatcaacttgatcagggtagatcccgcgaaactgcgacgcagtccgcgcccaatgtctccttgactgatcagacgtttaaattgcatgacataaagctttttcacaatttcactaccaatgtctgccaggacctatctgcagatggcgccaacgtatctctacgcttcggcgaagccattgtcaaacagtcgttcgaccggccctacttaatggaacaattactggcactctctgcagcgcacatgggcactcaagcgctacacgacgcgtctttctaccgccacgaagcgactcgtcggcagacacgggctttgaccatgttcagtctctcaccaaatgcgaaagccgaggatgagtgtcttccagcgtttctattctcaatccttctgtgctaccatgctctcttcgacgccctagctagtcgtgctgattttgccatcttcttggacgagctgacgaaggggttccgcttgtgcggcggagtaagggtcatggctggtagggactttgagtctcttgcaacggaatatcgccagcaaacgggatcggagcttctgggcatggaacatgtctggagttcatcacaaactggactcggtaccgtcttctcgaccaaattccatcctgtccgacgcctcttggaagataaagatgtcagccctactatctcaaaaccgtgtttcgctgcactggacttgctttgtgctctccctgcccttgacgctgcacacaagacgtcgccaggattcaaggcccttcgtgtgctacggtggatggtcactgtgccatcagaattcgtcaagctcgtcgagcagcgacgggccgaggcgttagtaataatggcttactacggggtcgtcgtacacgaagcaagagagtcctgggtatttggcgatgccggcgcgtttattattcgaagcaccgttgacttcctcggcaactactgggccccgtggctggcatggccgatagaggtaatgagtggctctgctatgactacactttgaatacgtcgccattatgctcaatttcgacctgtttctgctcaagtccaactcggtgagaagttctgagtcctatgagagcaatgaaacacaccaatagcatccatccaaatgcaagccagaacgcggctgagtatccctctctcaaggcttgtgattccggagcatagttatgcttatgcttggccgcttggatgatttcatccgacaatacgcccgtcagggcaaggccgagcgatatgccgaattggcttgcagtattgaacacggctccagcaagggactgcgtgtcgctggggaaaacttcgctcgctactactaaaccaacgcaaaacagcacgtctatagaagcctaatcattattagagaagtcagcgtccacgccaaatcgcggttgacaacttgaaccatgtcccactcaccggctgtaaaagctgagcagggaacgacgcccaccaatacggccactctggatttgcgagagccatgatcagcgacgcaccagaacaaagtaacgaagatgaaagcaccaaatatttaggtgaggtatggtgcacgaagaacccagtcgacagcccgatgatagacccgacaaccaggtttggcagctgctgaagtgatgactgcaagggactgactccctgcagattctgaaagaataatgtgcagaagagctccattgtctgcaatgcaccatatgccagcagtatcattacgcagacgcttgcaaatgccttttctttccagagatggctgggaatgaggatcggcaaccccttcttcgtcgcaatatgctgccagtatgcaaacatcaagaacagacccatgctgatggcaagcaaggcgatattcttgggtacgtggatggcattcccgtatcctgacacctcgcccagtacatatgcgagcatagcgagagctgtagagataatcactgcgccgacccaatcagtcccagtacgcaagttgtgaagcattcgaggttgatcgatcctgtctctcggcaagaagtaaagagccgcaacgaagaggaagaacgacattgctgaagcgatgaaccatcccgcccgccatcctaatgtattcacgaaaagaccgccgaggacaaggcccattgagtagcctagcaattggccgagtccggtgcacgcaagccctacgttccggaggcgccctggggcaaccgcatttgtcaaaattccaatagtcgtcggcaggcagagcgcaacggaaatgccctgaaaggcgcggaacataatcagttgtatgtcggtcttggccaagccgcaggctaaaatgaaacccgattgtaagaaagcacccgtcagaaacacgactccggaaccgattgcatctgccacagagccggagatgaggagcatcgcgccgcttgttaacccataaacggacagcggtaagtatgatctgctcggtggtatcgacaagtctg

SEQ ID NO: 38108 - DNA, 1977 bp, Muscodor strobelii
  misc_feature: SGI cDNA ID NO. 573237
  misc_feature: Encodes the peptide sequence at SEQ ID NO 38109
atgaatctcaactatgctatctcaaaagcatccccttactgcgcttttatgcactccatgatgcgtttttgctcggtattgcaacttgcttcggtgctgccttggctcaccaccgcgcgaggcgaactccctgtcgctcatcggaacgtgatgagagatggcacaacgacgccgcccatccccgagcccgtcgaagtcactgagttgacaatacccccgtctctctggtctacagctgaaggcgcatgtacctccgagatcaatctcagcggcacgggatgcatttatcccgatactttggaaagcggcagcttcactcccgatgggctacatgttgtggctacggccaacctcaccggcgctccagctgcaccagatccgtcgagtatttacacaggtattcagttgttcctgctcaaagcggatggcactacgtttccaaatggtgacgcctggaaatgtatcacctgtggtgtcccagccggaaaccaaatgagcgcaacaacactagcaggttatccacaaacctttagagatgggaggagaattttagctggtaccaacatcgtcagctgcggtgaaagcctgctctcgagcgaagagtgcacgccagataaggtttttatctacccgcttcgcttgagcgctactaaagatgacgatggtaccggcaccggccttcctctgcgcgagcttcgacttcacccggataatgttcatttaacactgaacagtttcactgccacgccttcaggtgtgttgtcacaattggcgttattcggtcgtctttccttcaacgacaccggctcccgatacgacgttatcaatgtgacaatcctaagcaatccttacaaccccggccctttcagcgtcgaggacaacgttttgacgttcaatcgctcttctattaccgtgggcgagcttcgcggactgactggcactggagaagagatagtgtatgtaggaaacccctgggagtcatccaacatcgacctctttgccgcacacctgaccacgggcgcggttcgtcgcataacagcccatcccgaatacactgaccctattgctgtctcacccgacgaccaatggcaagttgtgctcgacacgcgtggatccgaccgacaagagtttctcgctgccgttcggtcgattccgcccctcaccgaccttgtcacgacggcctcggtctcgtccgtacgaaacaacggagttcgtcggttctttcagcctatcctactagatcatgatggggatcgtggagactacttcggccaacagctcaacaacgagtctcgtgaggtgccaggcgatgtcggggatcctaattggaatgcgggggccgatccccgatggtcctatgatgggacgaaggtcgtctactatcaaatgcttgcactaccgcccgcttgtggaggatcaaaccctctcgcctgtgaagcttcgccatacggggacaaaagggcgcgacgtatcatggttgctacgctgacctcacgcgaaccactcccggttgtggacattccagaacactcggacgacataccctggggactcaaatacaccccaggaatgactatccctgatccctctggtgttttaacgttcccgactggcgattacgttctcgaaggtctatcaagcggcagcgccaatgtgagcattgccttggaccccactggctctatcttcgagagcgtagcagtggcttataacaactactctgacgacggcctgaatttcattcatggcagcgagagcgttgtcggtacacctgtcaacgcaactctcactctcctggactggaactcgaacataacgtcgaccaccgcttgcggtagcattatcggaactaagttgacaagcccaggaggattccagctctctgtcgatgttctctttaacttcttcgaggccaatgggacacttgtcagcacggttgatggaatctcgtatcatcagccttgtaacttctgctag

SEQ ID NO: 38109 - protein, 658 aa, Muscodor strobelii
  misc_feature: SGI Peptide ID NO. 573237
  misc_feature (17)..(656): NCBI GI: 115386572 Blast Desc: ATEG_07141 [Aspergillus terreus NIH2624] gi|114190825|gb|EAU32525.1| ATEG_07141 [Aspergillus terreus NIH2624]
  misc_feature (58)..(656): NCBI GI: 169765021 Blast Desc: [Aspergillus oryzae RIB40] gi|83764836|dbj|BAE54980.1| protein product [Aspergillus oryzae]
  misc_feature (58)..(656): NCBI GI: 82943650 Blast Desc: saponin hydrolase precursor [Aspergillus oryzae]
  misc_feature (21)..(656): NCBI GI: 255939806 Blast Desc: Pc16g03030 [Penicillium chrysogenum Wisconsin 54-1255] gi|211585295|emb|CAP92973.1| Pc16g03030 [Penicillium chrysogenum Wisconsin 54-1255]
  misc_feature (58)..(656): NCBI GI: 238503698 Blast Desc: conserved [Aspergillus flavus NRRL3357] gi|220690552|gb|EED46901.1| conserved [Aspergillus flavus NRRL3357]
  misc_feature (64)..(656): NCBI GI: 255940728 Blast Desc: Pc16g08110 [Penicillium chrysogenum Wisconsin 54-1255] gi|211585756|emb|CAP93481.1| Pc16g08110 [Penicillium chrysogenum Wisconsin 54-1255]
  misc_feature (58)..(656): NCBI GI: 159130217 Blast Desc: conserved [Aspergillus fumigatus A1163]
  misc_feature (58)..(656): NCBI GI: 119473387 Blast Desc: NFIA_060520 [Neosartorya fischeri NRRL 181] gi|119406745|gb|EAW16696.1| conserved [Neosartorya fischeri NRRL 181]
  misc_feature (58)..(656): NCBI GI: 70992965 Blast Desc: conserved [Aspergillus fumigatus Af293] gi|66848964|gb|EAL89293.1| conserved [Aspergillus fumigatus Af293]
  misc_feature (55)..(656): NCBI GI: 82943652 Blast Desc: saponin hydrolase precursor [Eupenicillium brefeldianum]
MNLNYAISKASPYCAFMHSMMRFCSVLQLASVLPWLTTARGELPVAHRNVMRDGTTTPPIPEPVEVTELTIPPSLWSTAEGACTSEINLSGTGCIYPDTLESGSFTPDGLHVVATANLTGAPAAPDPSSIYTGIQLFLLKADGTTFPNGDAWKCITCGVPAGNQMSATTLAGYPQTFRDGRRILAGTNIVSCGESLLSSEECTPDKVFIYPLRLSATKDDDGTGTGLPLRELRLHPDNVHLTLNSFTATPSGVLSQLALFGRLSFNDTGSRYDVINVTILSNPYNPGPFSVEDNVLTFNRSSITVGELRGLTGTGEEIVYVGNPWESSNIDLFAAHLTTGAVRRITAHPEYTDPIAVSPDDQWQVVLDTRGSDRQEFLAAVRSIPPLTDLVTTASVSSVRNNGVRRFFQPILLDHDGDRGDYFGQQLNNESREVPGDVGDPNWNAGADPRWSYDGTKVVYYQMLALPPACGGSNPLACEASPYGDKRARRIMVATLTSREPLPVVDIPEHSDDIPWGLKYTPGMTIPDPSGVLTFPTGDYVLEGLSSGSANVSIALDPTGSIFESVAVAYNNYSDDGLNFIHGSESVVGTPVNATLTLLDWNSNITSTTACGSIIGTKLTSPGGFQLSVDVLFNFFEANGTLVSTVDGISYHQPCNFC

SEQ ID NO: 38110 - DNA, 4189 bp, Muscodor strobelii
  misc_feature: SGI EST ID NO. CUFF.91337.0
  misc_feature: Variant of the nucleotide sequence at SEQ ID NO 38108
aaaagcttctgcctacgtatgccgttgccgatgttacaatggtgctgcaaatttcgcgaaatgagcataatgcttcaaacatgaatacgatgaggcttcacgtcgcgatggtccgcatcgaagatcgggacagtagatataaaaccatcggctcgccaacctcatcgacatgatgaatctcaactatgctatctcaaaagcatccccttactgcgcttttatgcactccatgatgcgtttttgctcggtattgcaacttgcttcggtgctgccttggctcaccaccgcgcgaggcgaactccctgtcgctcatcggaacgtgatgagagatggcacaacgacgccgcccatccccgagcccgtcgaagtcactgagttgacaatacccccgtctctctggtctacagctgaaggcgcatgtacctccgagatcaatctcagcggcacgggatgcatttatcccgatactttggaaagcggcagcttcactcccgatgggctacatgttgtggctacggccaacctcaccggcgctccagctgcaccagatccgtcgagtatttacacaggtattcagttgttcctgctcaaagcggatggcactacgtttccaaatggtgacgcctggaaatgtatcacctgtggtgtcccagccggaaaccaaatgagcgcaacaacactagcaggttatccacaaacctttagagatgggaggagaattttagctggtaccaacatcgtcagctgcggtgaaagcctgctctcgagcgaagagtgcacgccagataaggtttttatctacccgcttcgcttgagcgctactaaagatgacgatggtaccggcaccggccttcctctgcgcgagcttcgacttcacccggataatgttcatttaacactgaacagtttcactgccacgccttcaggtgtgttgtcacaattggcgttattcggtcgtctttccttcaacgacaccggctcccgatacgacgttatcaatgtgacaatcctaagcaatccttacaaccccggccctttcagcgtcgaggacaacgttttgacgttcaatcgctcttctattaccgtgggcgagcttcgcggactgactggcactggagaagagatagtgtatgtaggaaacccctgggagtcatccaacatcgacctctttgccgcacacctgaccacgggcgcggttcgtcgcataacagcccatcccgaatacactgaccctattgctgtctcacccgacgaccaatggcaagttgtgctcgacacgcgtggatccgaccgacaagagtttctcgctgccgttcggtcgattccgcccctcaccgaccttgtcacgacggcctcggtctcgtccgtacgaaacaacggagttcgtcggttctttcagcctatcctactagatcatgatggggatcgtggagactacttcggccaacagctcaacaacgagtctcgtgaggtgccaggcgatgtcggggatcctaattggaatgcgggggccgatccccgatggtcctatgatgggacgaaggtcgtctactatcaaatgcttgcactaccgcccgcttgtggaggatcaaaccctctcgcctgtgaagcttcgccatacggggacaaaagggcgcgacgtatcatggttgctacgctgacctcacgcgaaccactcccggttgtggacattccagaacactcggacgacataccctggggactcaaatacaccccaggaatgactatccctgatccctctggtgttttaacgttcccgactggcgattacgttctcgaaggtctatcaagcggcagcgccaatgtgagcattgccttggaccccactggctctatcttcgagagcgtagcagtggcttataacaactactctgacgacggcctgaatttcattcatggcagcgagagcgttgtcggtacacctgtcaacgcaactctcactctcctggactggaactcgaacataacgtcgaccaccgcttgcggtagcattatcggaactaagttgacaagcccaggaggattccagctctctgtcgatgttctctttaacttcttcgaggccaatgggacacttgtcagcacggttgatggaatctcgtatcatcagccttgtaacttctgctagatgatctttagcgagctatattggactgcatgcactggaacaagggaactgaagcgctacccttcaacacgtactaattgttttcctgcgaagtattcagtattctgtcttttatacctcctagtgagctttacttctttacacgtacgatacgctttcgaatccattgctaaccctgcaatgcatatgtgtcttatggcccctctgcaatctctgcgctgctgtcgttgtattatttcaaattctgtgatttcacccttgtcctcttgttcataagtcttcgtctacataccatttgtttccatctcaattcctaccagcagcagtgctacagtgtgaatttacattggacagccagcatagtaagcggtatccatcttctgtgggaacgtaaacgactttaaggaagcagttactctcccaatttgaaaccacccgtcatgtgtcgctgaaacactctatccgaatcatatttccgcgaaatctctagcagctgttgacgattgtcatcgccgtacccgtttaacacattttgtacctgaaaccacgccgcatcgttcatataaatgaagggatcgtggacgcccaccgctcgcgtagcattagcaatcacgtcctctgttgcctgaacccatgttcggacagcttctgtgtatcgatcatcattccaaacaactgtcgctacccaagccagatacgagcccttgctcggatcaagcccgattgcgttactcccaggagcagatgctgacatcatcaagttggtgaaaggttgccatccgatctcgatgacctctatagcttcggcgggcacagtagcgtatagttccgcgtgttggcccagccatgcttcccagacgacagtgtgacccagtaagagctcttcatacgtgctaccaacggtcgatccggcgaacagaacgtcgttgacattgggtatcgcccatgagtcccgttcaatcgtgaattctgcattcgtcttgaacgccacagtgctatttgtcgctggtatggcgagaaactcttctaaggcagcaggatgttcttccgtagaactatcgtaccacagagcgagtccaatagtagttttgttagcaatggtgtcgactaggggcaggatatgagccttcgggtcagtgtagtatgctgcaaatcttgcagaagcctgttctgtattcagcccatgcaccgtgtgtgtaggcttccaagaaatgccaagacctacctccatgacctcttcgaggttcgctccatcaattgtgtatatgcccgctaagacttgtgtcgaagggacagttttcagtttgaaattcgttacaattccaaaattgggacctccgcctttcaatgcccaggcaaggtcagcatagcaatttttgctagcaaccacaatatctccatttgccaagacaatttcgtattcgagcacattgtctgctccccagcctacttcattgccatggtagcttattccaccgccgagcaagaagccgggaacaccgacgggcgcaacacgtccgccgaccgctgtgcgcttgaacggcgctaggtacgtgtagacctcgctccagcgccaccctgggccaacgtcaacactgagcagatcttccgagatctgcaatctagtcatgttagacatcacaatcaaaatgccatcgttaacattattcgcgccgggtattggcatgtgcccacctccacgcacagcgaacgggacttcatctttgatagcttgtgtaatgaccgacgagatgtcctcggcgcacgtcggccggaccatacagcttggtgataagatctcggtgttcgaccagaaatttgatgactcatactcgtagacaacactcccaggaagaaagactttggaaacaagagagcgactgagcgctgtgcatgcgctttcgcgtgcagaaagcgagtagactcccttgccatataggttgaaaaggcccaggacgcaaagaaagatattcgggtatctcatcgtcaatgatgcgatacagcgttatctcgacaatactatttcaataggaagttctc

SEQ ID NO: 38111 - DNA, 1572 bp, Muscodor strobelii
  misc_feature: SGI cDNA ID NO. 573238
  misc_feature: Elevated expression when VOC is produced
  misc_feature: Encodes the peptide sequence at SEQ ID NO 38112
atgagatacccgaatatctttctttgcgtcctgggccttttcaacctatatggcaagggagtctactcgctttctgcacgcgaaagcgcatgcacagcgctcagtcgctctcttgtttccaaagtctttcttcctgggagtgttgtctacgagtatgagtcatcaaatttctggtcgaacaccgagatcttatcaccaagctgtatggtccggccgacgtgcgccgaggacatctcgtcggtcattacacaagctatcaaagatgaagtcccgttcgctgtgcgtggaggtgggcacatgccaatacccggcgcgaataatgttaacgatggcattttgattgtgatgtctaacatgactagattgcagatctcggaagatctgctcagtgttgacgttggcccagggtggcgctggagcgaggtctacacgtacctagcgccgttcaagcgcacagcggtcggcggacgtgttgcgcccgtcggtgttcccggcttcttgctcggcggtggaataagctaccatggcaatgaagtaggctggggagcagacaatgtgctcgaatacgaaattgtcttggcaaatggagatattgtggttgctagcaaaaattgctatgctgaccttgcctgggcattgaaaggcggaggtcccaattttggaattgtaacgaatttcaaactgaaaactgtcccttcgacacaagtcttagcgggcatatacacaattgatggagcgaacctcgaagaggtcatggaggtaggtcttggcatttcttggaagcctacacacacggtgcatgggctgaatacagaacaggcttctgcaagatttgcagcatactacactgacccgaaggctcatatcctgcccctagtcgacaccattgctaacaaaactactattggactcgctctgtggtacgatagttctacggaagaacatcctgctgccttagaagagtttctcgccataccagcgacaaatagcactgtggcgttcaagacgaatgcagaattcacgattgaacgggactcatgggcgatacccaatgtcaacgacgttctgttcgccggatcgaccgttggtagcacgtatgaagagctcttactgggtcacactgtcgtctgggaagcatggctgggccaacacgcggaactatacgctactgtgcccgccgaagctatagaggtcatcgagatcggatggcaacctttcaccaacttgatgatgtcagcatctgctcctgggagtaacgcaatcgggcttgatccgagcaagggctcgtatctggcttgggtagcgacagttgtttggaatgatgatcgatacacagaagctgtccgaacatgggttcaggcaacagaggacgtgattgctaatgctacgcgagcggtgggcgtccacgatcccttcatttatatgaacgatgcggcgtggtttcaggtacaaaatgtgttaaacgggtacggcgatgacaatcgtcaacagctgctagagatttcgcggaaatatgattcggatagagtgtttcagcgacacatgacgggtggtttcaaattgggagagtaa

SEQ ID NO: 38112 - protein, 523 aa, Muscodor strobelii
  misc_feature: SGI Peptide ID NO. 573238
  misc_feature (66)..(202): Pfam Id: PF01565 Pfam Desc: FAD binding domain
  misc_feature (31)..(522): NCBI GI: 261357103 Blast Desc: FAD binding domain-containing protein [Verticillium albo-atrum VaMs.102]
  misc_feature (31)..(522): NCBI GI: 154296896 Blast Desc: BC1G_12537 [Botryotinia fuckeliana B05.10] gi|150843191|gb|EDN18384.1| BC1G_12537 [Botryotinia fuckeliana B05.10]
  misc_feature (3)..(523): NCBI GI: 46103667 Blast Desc: FG00100.1 [Gibberella zeae PH-1]
  misc_feature (31)..(521): NCBI GI: 145231464 Blast Desc: An02g00740 [Aspergillus niger] gi|134056114|emb|CAK96289.1| protein product [Aspergillus niger]
  misc_feature (16)..(521): NCBI GI: 115383714 Blast Desc: conserved [Aspergillus terreus NIH2624] gi|114196096|gb|EAU37796.1| conserved [Aspergillus terreus NIH2624]
  misc_feature (13)..(521): NCBI GI: 169772357 Blast Desc: [Aspergillus oryzae RIB40] gi|83768508|dbj|BAE58645.1| protein product [Aspergillus oryzae]
  misc_feature (13)..(521): NCBI GI: 238490256 Blast Desc: 6-hydroxy-D-nicotine oxidase, [Aspergillus flavus NRRL3357] gi|220696778|gb|EED53119.1| 6-hydroxy-D-nicotine oxidase, [Aspergillus flavus NRRL3357]
  misc_feature (12)..(523): NCBI GI: 67523863 Blast Desc: AN2387.2 [Aspergillus nidulans FGSC A4] gi|40745342|gb|EAA64498.1| AN2387.2 [Aspergillus nidulans FGSC A4] gi|259487790|tpe|CBF86739.1| TPA: conserved [Aspergillus FGSC
  misc_feature (28)..(520): NCBI GI: 121716174 Blast Desc: FAD binding domain protein [Aspergillus clavatus NRRL 1] gi|119403853|gb|EAW14270.1| FAD binding domain protein [Aspergillus clavatus NRRL 1]
  misc_feature (29)..(521): NCBI GI: 255954763 Blast Desc: Pc21g11020 [Penicillium chrysogenum Wisconsin 54-1255] gi|211589845|emb|CAP95999.1| Pc21g11020 [Penicillium chrysogenum Wisconsin 54-1255]
  misc_feature: Useful for introducing or modulating the production of volatile compounds
MRYPNIFLCVLGLFNLYGKGVYSLSARESACTALSRSLVSKVFLPGSVVYEYESSNFWSNTEILSPSCMVRPTCAEDISSVITQAIKDEVPFAVRGGGHMPIPGANNVNDGILIVMSNMTRLQISEDLLSVDVGPGWRWSEVYTYLAPFKRTAVGGRVAPVGVPGFLLGGGISYHGNEVGWGADNVLEYEIVLANGDIVVASKNCYADLAWALKGGGPNFGIVTNFKLKTVPSTQVLAGIYTIDGANLEEVMEVGLGISWKPTHTVHGLNTEQASARFAAYYTDPKAHILPLVDTIANKTTIGLALWYDSSTEEHPAALEEFLAIPATNSTVAFKTNAEFTIERDSWAIPNVNDVLFAGSTVGSTYEELLLGHTVVWEAWLGQHAELYATVPAEAIEVIEIGWQPFTNLMMSASAPGSNAIGLDPSKGSYLAWVATVVWNDDRYTEAVRTWVQATEDVIANATRAVGVHDPFIYMNDAAWFQVQNVLNGYGDDNRQQLLEISRKYDSDRVFQRHMTGGFKLGE

SEQ ID NO: 38113 - DNA, 4189 bp, Muscodor strobelii
  misc_feature: SGI EST ID NO. CUFF.91337.0
  misc_feature: Variant of the nucleotide sequence at SEQ ID NO 38111
gagaacttcctattgaaatagtattgtcgagataacgctgtatcgcatcattgacgatgagatacccgaatatctttctttgcgtcctgggccttttcaacctatatggcaagggagtctactcgctttctgcacgcgaaagcgcatgcacagcgctcagtcgctctcttgtttccaaagtctttcttcctgggagtgttgtctacgagtatgagtcatcaaatttctggtcgaacaccgagatcttatcaccaagctgtatggtccggccgacgtgcgccgaggacatctcgtcggtcattacacaagctatcaaagatgaagtcccgttcgctgtgcgtggaggtgggcacatgccaatacccggcgcgaataatgttaacgatggcattttgattgtgatgtctaacatgactagattgcagatctcggaagatctgctcagtgttgacgttggcccagggtggcgctggagcgaggtctacacgtacctagcgccgttcaagcgcacagcggtcggcggacgtgttgcgcccgtcggtgttcccggcttcttgctcggcggtggaataagctaccatggcaatgaagtaggctggggagcagacaatgtgctcgaatacgaaattgtcttggcaaatggagatattgtggttgctagcaaaaattgctatgctgaccttgcctgggcattgaaaggcggaggtcccaattttggaattgtaacgaatttcaaactgaaaactgtcccttcgacacaagtcttagcgggcatatacacaattgatggagcgaacctcgaagaggtcatggaggtaggtcttggcatttcttggaagcctacacacacggtgcatgggctgaatacagaacaggcttctgcaagatttgcagcatactacactgacccgaaggctcatatcctgcccctagtcgacaccattgctaacaaaactactattggactcgctctgtggtacgatagttctacggaagaacatcctgctgccttagaagagtttctcgccataccagcgacaaatagcactgtggcgttcaagacgaatgcagaattcacgattgaacgggactcatgggcgatacccaatgtcaacgacgttctgttcgccggatcgaccgttggtagcacgtatgaagagctcttactgggtcacactgtcgtctgggaagcatggctgggccaacacgcggaactatacgctactgtgcccgccgaagctatagaggtcatcgagatcggatggcaacctttcaccaacttgatgatgtcagcatctgctcctgggagtaacgcaatcgggcttgatccgagcaagggctcgtatctggcttgggtagcgacagttgtttggaatgatgatcgatacacagaagctgtccgaacatgggttcaggcaacagaggacgtgattgctaatgctacgcgagcggtgggcgtccacgatcccttcatttatatgaacgatgcggcgtggtttcaggtacaaaatgtgttaaacgggtacggcgatgacaatcgtcaacagctgctagagatttcgcggaaatatgattcggatagagtgtttcagcgacacatgacgggtggtttcaaattgggagagtaactgcttccttaaagtcgtttacgttcccacagaagatggataccgcttactatgctggctgtccaatgtaaattcacactgtagcactgctgctggtaggaattgagatggaaacaaatggtatgtagacgaagacttatgaacaagaggacaagggtgaaatcacagaatttgaaataatacaacgacagcagcgcagagattgcagaggggccataagacacatatgcattgcagggttagcaatggattcgaaagcgtatcgtacgtgtaaagaagtaaagctcactaggaggtataaaagacagaatactgaatacttcgcaggaaaacaattagtacgtgttgaagggtagcgcttcagttcccttgttccagtgcatgcagtccaatatagctcgctaaagatcatctagcagaagttacaaggctgatgatacgagattccatcaaccgtgctgacaagtgtcccattggcctcgaagaagttaaagagaacatcgacagagagctggaatcctcctgggcttgtcaacttagttccgataatgctaccgcaagcggtggtcgacgttatgttcgagttccagtccaggagagtgagagttgcgttgacaggtgtaccgacaacgctctcgctgccatgaatgaaattcaggccgtcgtcagagtagttgttataagccactgctacgctctcgaagatagagccagtggggtccaaggcaatgctcacattggcgctgccgcttgatagaccttcgagaacgtaatcgccagtcgggaacgttaaaacaccagagggatcagggatagtcattcctggggtgtatttgagtccccagggtatgtcgtccgagtgttctggaatgtccacaaccgggagtggttcgcgtgaggtcagcgtagcaaccatgatacgtcgcgcccttttgtccccgtatggcgaagcttcacaggcgagagggtttgatcctccacaagcgggcggtagtgcaagcatttgatagtagacgaccttcgtcccatcataggaccatcggggatcggcccccgcattccaattaggatccccgacatcgcctggcacctcacgagactcgttgttgagctgttggccgaagtagtctccacgatccccatcatgatctagtaggataggctgaaagaaccgacgaactccgttgtttcgtacggacgagaccgaggccgtcgtgacaaggtcggtgaggggcggaatcgaccgaacggcagcgagaaactcttgtcggtcggatccacgcgtgtcgagcacaacttgccattggtcgtcgggtgagacagcaatagggtcagtgtattcgggatgggctgttatgcgacgaaccgcgcccgtggtcaggtgtgcggcaaagaggtcgatgttggatgactcccaggggtttcctacatacactatctcttctccagtgccagtcagtccgcgaagctcgcccacggtaatagaagagcgattgaacgtcaaaacgttgtcctcgacgctgaaagggccggggttgtaaggattgcttaggattgtcacattgataacgtcgtatcgggagccggtgtcgttgaaggaaagacgaccgaataacgccaattgtgacaacacacctgaaggcgtggcagtgaaactgttcagtgttaaatgaacattatccgggtgaagtcgaagctcgcgcagaggaaggccggtgccggtaccatcgtcatctttagtagcgctcaagcgaagcgggtagataaaaaccttatctggcgtgcactcttcgctcgagagcaggctttcaccgcagctgacgatgttggtaccagctaaaattctcctcccatctctaaaggtttgtggataacctgctagtgttgttgcgctcatttggtttccggctgggacaccacaggtgatacatttccaggcgtcaccatttggaaacgtagtgccatccgctttgagcaggaacaactgaatacctgtgtaaatactcgacggatctggtgcagctggagcgccggtgaggttggccgtagccacaacatgtagcccatcgggagtgaagctgccgctttccaaagtatcgggataaatgcatcccgtgccgctgagattgatctcggaggtacatgcgccttcagctgtagaccagagagacgggggtattgtcaactcagtgacttcgacgggctcggggatgggcggcgtcgttgtgccatctctcatcacgttccgatgagcgacagggagttcgcctcgcgcggtggtgagccaaggcagcaccgaagcaagttgcaataccgagcaaaaacgcatcatggagtgcataaaagcgcagtaaggggatgcttttgagatagcatagttgagattcatcatgtcgatgaggttggcgagccgatggttttatatctactgtcccgatcttcgatgcggaccatcgcgacgtgaagcctcatcgtattcatgtttgaagcattatgctcatttcgcgaaatttgcagcaccattgtaacatcggcaacggcatacgtaggcagaagctttt

SEQ ID NO: 38114 - DNA, 1716 bp, Muscodor strobelii
  misc_feature: SGI cDNA ID NO. 573239
  misc_feature: Encodes the peptide sequence at SEQ ID NO 38115
atgtacctagcaactgagctgcctgttaatcctatggccgttgtctcacttgccgggatcgttgttctctcggcgacgatcgcctggtctacctactctgccttttgcatcttgatcaactatcgctctgctaaaaaaattggtctacctattcgcattcttccaattagccatggtaatccgttttggcaaatcgtggaccgcaacattactgccctgctcagaaacatccctatgataggtgacaacaactttactaggttcaattggcgagggtgggaggtccgagataggtttcggtcgcatatggagatgggagatgcttacgtacacgtcacgccaggaagaaactgggtgtacctttgtaatagcaacagtctactcgatgtgttacgacgacgatccgattttcctcgaccgttagaactatatagactcctcgacatattcggcgcgaatcttgcgacagtcgatggtcagcagtggaggaaacagcgaaagattacggcatcttgttttaacgagtctactaatgagattgtgtggaatgaaagtctcacacttgccactgacatgttgaagttctggtctaccaaggaagctgtgagcacgactgcggatgatgttcgcactctatcacttcacgtcctatcgagggccgggtttggaagaacgttcaagtttcagagtcaagctgatcacggccctgaaagcaccaatccagaactaaactacaaagagtctctgaaggtggttctggataattgtataattataatggctttgggtaccaagtttctttcccggccttggttaccaaacagacttcaaaaggtccacaaagcgtgtgttgcctttcggcgtcacatgacaagtgtttatgaggatgaaaagcgaaaatacacagagggtgcatctttggaccgtaatcttctctcgtctctgatccatacctcgaacgaagaggcaagatcttcgggcgccagtgccggtgtccaagctgggctgactgagaccgaaatttatggtaatatgtttgttttcaatttcgctgggcatgatacaaccgcgcacacactcatgttcgccatcgcttttctcgcagcgaagccacaagttcagaattgggtatctgaagaactacgtgcagtgttctcaaatcgcgggaccgacgagtggaactatcgtgatgatttccctaagctaatacgttgtcaagccgtcctaatggagacggttcgactttacacaccggtaccagttgcgaaatggactgatatgacaacacaaaagctggaaataggcaacagaatcatcgagatacctccggacactatggttattccgagctatgccgcaattcacactcatcctagcgactggggagatgactcactggaatggcgtccggctagatggatcacaaagggagtaaacggcgaagagttcctcaaatcgccccggcgtggtactttcatggcttggtcagaaggagagcgatcatgtcccgggaagaagttctcgcaagtcgaatttgtcgcgaccatggcaattctgttcaaggactggcgtgtgtgcccacagctcatgaagggcgaacggattgagaatgcaagacgtcgcttgcttcgactgatagaagcagactctgcacaggtcttgttgctccagatgctccacccggagcgagcgccgttgtgctggtcgaagatatga

SEQ ID NO: 38115 - protein, 571 aa, Muscodor strobelii
  misc_feature: SGI Peptide ID NO. 573239
  misc_feature (71)..(553): Pfam Id: PF00067 Pfam Desc: Cytochrome P450
  misc_feature (271)..(511): Pfam Id: PF00067 Pfam Desc: Cytochrome P450
  misc_feature (12)..(570): NCBI GI: 171685276 Blast Desc: protein product [Podospora anserina] gi|170942599|emb|CAP68251.1| protein product [Podospora anserina]
  misc_feature (28)..(570): NCBI GI: 156031110 Blast Desc: SS1G_14163 [Sclerotinia sclerotiorum 1980] gi|154700554|gb|EDO00293.1| SS1G_14163 [Sclerotinia sclerotiorum 1980]
  misc_feature (28)..(570): NCBI GI: 154305693 Blast Desc: BC1G_07661 [Botryotinia fuckeliana B05.10] gi|150853180|gb|EDN28372.1| BC1G_07661 [Botryotinia fuckeliana B05.10]
  misc_feature (28)..(568): NCBI GI: 154310459 Blast Desc: BC1G_07150 [Botryotinia fuckeliana B05.10] gi|150851481|gb|EDN26674.1| BC1G_07150 [Botryotinia fuckeliana B05.10]
  misc_feature (20)..(571): NCBI GI: 238485360 Blast Desc: cytochrome P450, [Aspergillus flavus NRRL3357] gi|220698797|gb|EED55136.1| cytochrome P450, [Aspergillus flavus NRRL3357]
  misc_feature (32)..(571): NCBI GI: 145246712 Blast Desc: An12g05360 [Aspergillus niger] gi|134080326|emb|CAK46248.1| protein product [Aspergillus niger]
  misc_feature (27)..(566): NCBI GI: 169785166 Blast Desc: [Aspergillus oryzae RIB40] gi|83775791|dbj|BAE65911.1| protein product [Aspergillus oryzae]
  misc_feature (27)..(566): NCBI GI: 238507582 Blast Desc: cytochrome P450, [Aspergillus flavus NRRL3357] gi|220688511|gb|EED44863.1| cytochrome P450, [Aspergillus flavus NRRL3357]
  misc_feature (32)..(566): NCBI GI: 46110463 Blast Desc: FG02113.1 [Gibberella zeae PH-1]
  misc_feature (147)..(561): NCBI GI: 156065225 Blast Desc: SS1G_00623 [Sclerotinia sclerotiorum 1980] gi|154691482|gb|EDN91220.1| SS1G_00623 [Sclerotinia sclerotiorum 1980]
  misc_feature (112)..(531): SWISSPROT Homolog: EC 1.14.14.1 Unspecific monooxygenase
MYLATELPVNPMAVVSLAGIVVLSATIAWSTYSAFCILINYRSAKKIGLPIRILPISHGNPFWQIVDRNITALLRNIPMIGDNNFTRFNWRGWEVRDRFRSHMEMGDAYVHVTPGRNWVYLCNSNSLLDVLRRRSDFPRPLELYRLLDIFGANLATVDGQQWRKQRKITASCFNESTNEIVWNESLTLATDMLKFWSTKEAVSTTADDVRTLSLHVLSRAGFGRTFKFQSQADHGPESTNPELNYKESLKVVLDNCIIIMALGTKFLSRPWLPNRLQKVHKACVAFRRHMTSVYEDEKRKYTEGASLDRNLLSSLIHTSNEEARSSGASAGVQAGLTETEIYGNMFVFNFAGHDTTAHTLMFAIAFLAAKPQVQNWVSEELRAVFSNRGTDEWNYRDDFPKLIRCQAVLMETVRLYTPVPVAKWTDMTTQKLEIGNRIIEIPPDTMVIPSYAAIHTHPSDWGDDSLEWRPARWITKGVNGEEFLKSPRRGTFMAWSEGERSCPGKKFSQVEFVATMAILFKDWRVCPQLMKGERIENARRRLLRLIEADSAQVLLLQMLHPERAPLCWSKI

SEQ ID NO: 38116 - DNA, 897 bp, Muscodor strobelii
  misc_feature: SGI cDNA ID NO. 573240
  misc_feature: Encodes the peptide sequence at SEQ ID NO 38117
atggacagctccgatgacttcgcctatgtcatgaccatctctctacagccgggtgcaccgcttggtggatcagtcacgcagtatttcatcggtgacttcaacgggacgcatttcgagccccgcgacggcacgacagcccttactgattttgccaaggacaactacgcggcgcaattctttgccaacgtccccgatggcgacaacgccgtgagcctcggttgggcatccaactggcagtacgcgcaggttgtgcccacgggcaatctcgagggctggcgcagtatcatgacgcttccacgcgagcactgggttgagcaagcaccgcgagttggcatggtactcatgtccgagccatacaaccttgcgcccgtagtgggcgagacgctgtgccgcaagacactggacaagaatgactcggttgtgatagactattctgacacggcttcaggtgcggtctatgttgacgttaacgtgacacagcttaacaccacgttggtgtccccatacacgaccctaaatctatccttcagcagcctccagaccggcgagatggtgcagtctggattcttcttctcaggcgacacacctttcttcgtgaaccgtggccaagtaaaggggtttgataacatcttcttcacggataagttcagcgtcgccgacgtctatcagagcagcgattcgaatagtctggcaagttggaggctccaggctattattgatcgcagtatcctcgaattttatgttggtggcggccgccacgccgggactgtgcccttctaccctacgcagcctctgaatctgctttaccttgccacgggagacttgcccagcggtacaaaggtggatatttccatatcggctttgagaagcacttggtctacctctgaagacgcataa

SEQ ID NO: 38117 - protein, 298 aa, Muscodor strobelii
  misc_feature: SGI Peptide ID NO. 573240
  misc_feature (9)..(118): Pfam Id: PF00251 Pfam Desc: Glycosyl hydrolases family 32 N terminal
  misc_feature (8)..(297): NCBI GI: 116205988 Blast Desc: CHGG_02287 [Chaetomium globosum CBS 148.51] gi|88182884|gb|EAQ90352.1| CHGG_02287 [Chaetomium globosum CBS 148.51]
  misc_feature (8)..(292): NCBI GI: 145606150 Blast Desc: MGG_02507 [Magnaporthe grisea 70-15] gi|145013875|gb|EDJ98516.1| MGG_02507 [Magnaporthe grisea 70-15]
  misc_feature (6)..(296): NCBI GI: 46110915 Blast Desc: FG02339.1 [Gibberella zeae PH-1]
  misc_feature (5)..(298): NCBI GI: 169615773 Blast Desc: SNOG_11049 [Phaeosphaeria nodorum SN15] gi|111060428|gb|EAT81548.1| SNOG_11049 [Phaeosphaeria nodorum SN15]
  misc_feature (2)..(293): NCBI GI: 154302020 Blast Desc: BC1G_10247 [Botryotinia fuckeliana B05.10] gi|150855639|gb|EDN30831.1| BC1G_10247 [Botryotinia fuckeliana B05.10]
  misc_feature (5)..(293): NCBI GI: 156051554 Blast Desc: SS1G_07184 [Sclerotinia sclerotiorum 1980] gi|154704962|gb|EDO04701.1| SS1G_07184 [Sclerotinia sclerotiorum 1980]
  misc_feature (5)..(297): NCBI GI: 189209848 Blast Desc: invertase precursor [Pyrenophora tritici-repentis Pt-1C-BFP] gi|187977349|gb|EDU43975.1| invertase precursor [Pyrenophora tritici-repentis Pt-1C-BFP]
  misc_feature (3)..(294): NCBI GI: 58260730 Blast Desc: beta-fructofuranosidase [Cryptococcus neoformans var. neoformans JEC21] gi|134117479|ref|XP_772633.1| CNBK3370 [Cryptococcus neoformans var. neoformans B-3501A] CNBK3370 var.
  misc_feature (3)..(295): NCBI GI: 238494736 Blast Desc: beta-fructofuranosidase, [Aspergillus flavus NRRL3357] gi|220695254|gb|EED51597.1| beta-fructofuranosidase, [Aspergillus flavus NRRL3357]
  misc_feature (3)..(295): NCBI GI: 163955662 Blast Desc: beta-fructofuranosidase [Aspergillus oryzae]
  misc_feature (1)..(263): SWISSPROT Homolog: EC 3.2.1.26 Beta-fructofuranosidase
MDSSDDFAYVMTISLQPGAPLGGSVTQYFIGDFNGTHFEPRDGTTALTDFAKDNYAAQFFANVPDGDNAVSLGWASNWQYAQVVPTGNLEGWRSIMTLPREHWVEQAPRVGMVLMSEPYNLAPVVGETLCRKTLDKNDSVVIDYSDTASGAVYVDVNVTQLNTTLVSPYTTLNLSFSSLQTGEMVQSGFFFSGDTPFFVNRGQVKGFDNIFFTDKFSVADVYQSSDSNSLASWRLQAIIDRSILEFYVGGGRHAGTVPFYPTQPLNLLYLATGDLPSGTKVDISISALRSTWSTSEDA

SEQ ID NO: 38118 - DNA, 1308 bp, Muscodor strobelii
  misc_feature: SGI EST ID NO. CUFF.91352.0
  misc_feature: Variant of the nucleotide sequence at SEQ ID NO 38116
attgacagctcaagtagtcaattccgagaccccaaagtccttcgttacggcgaccactgggttgttcttgtatctcacgcgcaggatttcgtaattagcttttacacaagccccgacctaaagacatggacctgggcatccaactttactcgccatggcctgctgggagcacaatgggaatgcccaaacctcgtcaagttaccggtgcgcggcatggacagctccgatgacttcgcctatgtcatgaccatctctctacagccgggtgcaccgcttggtggatcagtcacgcagtatttcatcggtgacttcaacgggacgcatttcgagccccgcgacggcacgacagcccttactgattttgccaaggacaactacgcggcgcaattctttgccaacgtccccgatggcgacaacgccgtgagcctcggttgggcatccaactggcagtacgcgcaggttgtgcccacgggcaatctcgagggctggcgcagtatcatgacgcttccacgcgagcactgggttgagcaagcaccgcgagttggcatggtactcatgtccgagccatacaaccttgcgcccgtagtgggcgagacgctgtgccgcaagacactggacaagaatgactcggttgtgatagactattctgacacggcttcaggtgcggtctatgttgacgttaacgtgacacagcttaacaccacgttggtgtccccatacacgaccctaaatctatccttcagcagcctccagaccggcgagatggtgcagtctggattcttcttctcaggcgacacacctttcttcgtgaaccgtggccaagtaaaggggtttgataacatcttcttcacggataagttcagcgtcgccgacgtctatcagagcagcgattcgaatagtctggcaagttggaggctccaggctattattgatcgcagtatcctcgaattttatgttggtggcggccgccacgccgggactgtgcccttctaccctacgcagcctctgaatctgctttaccttgccacgggagacttgcccagcggtacaaaggtggatatttccatatcggctttgagaagcacttggtctacctctgaagacgcataaggaactgtagtgtgtctatatttgacccggtgctagacgatggcttgccttggccaatgcaagggatgaagcatgtcgttggtgagtaaggattaccagaggcaggggcaatataaatggtacactagcaattcccaccaaaacaccccaatcatttcacacgctttaacgtattattctttagccatagcagtaaat

SEQ ID NO: 38119 - DNA, 1629 bp, Muscodor strobelii
  misc_feature: SGI cDNA ID NO. 573241
  misc_feature: Encodes the peptide sequence at SEQ ID NO 38120
atgtacgccaaagctctgttgagttcaggggagttccgcgtcctagagttgcaggcaggccgatatgacgagctcatacgatgctctcttcatcacaagtcattgagaagccctccatcttattttgcagtttcgtatacatggggtgatcctgagttggtagacagcgtgatactgaataatatagccattcccgttcgacgcaacctttcgcagcttctgggtcaaatcagacaaactaattcgaatctattcctctgggtcgacgctctatgcatagatcagaataatattgtggagaagaacgtgcagattcctctcatgggtcttatctattcgtcagctcaaacggtatttgtatggcttggtgtccatgcagatggaagcgagcagtttttcgactcccttttggtgcgcgataagaagcaacaatcatctatcgaccagaatattactgacggagcaaccgccctctatagtcgcccgtattggacacgaacatggatagtccaagaaattgtgcttgcttcgaacatcaaagttctctgtggtgatcgctcttgtacttggtcgacattttgtccctcggagcgaaaacgtatgcatccagcatcacccgattatgcgttcttcaacgttgaggctctccgccagtccggtacaataacaaagttgcggcgccttctttttcgctttcacacgactcattgttcagatcctcgagacctagtctatagtctccttaactttgccgaggatactcgcgatcaggaccacggtattgtcatcgactactcttgcacgatcgagtctttgttcgttcaaacattagccttctgcactgccctcagttgcaaaagtctgttgaacggacaacttgctattgagtgtttaagattctgtgatactctagcaacgcgtctcggagccgatctgaagttgggtcttgactatgcgcatcatgcgttagaagctcagaccaaccacgtcttatgcaagagactaaagtcagaatcctacttcgttgctcttaagagatatgcgcgagttaccaaggagctagaccaatgcatgcatgttcatcccgtcgacgagagtccacagtcccagacagctgagacgaggcagcatcgcaagccatccatagccgccattaaataccgggctcacagtatcccaggaaaagaaccacttgacttgtggagttttacaccaagcatagaatcgccaaacattacttatgctattgattttgatattccgaatgtaccaaaagttcaactctgctgtgtctgtaatccagcgcactacgacacagacgaggatggtgttgagtatttcaaatatcatgtcaccgcgatagggattattcagaaagatcacagtgagattgaagaaagtaatgagatccgcgacctatgtgactttttgcaagctcaccttcgatctctgagtggccgggaagtctgcgatagtgtgtctggttatatgatgcaagtgacattatcagagctggttgcgatgtgtcagtttgcccgaatgacggatacatacctgccgtgggctctttcagaagtctctacagttgaccactgggaagagcctcgtgatgccaatacagtttggtga

SEQ ID NO: 38120 - protein, 542 aa, Muscodor strobelii
  misc_feature: SGI Peptide ID NO. 573241
  misc_feature (41)..(172): Pfam Id: PF06985 Pfam Desc: Heterokaryon incompatibility protein (HET)
  misc_feature (39)..(274): NCBI GI: 169604370 Blast Desc: SNOG_05197 [Phaeosphaeria nodorum SN15] gi|111066468|gb|EAT87588.1| SNOG_05197 [Phaeosphaeria nodorum SN15]
  misc_feature (13)..(279): NCBI GI: 256721196 Blast Desc: NECHADRAFT_82325 [Nectria haematococca mpVI 77-13-4]
  misc_feature (3)..(287): NCBI GI: 46127485 Blast Desc: FG08120.1 [Gibberella zeae PH-1]
  misc_feature (5)..(279): NCBI GI: 256722966 Blast Desc: NECHADRAFT_86875 [Nectria haematococca mpVI 77-13-4]
  misc_feature (13)..(278): NCBI GI: 169764315 Blast Desc: [Aspergillus oryzae RIB40] gi|83764483|dbj|BAE54627.1| protein product [Aspergillus oryzae]
  misc_feature (12)..(296): NCBI GI: 171691096 Blast Desc: protein product [Podospora anserina] gi|170945496|emb|CAP71608.1| protein product [Podospora anserina]
  misc_feature (29)..(273): NCBI GI: 18376318 Blast Desc: related to heterokaryon incompatibility protein het-6 [Neurospora crassa]
  misc_feature (12)..(273): NCBI GI: 154314825 Blast Desc: BC1G_04754 [Botryotinia fuckeliana B05.10] gi|150848292|gb|EDN23485.1| BC1G_04754 [Botryotinia fuckeliana B05.10]
  misc_feature (12)..(325): NCBI GI: 256727241 Blast Desc: NECHADRAFT_75911 [Nectria haematococca mpVI 77-13-4]
  misc_feature (13)..(278): NCBI GI: 238504460 Blast Desc: conserved [Aspergillus flavus NRRL3357] gi|220690932|gb|EED47281.1| conserved [Aspergillus flavus NRRL3357]
MYAKALLSSGEFRVLELQAGRYDELIRCSLHHKSLRSPPSYFAVSYTWGDPELVDSVILNNIAIPVRRNLSQLLGQIRQTNSNLFLWVDALCIDQNNIVEKNVQIPLMGLIYSSAQTVFVWLGVHADGSEQFFDSLLVRDKKQQSSIDQNITDGATALYSRPYWTRTWIVQEIVLASNIKVLCGDRSCTWSTFCPSERKRMHPASPDYAFFNVEALRQSGTITKLRRLLFRFHTTHCSDPRDLVYSLLNFAEDTRDQDHGIVIDYSCTIESLFVQTLAFCTALSCKSLLNGQLAIECLRFCDTLATRLGADLKLGLDYAHHALEAQTNHVLCKRLKSESYFVALKRYARVTKELDQCMHVHPVDESPQSQTAETRQHRKPSIAAIKYRAHSIPGKEPLDLWSFTPSIESPNITYAIDFDIPNVPKVQLCCVCNPAHYDTDEDGVEYFKYHVTAIGIIQKDHSEIEESNEIRDLCDFLQAHLRSLSGREVCDSVSGYMMQVTLSELVAMCQFARMTDTYLPWALSEVSTVDHWEEPRDANTVW

SEQ ID NO: 38121 - DNA, 1047 bp, Muscodor strobelii
  misc_feature: SGI EST ID NO. CUFF.91361.0
  misc_feature: Variant of the nucleotide sequence at SEQ ID NO 38119
tcagatcctcgagacctagtctatagtctccttaactttgccgaggatactcgcgatcaggaccacggtattgtcatcgactactcttgcacgatcgagtctttgttcgttcaaacattagccttctgcactgccctcagttgcaaaagtctgttgaacggacaacttgctattgagtgtttaagattctgtgatactctagcaacgcgtctcggagccgatctgaagttgggtcttgactatgcgcatcatgcgttagaagctcagaccaaccacgtcttatgcaagagactaaagtcagaatcctacttcgttgctcttaagagatatgcgcgagttaccaaggagctagaccaatgcatgcatgttcatcccgtcgacgagagtccacagtcccagacagctgagacgaggcagcatcgcaagccatccatagccgccattaaataccgggctcacagtatcccaggaaaagaaccacttgacttgtggagttttacaccaagcatagaatcgccaaacattacttatgctattgattttgatattccgaatgtaccaaaagttcaactctgctgtgtctgtaatccagcgcactacgacacagacgaggatggtgttgagtatttcaaatatcatgtcaccgcgatagggattattcagaaagatcacagtgagattgaagaaagtaatgagatccgcgacctatgtgactttttgcaagctcaccttcgatctctgagtggccgggaagtctgcgatagtgtgtctggttatatgatgcaagtgacattatcagagctggttgcgatgtgtcagtttgcccgaatgacggatacatacctgccgtgggctctttcagaagtctctacagttgaccactgggaagagcctcgtgatgccaatacagtttggtgaaggcagactcaccttgatcattgcaggtgcatacatactaatttttgggcatgatagactactaagatgaatcatcatacctttgtgataataagaggtactcgccatactgatcatttttaatcagtg

SEQ ID NO: 38122 - DNA, 987 bp, Muscodor strobelii
  misc_feature: SGI cDNA ID NO. 573242
  misc_feature: Encodes the peptide sequence at SEQ ID NO 38123
atgactacaactgcctcagtgctccgggtggcggtgacccaggcagaaccagaatggctcgatcttgatgccgccgtggcaaagactgtgagactggttggagaggcggctactaatggtgcgcgcttgattgctttccccgaagtttggatcactgggtatccaggttggatttgggagcatcccattgatccacccaaagtaacgaagtatacgatgaacgcgttgtctgttccgtcaccagagatggatctcatactctcagcagcacgctcaaacaatatcgcagtaatcttgggctttgcagagcgtactccatctgaaagcttgtacatctctcaagccattatctctccaaaaggtacactcttactaaaacgacggaagctcaagccgacgcacgtcgaaaggacagttttcggtgacggctctggaccggatctgaataacgtcgtggagatcgattttgacggtatcggaaagatcaaggtcggcacattggcgtgttgggagcacacacagcctttgctcaaataccatacctacgcccaaggcgaagcagtccatattgccatgtggccacctgtatctccccatattgggccggaacactgggccatgagtgcagaaggctgtttatgtctgtcccaggcctatgccgttgagggtgggaagtttgtactacattgcacaagcgtcataacgcagaaaggcatcgacacgctggatactcacgagagcttactttttagcaaaccaggtggagggcagagctgcgttattgcaccggatgggagaaaaatcacagaacctctatccgatggcgatccggcgagcgaaggactcgtgtacgctgacctggacttaagtatgattgtcactaccagacatcttattgatgtggttggtcattatagtcgcccggatctgctctggctcggtgttgataagaagtcaaagcctcctgttgtggagagctcggactga

SEQ ID NO: 38123 - protein, 328 aa, Muscodor strobelii
  misc_feature: SGI Peptide ID NO. 573242
  misc_feature (9)..(194): Pfam Id: PF00795 Pfam Desc: Carbon-nitrogen hydrolase
  misc_feature (7)..(324): NCBI GI: 238844952 Blast Desc: aliphatic nitrilase [Microsporum canis CBS 113480]
  misc_feature (8)..(324): NCBI GI: 116204107 Blast Desc: CHGG_09937 [Chaetomium globosum CBS 148.51] gi|88176065|gb|EAQ83533.1| CHGG_09937 [Chaetomium globosum CBS 148.51]
  misc_feature (5)..(324): NCBI GI: 256731858 Blast Desc: NECHADRAFT_80653 [Nectria haematococca mpVI 77-13-4]
  misc_feature (3)..(324): NCBI GI: 164428220 Blast Desc: NCU01838 [Neurospora crassa OR74A] gi|157072059|gb|EAA27386.2| conserved [Neurospora crassa OR74A]
  misc_feature (5)..(327): NCBI GI: 28881234 Blast Desc: related to aliphatic nitrilase [Neurospora crassa]
  misc_feature (7)..(324): NCBI GI: 226279402 Blast Desc: aliphatic nitrilase [Paracoccidioides brasiliensis Pb01]
  misc_feature (7)..(324): NCBI GI: 226294486 Blast Desc: nitrilase [Paracoccidioides brasiliensis Pb18]
  misc_feature (1)..(325): NCBI GI: 121717162 Blast Desc: nitrilase, [Aspergillus clavatus NRRL 1] gi|119404184|gb|EAW14601.1| nitrilase, [Aspergillus clavatus NRRL 1]
  misc_feature (8)..(293): NCBI GI: 256720079 Blast Desc: NECHADRAFT_98426 [Nectria haematococca mpVI 77-13-4]
  misc_feature (7)..(320): NCBI GI: 154320900 Blast Desc: BC1G_01922 [Botryotinia fuckeliana B05.10] gi|150853611|gb|EDN28803.1| BC1G_01922 [Botryotinia fuckeliana B05.10]
  misc_feature (1)..(323): SWISSPROT Homolog: EC 3.5.5.7 Aliphatic nitrilase
MTTTASVLRVAVTQAEPEWLDLDAAVAKTVRLVGEAATNGARLIAFPEVWITGYPGWIWEHPIDPPKVTKYTMNALSVPSPEMDLILSAARSNNIAVILGFAERTPSESLYISQAIISPKGTLLLKRRKLKPTHVERTVFGDGSGPDLNNVVEIDFDGIGKIKVGTLACWEHTQPLLKYHTYAQGEAVHIAMWPPVSPHIGPEHWAMSAEGCLCLSQAYAVEGGKFVLHCTSVITQKGIDTLDTHESLLFSKPGGGQSCVIAPDGRKITEPLSDGDPASEGLVYADLDLSMIVTTRHLIDVVGHYSRPDLLWLGVDKKSKPPVVESSD

SEQ ID NO: 38124 - DNA, 1201 bp, Muscodor strobelii
  misc_feature: SGI EST ID NO. CUFF.91401.1
  misc_feature: Variant of the nucleotide sequence at SEQ ID NO 38122
ttcagctctctcgaaggcctgactccatgctgagcttactgtgattgagacgaaattgccagacatctaaagactgtcgcgacctaataatgactacaactgcctcagtgctccgggtggcggtgacccaggcagaaccagaatggctcgatcttgatgccgccgtggcaaagactgtgagactggttggagaggcggctactaatggtgcgcgcttgattgctttccccgaagtttggatcactgggtatccaggttggatttgggagcatcccattgatccacccaaagtaacgaagtatacgatgaacgcgttgtctgttccgtcaccagagatggatctcatactctcagcagcacgctcaaacaatatcgcagtaatcttgggctttgcagagcgtactccatctgaaagcttgtacatctctcaagccattatctctccaaaaggtacactcttactaaaacgacggaagctcaagccgacgcacgtcgaaaggacagttttcggtgacggctctggaccggatctgaataacgtcgtggagatcgattttgacggtatcggaaagatcaaggtcggcacattggcgtgttgggagcacacacagcctttgctcaaataccatacctacgcccaaggcgaagcagtccatattgccatgtggccacctgtatctccccatattgggccggaacactgggccatgagtgcagaaggctgtttatgtctgtcccaggcctatgccgttgagggtgggaagtttgtactacattgcacaagcgtcataacgcagaaaggcatcgacacgctggatactcacgagagcttactttttagcaaaccaggtggagggcagagctgcgttattgcaccggatgggagaaaaatcacagaacctctatccgatggcgatccggcgagcgaaggactcgtgtacgctgacctggacttaagtatgattgtcactaccagacatcttattgatgtggttggtcattatagtcgcccggatctgctctggctcggtgttgataagaagtcaaagcctcctgttgtggagagctcggactgatttgagaactatagcaatgcactattggataaaatagcatgttagcgcatcgcatcgtattgtatgatggaatggataccaacgtcaagtaaactctcagatcttaaaagctttcaagacttcgg

SEQ ID NO: 38125 - DNA, 606 bp, Muscodor strobelii
  misc_feature: SGI cDNA ID NO. 573243
  misc_feature: Encodes the peptide sequence at SEQ ID NO 38126
atgcctggacttcgtcatgctaccctggatgatctggacgccatcgtctggatcgcaatagccgcttttcggactgacccaacttacatttatcgctttccttatatcgaccaatatcttgatgaatatactaccttcattcgcaaccgttaccagactttacttgggagcccggatgtgactgtgatggtttacgaaatcccgagtaatgaggatgcttcgatatgcaaaccgatcgcctacagtgtctggcctcctgtcattgcaccgcctgcttcacagctaaatccaccaaccaccttgatgcaacaaccatttgcagtgccagcacgcgtcgcggccgtgcaagccgatatcgatgctgctaagcgacgcttgtttgttggcccgtacggtgatgcacaggtcttcttgggtttactagcttgtcatcccgactaccagcgtcgcggtgcagcgaaagcattactctcatggggcattgagaaagcccgctctgagtctaagacggtgactcttttggcgactccgatgggctctcatctctaccgctcaatgggtttacgagacacggagatttttttatacacaggttcctggagatga

SEQ ID NO: 38126 - protein, 201 aa, Muscodor strobelii
  misc_feature: SGI Peptide ID NO. 573243
  misc_feature (106)..(189): Pfam Id: PF00583 Pfam Desc: Acetyltransferase (GNAT) family
  misc_feature (130)..(189): Pfam Id: PF00583 Pfam Desc: Acetyltransferase (GNAT) family
  misc_feature (4)..(187): NCBI GI: 171684643 Blast Desc: protein product [Podospora anserina] gi|170942282|emb|CAP67934.1| protein product [Podospora anserina]
  misc_feature (4)..(194): NCBI GI: 116205423 Blast Desc: CHGG_10595 [Chaetomium globosum CBS 148.51] gi|88176723|gb|EAQ84191.1| CHGG_10595 [Chaetomium globosum CBS 148.51]
  misc_feature (4)..(189): NCBI GI: 256724895 Blast Desc: NECHADRAFT_77052 [Nectria haematococca mpVI 77-13-4]
  misc_feature (67)..(194): NCBI GI: 171677251 Blast Desc: protein product [Podospora anserina] gi|170936693|emb|CAP61352.1| protein product [Podospora anserina]
  misc_feature (11)..(194): NCBI GI: 116195598 Blast Desc: CHGG_04397 [Chaetomium globosum CBS 148.51] gi|88180310|gb|EAQ87778.1| CHGG_04397 [Chaetomium globosum CBS 148.51]
  misc_feature (11)..(188): NCBI GI: 170940210 Blast Desc: protein product [Podospora anserina]
  misc_feature (4)..(198): NCBI GI: 121714741 Blast Desc: GNAT family acetyltransferase, [Aspergillus clavatus NRRL 1] gi|119403135|gb|EAW13555.1| GNAT family acetyltransferase, [Aspergillus clavatus NRRL 1]
  misc_feature (4)..(199): NCBI GI: 242822188 Blast Desc: conserved [Talaromyces stipitatus ATCC 10500] gi|218712755|gb|EED12180.1| conserved [Talaromyces stipitatus ATCC 10500]
  misc_feature (4)..(199): NCBI GI: 212546873 Blast Desc: conserved [Penicillium marneffei ATCC 18224] gi|210065110|gb|EEA19205.1| conserved [Penicillium marneffei ATCC 18224]
  misc_feature (4)..(194): NCBI GI: 171695550 Blast Desc: protein product [Podospora anserina] gi|170948017|emb|CAP60181.1| protein product [Podospora anserina]
MPGLRHATLDDLDAIVWIAIAAFRTDPTYIYRFPYIDQYLDEYTTFIRNRYQTLLGSPDVTVMVYEIPSNEDASICKPIAYSVWPPVIAPPASQLNPPTTLMQQPFAVPARVAAVQADIDAAKRRLFVGPYGDAQVFLGLLACHPDYQRRGAAKALLSWGIEKARSESKTVTLLATPMGSHLYRSMGLRDTEIFLYTGSWR

SEQ ID NO: 38127 - DNA, 1047 bp, Muscodor strobelii
  misc_feature: SGI EST ID NO. CUFF.91377.0
  misc_feature: Variant of the nucleotide sequence at SEQ ID NO 38125
tgggtgactcacgtactatcattcaatccctcacaatacgccagaagttttgattgtcgtacaatgcattgcagcttcgcgagtactaatcgatttgtcgcaaatcacctgtaaatataataccggatcacaggcacgcgataatgcctggacttcgtcatgctaccctggatgatctggacgccatcgtctggatcgcaatagccgcttttcggactgacccaacttacatttatcgctttccttatatcgaccaatatcttgatgaatatactaccttcattcgcaaccgttaccagactttacttgggagcccggatgtgactgtgatggtttacgaaatcccgagtaatgaggatgcttcgatatgcaaaccgatcgcctacagtgtctggcctcctgtcattgcaccgcctgcttcacagctaaatccaccaaccaccttgatgcaacaaccatttgcagtgccagcacgcgtcgcggccgtgcaagccgatatcgatgctgctaagcgacgcttgtttgttggcccgtacggtgatgcacaggtcttcttgggtttactagcttgtcatcccgactaccagcgtcgcggtgcagcgaaagcattactctcatggggcattgagaaagcccgctctgagtctaagacggtgactcttttggcgactccgatgggctctcatctctaccgctcaatgggtttacgagacacggagatttttttatacacaggttcctggagatgacaccgttcttgagcagaaagcaatggtgcttgagttctctccttctccaaacacagcctaatgtttcttctatttcaccagtaacctgaaggcaataggtcttcgagattgatcatctgtgcaaagcatgattcaataagttcgactatgtaccgtttctcgatcaccattaaactgaacgaagcatggattggagaaggaatatgaaagttgtcaattgtttcgtcgatcaccttaattttgcttgttctgctatagtcgaaccgcaacattcagttccttgtgactcttcttgccc

SEQ ID NO: 38128 - DNA, 1719 bp, Muscodor strobelii
  misc_feature: SGI cDNA ID NO. 573244
  misc_feature: Encodes the peptide sequence at SEQ ID NO 38129
atggacttgcggcctcctcgcagtggcatccaggggcctcccgacaataccgaatcggtcgaaaggaacggcttcatgctcgcctggagcacgttcttggccaagacctacaacccagatactggagactccttctacatcgtgcgtgaggaacctgacgttcttaggcgcatgttcttccccacgctgagcgccgagggcaagaatatgatctatcgccacaaggatgacgctttcgcccgcgcccaactgaagcactacggaatcgactacgacgagagcgtgatcaccaggaagggtgccgtcatgatgcgcaaggctattgctgctggaaggttccaggaggtccctgaccatctcaagcagctcgaacgtgacatgatgtacgactacatccaggtatgcaacccatatctgctacatcaccaccccgactgggtcatgcaacgatactggctcagcgctgccggagaggtcgattacgagaagacaaagagagtcgctaagactttcatgagaggtcactactggatctccaattacgttgacaacatgtccccgatgtgtatcgctgtcgatagcgttcccggtcttcaccgtgccaccgtcctcgtggccgacggcgcgtactacttcatgggctgggacgcagatgcagtggctaaatcagcacagcgatattacacgcgatgtgcagctttcaaggcgtttacagaccttaaatcggttggccggtacccgattgattttatggccgactacactcgccttcccactaaccttcccaaccctgccaatgaagccaacttgatcctcaaaaagcgctcccccatcggccattacgtcgtcagctgcaagctacttgaggggatgtggcctgacacatacggtcaactcaaccttgatgtgttggccacggaggtggatggtctctacgaagtgagattcgactttggtcatgccgttggagctatgatttttagcttggacgaagatgatctggagtgctactatgacgagcttgactacaatgcttacagccctacggggcctgccaacggcgatgagggcaatgcggccagtccagattccggtgctggtgctggcggcgatagcgatgtgtatcagaaagatctcacccacaaatttcatgagcaaggcgaacagctagctgcagaactcgccgcagacaacgacgtgttcgaggatgccgctgaggaggccactagtggttcccagaggataatcttccaggccagaatcagatacgagtacacttcgcgtgataaccgtggtctgctagggcagtgggtccagtgtggcggcaataaaaaagcaccgatcctagagttcaaggacaaccgcttcaagcagttcaaagtcaccatctatcagttccatcgcgcttctgagccactggttttcaaagccaaaaagacttcctacattccttctctggacaaggactcatgggaatctttccacgagggctatcaggcactcggtccttgccgaaacgacggcttccctcaacgcagagttattcccgttcccgccgatttccctcctgtggatccctttcgctctgcctttcgctctgggtatcctaggctgatccagcctcgtcgttctcccgctaggagcgaggatactgacagtgccgaccgccccaaccccggtgactctgtggtcggtaactctgtcacaggtaacacttga

SEQ ID NO: 38129 - protein, 572 aa, Muscodor strobelii
  misc_feature: SGI Peptide ID NO. 573244
  misc_feature (20)..(363): NCBI GI: 119482353 Blast Desc: NFIA_092690 [Neosartorya fischeri NRRL 181] gi|119409359|gb|EAW19308.1| NFIA_092690 [Neosartorya fischeri NRRL 181]
  misc_feature (12)..(328): NCBI GI: 256721149 Blast Desc: [Nectria haematococca mpVI 77-13-4]
MDLRPPRSGIQGPPDNTESVERNGFMLAWSTFLAKTYNPDTGDSFYIVREEPDVLRRMFFPTLSAEGKNMIYRHKDDAFARAQLKHYGIDYDESVITRKGAVMMRKAIAAGRFQEVPDHLKQLERDMMYDYIQVCNPYLLHHHPDWVMQRYWLSAAGEVDYEKTKRVAKTFMRGHYWISNYVDNMSPMCIAVDSVPGLHRATVLVADGAYYFMGWDADAVAKSAQRYYTRCAAFKAFTDLKSVGRYPIDFMADYTRLPTNLPNPANEANLILKKRSPIGHYVVSCKLLEGMWPDTYGQLNLDVLATEVDGLYEVRFDFGHAVGAMIFSLDEDDLECYYDELDYNAYSPTGPANGDEGNAASPDSGAGAGGDSDVYQKDLTHKFHEQGEQLAAELAADNDVFEDAAEEATSGSQRIIFQARIRYEYTSRDNRGLLGQWVQCGGNKKAPILEFKDNRFKQFKVTIYQFHRASEPLVFKAKKTSYIPSLDKDSWESFHEGYQALGPCRNDGFPQRRVIPVPADFPPVDPFRSAFRSGYPRLIQPRRSPARSEDTDSADRPNPGDSVVGNSVTGNT

SEQ ID NO: 38130 - DNA, 655 bp, Muscodor strobelii
  misc_feature: SGI EST ID NO. CUFF.91389.0
  misc_feature: Variant of the nucleotide sequence at SEQ ID NO 38128
gctgggacgcagatgcagtggctaaatcagcacagcgatattacacgcgatgtgcagctttcaaggcgtttacagaccttaaatcggttggccggtacccgattgattttatggccgactacactcgccttcccactaaccttcccaaccctgccaatgaagccaacttgatcctcaaaaagcgctcccccatcggccattacgtcgtcagctgcaagctacttgaggggatgtggcctgacacatacggtcaactcaaccttgatgtgttggccacggaggtggatggtctctacgaagtgagattcgactttggtcatgccgttggagctatgatttttagcttggacgaagatgatctggagtgctactatgacgagcttgactacaatgcttacagccctacggggcctgccaacggcgatgagggcaatgcggccagtccagattccggtgctggtgctggcggcgatagcgatgtgtatcagaaagatctcacccacaaatttcatgagcaaggcgaacagctagctgcagaactcgccgcagacaacgacgtgttcgaggatgccgctgaggaggccactagtggttcccagaggataatcttccaggccagaatcagatacgagtacacttcgcgtgataaccgtgg

SEQ ID NO: 38131 - DNA, 534 bp, Muscodor strobelii
  misc_feature: SGI cDNA ID NO. 573245
  misc_feature: Encodes the peptide sequence at SEQ ID NO 38132
atggagcctcgcgctcgcgccggcaagaacgtcggcaaggagaccttcaatcccaaagagattgcgaccctcctccacgcctacggcgacgtccgcgaccccctgcccgaaacaatccgcgtcctcgacgaaatcgtaaccgaattcctcgaaggcgtgtgtttcgaggcctcacgccacgcccaagtggccggtcgccagaagctaaaattcgacgacttcgagttcgcactccgtagaaacccgcaataccttggaaaagtccgcagcatgatagagaagcgcgcgtccatcaaggagatgcgcaagacgttcgaccaggatgatgctgtcctcatgaaggagcatgccaataaggagaaagacggcggcaagaatggagggaatggaggggtcaagcaggagatggttgatgatgggggattgggtgatctggatgatgatttggagttgcagggtgtgggtggacgagagagagatcatgatggcgcgagctcgagggggagcggcgctaagaggaggaagatcaagtag

SEQ ID NO: 38132 - protein, 177 aa, Muscodor strobelii
  misc_feature: SGI Peptide ID NO. 573245
  misc_feature (14)..(107): Pfam Id: PF02269 Pfam Desc: Transcription initiation factor IID, 18kD subunit
  misc_feature (1)..(136): NCBI GI: 116200057 Blast Desc: CHGG_08184 [Chaetomium globosum CBS 148.51] gi|88179463|gb|EAQ86931.1| CHGG_08184 [Chaetomium globosum CBS 148.51]
  misc_feature (1)..(112): NCBI GI: 85077756 Blast Desc: NCU03464 [Neurospora crassa OR74A] gi|18376087|emb|CAD21114.1| related to TFIID subunit TAF19 [Neurospora crassa] gi|28917098|gb|EAA26819.1| [Neurospora crassa
  misc_feature (1)..(121): NCBI GI: 256732517 Blast Desc: NECHADRAFT_78790 [Nectria haematococca mpVI 77-13-4]
  misc_feature (1)..(121): NCBI GI: 46121665 Blast Desc: FG05211.1 [Gibberella zeae PH-1]
  misc_feature (1)..(120): NCBI GI: 261356817 Blast Desc: conserved [Verticillium albo-atrum VaMs.102]
  misc_feature (1)..(115): NCBI GI: 39943890 Blast Desc: MGG_03956 [Magnaporthe grisea 70-15] gi|145014668|gb|EDJ99236.1| MGG_03956 [Magnaporthe grisea 70-15]
  misc_feature (1)..(122): NCBI GI: 171689944 Blast Desc: protein product [Podospora anserina] gi|170944934|emb|CAP71045.1| protein product [Podospora anserina]
  misc_feature (2)..(119): NCBI GI: 154316725 Blast Desc: BC1G_03780 [Botryotinia fuckeliana B05.10] gi|150845392|gb|EDN20585.1| BC1G_03780 [Botryotinia fuckeliana B05.10]
  misc_feature (2)..(119): NCBI GI: 156043537 Blast Desc: SS1G_10772 [Sclerotinia sclerotiorum 1980] gi|154695159|gb|EDN94897.1| SS1G_10772 [Sclerotinia sclerotiorum 1980]
  misc_feature (2)..(127): NCBI GI: 145239121 Blast Desc: An08g00890 [Aspergillus niger] gi|134076710|emb|CAK45241.1| protein product [Aspergillus niger]
MEPRARAGKNVGKETFNPKEIATLLHAYGDVRDPLPETIRVLDEIVTEFLEGVCFEASRHAQVAGRQKLKFDDFEFALRRNPQYLGKVRSMIEKRASIKEMRKTFDQDDAVLMKEHANKEKDGGKNGGNGGVKQEMVDDGGLGDLDDDLELQGVGGRERDHDGASSRGSGAKRRKIK

SEQ ID NO: 38133 - DNA, 1045 bp, Muscodor strobelii
  misc_feature: SGI EST ID NO. CUFF.91464.1
  misc_feature: Variant of the nucleotide sequence at SEQ ID NO 38131
ttcagcttcctacttcaggcatccaaccttgaaccttggaaccttcgacttgagcctcgagcctcgtcgcatttcacccagctcaaacgacgtctctcagccttgtgctgtttcaacgtcacttgtctcggggtatcgtgatattgttctcgaggaccgctcaactatccccaagtcaccggttcacacaccgagagcatcatcactactgccaccacgtctgccgaacaacatctcgaccaaccgtcacgatggagcctcgcgctcgcgccggcaagaacgtcggcaaggagaccttcaatcccaaagagattgcgaccctcctccacgcctacggcgacgtccgcgaccccctgcccgaaacaatccgcgtcctcgacgaaatcgtaaccgaattcctcgaaggcgtgtgtttcgaggcctcacgccacgcccaagtggccggtcgccagaagctaaaattcgacgacttcgagttcgcactccgtagaaacccgcaataccttggaaaagtccgcagcatgatagagaagcgcgcgtccatcaaggagatgcgcaagacgttcgaccaggatgatgctgtcctcatgaaggagcatgccaataaggagaaagacggcggcaagaatggagggaatggaggggtcaagcaggagatggttgatgatgggggattgggtgatctggatgatgatttggagttgcagggtgtgggtggacgagagagagatcatgatggcgcgagctcgagggggagcggcgctaagaggaggaagatcaagtaggaggttgattggacgtcctagtgactctcattgccctctctgagaacacgttcgtgggaggttggcgaactcgtcgtcatgatgcggatatgatggtctgctctttgtctttttacaatatgcatagcttcggagtttcgggccagataccagattgttctttttgcgagttactctgatagctctagcatggaaaccgcctcgtcggtatagctaaataatcaatgctaactcacgatgttttcctcatacaattctca

SEQ ID NO: 38134 - DNA, 216 bp, Muscodor strobelii
  misc_feature: SGI cDNA ID NO. 573246
  misc_feature: Encodes the peptide sequence at SEQ ID NO 38135
atgtccgccctgttcaacttccagagcctcctgctcgtcatcttgctcttcatctgcacaagcacatacatccacagctcctacccgtcgatattagaccggaacaagcaaggtttcctaggactattctggaaagcagcgcgtataggcgagcgactgagtccctacatggcactatgctgcatcttcatggccgcctccttgatcatcgcctag

SEQ ID NO: 38135 - protein, 71 aa, Muscodor strobelii
  misc_feature: SGI Peptide ID NO. 573246
  misc_feature (2)..(71): Pfam Id: PF06842 Pfam Desc: Domain of function (DUF1242)
  misc_feature (1)..(70): NCBI GI: 210075637 Blast Desc: YALI0D03949p [Yarrowia lipolytica] gi|199425757|emb|CAR64309.1| YALI0D03949p [Yarrowia lipolytica]
  misc_feature (2)..(67): NCBI GI: 70995074 Blast Desc: S-adenosylmethionine-dependent methyltransferase [Aspergillus fumigatus Af293] gi|66849938|gb|EAL90265.1| S-adenosylmethionine-dependent methyltransferase, [Aspergillus
  misc_feature (1)..(68): NCBI GI: 259488315 Blast Desc: TPA: S-adenosylmethionine-dependent methyltransferase, (AFU_orthologue; AFUA_1G09360) [Aspergillus nidulans FGSC A4]
  misc_feature (1)..(68): NCBI GI: 225557778 Blast Desc: transmembrane protein [Ajellomyces capsulatus G186AR]
  misc_feature (2)..(69): NCBI GI: 145239123 Blast Desc: An08g00900 [Aspergillus niger] gi|134076711|emb|CAK45242.1| protein product [Aspergillus niger]
  misc_feature (1)..(69): NCBI GI: 225007607 Blast Desc: transmembrane protein 167 precursor [Mus musculus] gi|81903622|sp|Q9CR64.1|T167A_MOUSE RecName: Full=Transmembrane protein 167A; Flags: Precursor gi|12833197|dbj|BAB22431.1| [Mus
  misc_feature (1)..(69): NCBI GI: 149058988 Blast Desc: rCG44733, isoform CRA_a [Rattus norvegicus]
  misc_feature (2)..(69): NCBI GI: 242209436 Blast Desc: [Postia placenta Mad-698-R] gi|242222289|ref|XP_002476869.1| [Postia placenta Mad-698-R] gi|220723823|gb|EED77926.1| [Postia placenta Mad-698-R] [Postia
  misc_feature (1)..(69): NCBI GI: 82194143 Blast Desc: T167A_DANRE RecName: Full=Transmembrane protein 167A; Flags: Precursor gi|60688357|gb|AAH91541.1| Transmembrane protein 167A [Danio rerio]
  misc_feature (1)..(69): NCBI GI: 73952320 Blast Desc: : similar to CG14199-PA [Canis familiaris]
MSALFNFQSLLLVILLFICTSTYIHSSYPSILDRNKQGFLGLFWKAARIGERLSPYMALCCIFMAASLIIA

SEQ ID NO: 38136 - DNA, 1360 bp, Muscodor strobelii
  misc_feature: SGI EST ID NO. CUFF.91467.2
  misc_feature: Variant of the nucleotide sequence at SEQ ID NO 38134
ctgccccgctacgtgtcccgctagcttccctgtcattcaggtgcctgttaaatgtcgggtaaactccacaattcgatgccgtagaacatctggcttttggaggctttggacaacgaggtcgaaagcttgcgccgacgaagctcaacgctgcaattcacgactactctctgcctacgacactcccaaccgacctcctcaccacctgcattcgggtccgccgtctagagcccccacgatgtccgccctgttcaacttccagagcctcctgctcgtcatcttgctcttcatctgcacaagcacatacatccacagctcctacccgtcgatattagaccggaacaagcaaggtttcctaggactattctggaaagcagcgcgtataggcgagcgactgagtccctacatggcactatgctgcatcttcatggccgcctccttgatcatcgcctaggttcgaccagcttcacgcggtacggcggcatttgcggggtttcattacgatagaatcacaggacgggaaagatgggtagaagatgggattggatgggatggcccggcttgcgaggcgtttaggcttgctttctacgacttagggtgacataaaaatcatgtgaatggttgcatggctttggttgaggttgtagggcttcggttgatgactgataggcttcgctcgggttctacgatcaggtattgctggtggccaccgagttgcacgcggattacatgaaagagcagttggtcattgtggcaattgcaagaaccactagaattcaaaagcctcaaccactactccgggtcggtgcttcgttataaccttctcgtcacttcatttatgcccgactccaaccccacggcacccgggagaggcgactcgtgtaacacatttggtgtaacagattgacattcaagccgtgctctacgtccgggataaggggagatccgacttcagacgaaattcatgcctgagcttacacacaattacctcatgatggtctgcgacatcgggcgatggcgatccttagttccttagtatcggtgcgatgcgctgttcgggcgatccggtagatctgagcagcagagcgatatcaggctgatgttgacccagacacgtggtagcgttaaggttaatttggtagcttgagccgcaatgctgcgtcgtagtcatcgtgggttaattattagcatgagatggtatcagcttgacaaatttgtccggtacttgtccaaacgactggtgcatgcagcttcccctgggtgtgcttcagatcaccaaagtactcaacatgtcacgatgtctgtcggtgtgaggatgagtgtgatctcaaaagcatagcgaggtcatcgtctgctctctccc

SEQ ID NO: 38137 - DNA, 1980 bp, Muscodor strobelii
  misc_feature: SGI cDNA ID NO. 573247
  misc_feature: Reduced expression when VOC is produced
  misc_feature: Encodes the peptide sequence at SEQ ID NO 38138
atgggtgaccaaggtagcatcgagagtcgcgggatcgacaataacaccgccaccagacgcctctcagaagccatcgcaaatgcgcacgaggagcaagttcaggaaagtaagaagcaaacagagagctcatcggccgagagcaaagagtcgggtctcggaaaagctggaccgcgtagcacaccgcccaacaacggactcaaccgccaaccttcacgtggatctggtcgtggatcgccagaaccaacacggcgattagagccgccggtgacgaagacgacattgagcgaactggatgtgactaagatcattcacaaccccaagctgcgtcatgacatcaacttcgatcccgaattgcacttccgacccaatctcgacggtgaaaagggccagaggaaacagaacaaggcggaccagttctggaacacgctgcgagaccagctggagcaattcatcactgacaaggatggtttcatcaagcagtatggcaacggcgaagattggtgtctaccgttgttattaaaatcggtgaaggacatcatcaatacgcttgttcctacgagagatcgtgcatgtctggatgagggtctcaacgtggacttgatcatgcagcaattcagcagaggtatggcagacctggagaagctggcctcgtggttgtccggggtgctcaaatcgcattgtgcaccgatgagagacgagtgggttgatcagatgtacaaccaactgaccaacggcaatcggacgaacaacatgggagagctcgtgcatggcttgcgcaatctgttgagcgtattggaggccatgaagttggacgttgctaaccatcagattcgttgcctgcgacctatcctgatcgaggataccgtgcacttcgaacaacgattctttgcaaagaaggtgcgcgatcagaaattggaccccacatcttcggctttgtggtactcgcagctcaaccgagctgaagacagcacatcgctgcacgcttttggagatatggccacgttttttgaggagcttgtcaacatggtgatgccttcttatatcgcaacaaatcccgtgctgccgaacaccttcattttcgatgaagaacggctgaccaagcttcggagcgatatgcttgatgccatcaacctcgacgtctgcatgcgactttacgagatctggcagagccttaatgagacttgtggctcatccattccgtcatcttatttaaccactcccctctcagacaatactggatacttaagtgcccagctgaccgaagacgatgacagcgagttcaatttcaactcgcggcccggcagtatgacatttagtgctgcgggctctgctcagtcttcgccccgctcgtctatggtgatggaatctaattcacgaagctcaactgccttcgacttcaagtcggctgaagagtctagatccaggtcaaaaagcttgtacgactcgctcgtggctttgttgcagagctgcggcacaccctctcgtggcgcgtcacggtggagcacagtgaaggattctcttgcgatccaaatttttcgtttcaccaattcacctacccgcatgctcccgatcttcgaggccacacttgaccaaaacctaggcgacatcccctcgccaaatcatcctacggtgttctcgcaactttatctagagtctgagcagaagtttcgccaacgtctgttaacggagctacagcttcgtgtcaaagatctcaaaggcttgaacggtgtttcactcttctccgtagcaaccggtggtcgtctccaagttggcggccgcacagctgacggctggcgtgatccctcgcgtgacgagcgggaggaaattacccacgaaccccgagaagaaggtagtctcaatgatattgccactcgtctcgcacaccttggtctgctgcattggcgagtatggtcacgacttgtctatgtcggtgatctagacaccgaaatggtcgacagtgatgtcccgatggtcatctaa

SEQ ID NO: 38138 - protein, 659 aa, Muscodor strobelii
  misc_feature: SGI Peptide ID NO. 573247
  misc_feature (107)..(654): Pfam Id: PF05794 Pfam Desc: T-complex protein 11
  misc_feature (107)..(386): Pfam Id: PF05794 Pfam Desc: T-complex protein 11
  misc_feature (610)..(645): Pfam Id: PF05794 Pfam Desc: T-complex protein 11
  misc_feature (78)..(655): NCBI GI: 85079471 Blast Desc: NCU03466 [Neurospora crassa OR74A] gi|18376089|emb|CAD21116.1| related to SOK1 protein [Neurospora crassa] gi|28917416|gb|EAA27119.1| NCU03466 [Neurospora crassa
  misc_feature (76)..(650): NCBI GI: 46121661 Blast Desc: FG05209.1 [Gibberella zeae PH-1]
  misc_feature (40)..(650): NCBI GI: 116200047 Blast Desc: CHGG_08179 [Chaetomium globosum CBS 148.51] gi|88179458|gb|EAQ86926.1| CHGG_08179 [Chaetomium globosum CBS 148.51]
  misc_feature (80)..(653): NCBI GI: 171689948 Blast Desc: protein product [Podospora anserina] gi|170944936|emb|CAP71047.1| protein product [Podospora anserina]
  misc_feature (55)..(650): NCBI GI: 256732965 Blast Desc: NECHADRAFT_38663 [Nectria haematococca mpVI 77-13-4]
  misc_feature (81)..(653): NCBI GI: 145607059 Blast Desc: MGG_12111 [Magnaporthe grisea 70-15] gi|145014662|gb|EDJ99230.1| MGG_12111 [Magnaporthe grisea 70-15]
  misc_feature (59)..(658): NCBI GI: 154316697 Blast Desc: BC1G_03766 [Botryotinia fuckeliana B05.10] gi|150845378|gb|EDN20571.1| BC1G_03766 [Botryotinia fuckeliana B05.10]
  misc_feature (85)..(657): NCBI GI: 156050921 Blast Desc: SS1G_08048 [Sclerotinia sclerotiorum 1980] gi|154692448|gb|EDN92186.1| SS1G_08048 [Sclerotinia sclerotiorum 1980]
  misc_feature (81)..(266): NCBI GI: 261356815 Blast Desc: conserved [Verticillium albo-atrum VaMs.102]
  misc_feature (50)..(643): NCBI GI: 121706756 Blast Desc: cAMP-mediated signaling protein Sok1, [Aspergillus clavatus NRRL 1] gi|119399768|gb|EAW10194.1| cAMP-mediated signaling protein Sok1, [Aspergillus clavatus NRRL 1]
  misc_feature: Useful for introducing or modulating the production of volatile compounds
MGDQGSIESRGIDNNTATRRLSEAIANAHEEQVQESKKQTESSSAESKESGLGKAGPRSTPPNNGLNRQPSRGSGRGSPEPTRRLEPPVTKTTLSELDVTKIIHNPKLRHDINFDPELHFRPNLDGEKGQRKQNKADQFWNTLRDQLEQFITDKDGFIKQYGNGEDWCLPLLLKSVKDIINTLVPTRDRACLDEGLNVDLIMQQFSRGMADLEKLASWLSGVLKSHCAPMRDEWVDQMYNQLTNGNRTNNMGELVHGLRNLLSVLEAMKLDVANHQIRCLRPILIEDTVHFEQRFFAKKVRDQKLDPTSSALWYSQLNRAEDSTSLHAFGDMATFFEELVNMVMPSYIATNPVLPNTFIFDEERLTKLRSDMLDAINLDVCMRLYEIWQSLNETCGSSIPSSYLTTPLSDNTGYLSAQLTEDDDSEFNFNSRPGSMTFSAAGSAQSSPRSSMVMESNSRSSTAFDFKSAEESRSRSKSLYDSLVALLQSCGTPSRGASRWSTVKDSLAIQIFRFTNSPTRMLPIFEATLDQNLGDIPSPNHPTVFSQLYLESEQKFRQRLLTELQLRVKDLKGLNGVSLFSVATGGRLQVGGRTADGWRDPSRDEREEITHEPREEGSLNDIATRLAHLGLLHWRVWSRLVYVGDLDTEMVDSDVPMVI

SEQ ID NO: 38139 - DNA, 3035 bp, Muscodor strobelii
  misc_feature: SGI EST ID NO. CUFF.91518.1
  misc_feature: Variant of the nucleotide sequence at SEQ ID NO 38137
caaatccttgaggcagggctttgatgcgcgtacgggcctgcatctacccgagctcacgagacctttttcgtccaacacaacaattgtttgcaatctcgtgagacatcaaggtctaacacattttagtagccatatccctgacattcacattcttcctggctgccttctctcttgaggaccacgccttgatctggtctccacagatctgggtcatcacttccctatctcaacagagttgcaactcaccacttttgtcaacagtcgtcgagatgggtgaccaaggtagcatcgagagtcgcgggatcgacaataacaccgccaccagacgcctctcagaagccatcgcaaatgcgcacgaggagcaagttcaggaaagtaagaagcaaacagagagctcatcggccgagagcaaagagtcgggtctcggaaaagctggaccgcgtagcacaccgcccaacaacggactcaaccgccaaccttcacgtggatctggtcgtggatcgccagaaccaacacggcgattagagccgccggtgacgaagacgacattgagcgaactggatgtgactaagatcattcacaaccccaagctgcgtcatgacatcaacttcgatcccgaattgcacttccgacccaatctcgacggtgaaaagggccagaggaaacagaacaaggcggaccagttctggaacacgctgcgagaccagctggagcaattcatcactgacaaggatggtttcatcaagcagtatggcaacggcgaagattggtgtctaccgttgttattaaaatcggtgaaggacatcatcaatacgcttgttcctacgagagatcgtgcatgtctggatgagggtctcaacgtggacttgatcatgcagcaattcagcagaggtatggcagacctggagaagctggcctcgtggttgtccggggtgctcaaatcgcattgtgcaccgatgagagacgagtgggttgatcagatgtacaaccaactgaccaacggcaatcggacgaacaacatgggagagctcgtgcatggcttgcgcaatctgttgagcgtattggaggccatgaagttggacgttgctaaccatcagattcgttgcctgcgacctatcctgatcgaggataccgtgcacttcgaacaacgattctttgcaaagaaggtgcgcgatcagaaattggaccccacatcttcggctttgtggtactcgcagctcaaccgagctgaagacagcacatcgctgcacgcttttggagatatggccacgttttttgaggagcttgtcaacatggtgatgccttcttatatcgcaacaaatcccgtgctgccgaacaccttcattttcgatgaagaacggctgaccaagcttcggagcgatatgcttgatgccatcaacctcgacgtctgcatgcgactttacgagatctggcagagccttaatgagacttgtggctcatccattccgtcatcttatttaaccactcccctctcagacaatactggatacttaagtgcccagctgaccgaagacgatgacagcgagttcaatttcaactcgcggcccggcagtatgacatttagtgctgcgggctctgctcagtcttcgccccgctcgtctatggtgatggaatctaattcacgaagctcaactgccttcgacttcaagtcggctgaagagtctagatccaggtcaaaaagcttgtacgactcgctcgtggctttgttgcagagctgcggcacaccctctcgtggcgcgtcacggtggagcacagtgaaggattctcttgcgatccaaatttttcgtttcaccaattcacctacccgcatgctcccgatcttcgaggccacacttgaccaaaacctaggcgacatcccctcgccaaatcatcctacggtgttctcgcaactttatctagagtctgagcagaagtttcgccaacgtctgttaacggagctacagcttcgtgtcaaagatctcaaaggcttgaacggtgtttcactcttctccgtagcaaccggtggtcgtctccaagttggcggccgcacagctgacggctggcgtgatccctcgcgtgacgagcgggaggaaattacccacgaaccccgagaagaaggtagtctcaatgatattgccactcgtctcgcacaccttggtctgctgcattggcgagtatggtcacgacttgtctatgtcggtgatctagacaccgaaatggtcgacagtgatgtcccgatggtcatctaatgggcgcaccagctagaatatccctactcatcccacgtaacatctatgtgtctgcggcacaatgcatggccaggtggctagcgagaagcctttggcctggattccattcataataccccggtacaagccttatcaaggcaccctataacactttaataatcatcaaacttcatagcttcccgctatcatcgacggcatggctttggcgtttctggtcatccaggattttatcacttcaagcatagcaacatcccagatcggttcggctttctgatttatctcctttgtgcgcgatacccgagcatattcttccaagggcgtacaggtttaactttcacatcacggcggcgtcggacttctttatttcattttttaagagcgtggctcacacgaaaaagtgtgaggcaaggcatcagaagaggcaaaagcgttacatcctgatgaggcaaatgcacttctggacaagagccgagatcgatctcattactatcaagatacttctgcctgcaatctcagcgaaatagactggacaaggcgccacgatagagggtaatggatacaggagtaaaaacaactggacagcacagtttggtttcagacaaggagcacacatagcaatgacatccatgttccaattatattttctcgtgtgaattgtgcaatccctgttccccgacatgcgtaatttctactaacatgtcgacaccagccttcaaggttctatacagcagtagacatcatgaaaggttctttccatgagttcgtcgatgttcaaggccatatggg

SEQ ID NO: 38140 - DNA, 2697 bp, Muscodor strobelii
  misc_feature: SGI cDNA ID NO. 573248
  misc_feature: Reduced expression when VOC is produced
  misc_feature: Encodes the peptide sequence at SEQ ID NO 38141
atggacggcttcgcgacgtcagcacaggatggctacgaccctagaatagaccccaaggttgcgcccctgcctcggcctcaattcgcgcccaacccttcgtctctggtcgattcctacagccaagatgccctgaatgggttcgagaaggacaagccccggatcaacccattaaacccagagcgtatccaaagctcagccctcgttgatctcaaggactcggtacaagtacacctgctcacagagacagctctgttcgatagtaaggagtatgtcatcttatcagaggacgaggtggacaacctcaagaaacaggtccatttcctcaaccaacgaatcgaacaagcccgctccaatctcaccatccaatccaaatatcgagatgccgcggcatccatgacccgactatactccccaaccagagcacaaggcagaagaagaagcttgctcggcaatcgtctcagcggtggaagcgatgccgcccgcgaagccgaggctgaatacgaagctgtgcagaaaaaatgtgagaatctggcggcggacttatgggctctggagcaacgtctcatggaaccgcagaagaggcttctggaacacacagccggcattttgcaacacgctcataaaattgccaagaaaatggccacaccagtgaaaccacctcttgtcaatggagtgccagccagccccgagagcatgtatacgatgtctaatggacgtaatagcttggatttccttgatgacgggtttattttcgacgaagctagcttgtaccgttccttcgatatgaccgaaccgcttaacattgcgccacggtcgaatacgatcgaaattccattgaagtctccggttcgggaaaagaacatacagcttactgaagaaaccgagaagctgcgccaagagaatgaagatcttgtggcagagctggacgagctaagaaggttccaagctgaccaatggcaatccataaacgatgcagaacagaagttgggacgatacaatcaccagctacgagaggtaatcgtccaagcagatcctgccaggaatgccaactatgatgccgcaccttcgggccagcacgagaccggagatatgttgaacactcatttggactatttagaaaatggcttgtatatgattgccgacagtcacaccagcaacagcaaaagcggaagtgacgatgctacccaaaagatcaaggcactcaacaacagaattcagtatatcgtgggtagtgctgatcccagtcacccaccgtcaccacccgcgtcagcagggctcgaggaacattttggatacttggaagactcgatatcagccatggacgatgagatgcagcgagctttggaggcgagcaggaattcctccgacaaacaaaacctcgagcaggtcgaaactgttctcacaggcttgtgggacatcatccaatccggctatgctgaccttcggcaacgtaagcaagaacgtcgcaaggcgcgcgaggacaatggactggaccctgacgaggaagatctgtctgatggcgaggcagtagacctgaatgagccatacacgctgcaggcattctcggctaagatccaatggctgtacacacaagccactcgtttgatggagcagaagactgttcttaaacgacagatcaaacaacagcgcgagctgaacagcaggtccgaccacgaaaaggaccagcagttgcacgacaagaatgatgagttggaccaggcccgattgcagcttacccgggctgagcaggaaactgacaaagctcgcacccagctttctcaagccctcgaagacctggagagcttacagaacaagcagaatgatcggacggaagagaatcgcgccgtggacgaagctcgagagcaactcagtcaacgtaatgccaaggtatcatctctggaggccgaggcccaggatatgcgagcacgactcgaagtgaccgaagccagtatcgagacaatcaccgcgcagcttcaggaagcacaagaggctcgtgacacagcagagaaggaggccgaggagaagcaacacgttatcaggagcaaggaacttgaattggagaacatgatcggtttggtcgctgctcttaagacggaggcgactatgatcaaggctgagctcgagggtgcctacggttcgaggaaagaacgtgctgcggaagtggcgaagctgcataatacttctgaatcttcgaaaatgcagatgcgtgtcacggaattggagcaggaactctcatctactgccaacgatctcacggacgtggtcaagcaatcactcgagagcgagaagaagattggcgagctggaggaacaactcgacagggtgaaggctgatcgcaacaggatgagagatgagcaggagaagctccacgagaatctcgagagacaactgcacgaagcgacaagccatatcgaaacacgactggaggcggagatcaacaggctaaggaaagagaaggagcaggtccaggaagatctggataaggagaggttcaagagcggcacaacgacaccgaatggcgcgactaagacttcgtatcttacggattcttatagagttgggctaagggctgagaggaagaagtatgaggagttgttgagggcggaacaaatgcaacgaaggaagatcgaagatgagcttagacttttgaaaaggcaacaaggtccggggaagagtcccttgagtcccagaccttga

SEQ ID NO: 38141 - protein, 898 aa, Muscodor strobelii
  misc_feature: SGI Peptide ID NO. 573248
  misc_feature (11)..(601): NCBI GI: 256732516 Blast Desc: NECHADRAFT_59892 [Nectria haematococca mpVI 77-13-4]
  misc_feature (57)..(897): NCBI GI: 145607057 Blast Desc: MGG_03952 [Magnaporthe grisea 70-15] gi|145014661|gb|EDJ99229.1| MGG_03952 [Magnaporthe grisea 70-15]
  misc_feature (29)..(896): NCBI GI: 85077731 Blast Desc: NCU03458 [Neurospora crassa OR74A] gi|18376080|emb|CAD21107.1| related to nonmuscle myosin-II heavy chain [Neurospora crassa] gi|28917092|gb|EAA26813.1| NCU03458
  misc_feature (11)..(671): NCBI GI: 46121659 Blast Desc: FG05208.1 [Gibberella zeae PH-1]
  misc_feature (29)..(619): NCBI GI: 154321063 Blast Desc: BC1G_01406 [Botryotinia fuckeliana B05.10] gi|150851944|gb|EDN27136.1| BC1G_01406 [Botryotinia fuckeliana B05.10]
  misc_feature (29)..(740): NCBI GI: 156054516 Blast Desc: SS1G_06106 [Sclerotinia sclerotiorum 1980] gi|154703886|gb|EDO03625.1| SS1G_06106 [Sclerotinia sclerotiorum 1980]
  misc_feature (285)..(897): NCBI GI: 171689900 Blast Desc: protein product [Podospora anserina] gi|170944912|emb|CAP71023.1| protein product [Podospora anserina]
  misc_feature (18)..(307): NCBI GI: 116200037 Blast Desc: CHGG_08174 [Chaetomium globosum CBS 148.51] gi|88179453|gb|EAQ86921.1| CHGG_08174 [Chaetomium globosum CBS 148.51]
  misc_feature (283)..(776): NCBI GI: 261356802 Blast Desc: conserved [Verticillium albo-atrum VaMs.102]
  misc_feature (11)..(445): NCBI GI: 261356802 Blast Desc: conserved [Verticillium albo-atrum VaMs.102]
  misc_feature: Useful for introducing or modulating the production of volatile compounds
MDGFATSAQDGYDPRIDPKVAPLPRPQFAPNPSSLVDSYSQDALNGFEKDKPRINPLNPERIQSSALVDLKDSVQVHLLTETALFDSKEYVILSEDEVDNLKKQVHFLNQRIEQARSNLTIQSKYRDAAASMTRLYSPTRAQGRRRSLLGNRLSGGSDAAREAEAEYEAVQKKCENLAADLWALEQRLMEPQKRLLEHTAGILQHAHKIAKKMATPVKPPLVNGVPASPESMYTMSNGRNSLDFLDDGFIFDEASLYRSFDMTEPLNIAPRSNTIEIPLKSPVREKNIQLTEETEKLRQENEDLVAELDELRRFQADQWQSINDAEQKLGRYNHQLREVIVQADPARNANYDAAPSGQHETGDMLNTHLDYLENGLYMIADSHTSNSKSGSDDATQKIKALNNRIQYIVGSADPSHPPSPPASAGLEEHFGYLEDSISAMDDEMQRALEASRNSSDKQNLEQVETVLTGLWDIIQSGYADLRQRKQERRKAREDNGLDPDEEDLSDGEAVDLNEPYTLQAFSAKIQWLYTQATRLMEQKTVLKRQIKQQRELNSRSDHEKDQQLHDKNDELDQARLQLTRAEQETDKARTQLSQALEDLESLQNKQNDRTEENRAVDEAREQLSQRNAKVSSLEAEAQDMRARLEVTEASIETITAQLQEAQEARDTAEKEAEEKQHVIRSKELELENMIGLVAALKTEATMIKAELEGAYGSRKERAAEVAKLHNTSESSKMQMRVTELEQELSSTANDLTDVVKQSLESEKKIGELEEQLDRVKADRNRMRDEQEKLHENLERQLHEATSHIETRLEAEINRLRKEKEQVQEDLDKERFKSGTTTPNGATKTSYLTDSYRVGLRAERKKYEELLRAEQMQRRKIEDELRLLKRQQGPGKSPLSPRP

SEQ ID NO: 38142 - DNA, 5736 bp, Muscodor strobelii
  misc_feature: SGI EST ID NO. CUFF.91513.0
  misc_feature: Variant of the nucleotide sequence at SEQ ID NO 38140
aagtgacacacatagtttatccttccagtcttggattctgatttacattcttgcttctatagcgtaggtctacaagactccagttgaagtccatcactttcaggtggatcagttcttgatgcctatcggccagctatctcacatattacctcattggggagggaccaagctacacttctctttaacgccgacaggtagaaaagacaccttgcctgacccctcgatcattctacacgaaccagcttgcgcgacaacttcgagaaacaacggctgctatcgctagtaccaagagaataatctgataggctgaagataaatatcttgataagaacaatcaatgttctttagccgtagtgaggttcctacagcaccatcccataactagacatcgagtacagccgccggcctatactaccatgtgctcatagcgattccctgcctgtccttccacttcgaagcggatagcaacaccaccatgtctttcactaatgcgcctgtcacgcgcagcttagtctacgggctcattggcatgtccatagcggccagtctgctcgacatcaagcactacttctacatcctcgtcgacctgcacctttggcgattccatcagacatggcgagccttgatctaccagctgtgctacaccaactcttccgaagtcttgttcgcagccatgacgctctataacatgaggacggtcgagagactatggggctctcgcaagtacggcactttcgtgttgattaccttcctccttacgagcatactcccgccgggcatcttggcctttggtcttcgacctcttacctttggcctgttcaactatctgcccgccggaccgacgcccgtcatcttcgccatcctcgcccaataccacgccatgattccgcacacctacaaatacagaatagctacatctatgtcacaatcctccaacgacgacttccaaggcatcactctctctgacaaatcgtaccgatacatgctagcattccaactggctctcttccagtggccaggttccatctttggcgccttgatgggctggatcataggatatgcctggcggatggagatcctgccgaggtcgttgatgcgttggcgaataccgggctggatcgtggggattaggactccccgccgaagtcaagagttcgaaggtttgaggcggagacttgaagacgagaatgcgcctacagcagcggcctcaggagtccagggacaaggaggtagcgacaacggacggaggaggacgatgggccaacaggtcatggaccaattccaagggacgttttgagttctgagcggacacagcactggggaaatacaggtacgcttttacctgcattctagcacctaccatcgatatcgacgctacctctattcaaaatcgacggacccgatcaacaaacctaatcatactccgcctcaaagcaacacatccaacatacaagtgcctctaccggagcccacggaagttggtgctaaagatatcaactccagcgaagcaagggatacggagaccgggttggcggcgtctcattgcttcgatacccttttgaagtcttgcgcgttggtgaaccacgtggggcagagagattgaggctttgctcgggagttgggacctgggacctggaacacacccattccgcagcgcatgtacgcagggggtcctatatatggaagcagggttagatgcattattgacaccggatgcgcaacgcctgatcgtaaattcaagcatgagatgattgcgcattggtagagatctgacttgtcattaggtagctacgcctagaatagcagagttatccggactgttgggctctacggtacaagatggaggcgccttggaggacggcatttgggattccagggctcggacactcgcgcgtttgacagcatctctggcgcgattggaatagtattggtatgtgtataacctagaagtgtggcattagacataaatacagaccggatcaaacaagtacaaatatgccacgataggcacaatagttgatatgacagtgtaagaagaaaaagatataaaatcattcatatccatcagaccatgaagaaggcttgggcgtttcatgacagtggtgcatattcccccgtctttgccagccacgaacatgacgccgatcgtcccgactcctatttattaatctcctaagaggggttagtgcagggaacagagcagtcggcggcagcgggtaggacgagttctgcaggggatctggacaggaccggcagaacgccattccacgcccgaagacgccaaatcccggctagcgctcccaccatctagcgaccagccccccctgggtgttcctacattggcatcgtctgcgtcctttgcccgatggagactgagtgaggtcggatcggattttaatggcttcgcaaatctccttttcttgcagctaactcagctcctgtcacgttttgttgaatgactcttcttggaaccagacggaactctcactctaccatcttgttgcatactgtacgattcctgttgttgaagcgtcctttttggatcttgtgtgaagagcatcgcgcataccgaacgcccctaattccacatcgaaaccctttgtccttttttgttcggagaccgacaattctctcgacacgtccgcttgctttttggatatcctacgacctatagaactggagttgagatagaactcgcacgatactgcttcaccagattactcgtctgtcgcgtttcgaaccgaactgcactatcatggtgtccagctggtagcaccaaagacacggtacagagaagatggacggcttcgcgacgtcagcacaggatggctacgaccctagaatagaccccaaggttgcgcccctgcctcggcctcaattcgcgcccaacccttcgtctctggtcgattcctacagccaagatgccctgaatgggttcgagaaggacaagccccggatcaacccattaaacccagagcgtatccaaagctcagccctcgttgatctcaaggactcggtacaagtacacctgctcacagagacagctctgttcgatagtaaggagtatgtcatcttatcagaggacgaggtggacaacctcaagaaacaggtccatttcctcaaccaacgaatcgaacaagcccgctccaatctcaccatccaatccaaatatcgagatgccgcggcatccatgacccgactatactccccaaccagagcacaaggcagaagaagaagcttgctcggcaatcgtctcagcggtggaagcgatgccgcccgcgaagccgaggctgaatacgaagctgtgcagaaaaaatgtgagaatctggcggcggacttatgggctctggagcaacgtctcatggaaccgcagaagaggcttctggaacacacagccggcattttgcaacacgctcataaaattgccaagaaaatggccacaccagtgaaaccacctcttgtcaatggagtgccagccagccccgagagcatgtatacgatgtctaatggacgtaatagcttggatttccttgatgacgggtttattttcgacgaagctagcttgtaccgttccttcgatatgaccgaaccgcttaacattgcgccacggtcgaatacgatcgaaattccattgaagtctccggttcgggaaaagaacatacagcttactgaagaaaccgagaagctgcgccaagagaatgaagatcttgtggcagagctggacgagctaagaaggttccaagctgaccaatggcaatccataaacgatgcagaacagaagttgggacgatacaatcaccagctacgagaggtaatcgtccaagcagatcctgccaggaatgccaactatgatgccgcaccttcgggccagcacgagaccggagatatgttgaacactcatttggactatttagaaaatggcttgtatatgattgccgacagtcacaccagcaacagcaaaagcggaagtgacgatgctacccaaaagatcaaggcactcaacaacagaattcagtatatcgtgggtagtgctgatcccagtcacccaccgtcaccacccgcgtcagcagggctcgaggaacattttggatacttggaagactcgatatcagccatggacgatgagatgcagcgagctttggaggcgagcaggaattcctccgacaaacaaaacctcgagcaggtcgaaactgttctcacaggcttgtgggacatcatccaatccggctatgctgaccttcggcaacgtaagcaagaacgtcgcaaggcgcgcgaggacaatggactggaccctgacgaggaagatctgtctgatggcgaggcagtagacctgaatgagccatacacgctgcaggcattctcggctaagatccaatggctgtacacacaagccactcgtttgatggagcagaagactgttcttaaacgacagatcaaacaacagcgcgagctgaacagcaggtccgaccacgaaaaggaccagcagttgcacgacaagaatgatgagttggaccaggcccgattgcagcttacccgggctgagcaggaaactgacaaagctcgcacccagctttctcaagccctcgaagacctggagagcttacagaacaagcagaatgatcggacggaagagaatcgcgccgtggacgaagctcgagagcaactcagtcaacgtaatgccaaggtatcatctctggaggccgaggcccaggatatgcgagcacgactcgaagtgaccgaagccagtatcgagacaatcaccgcgcagcttcaggaagcacaagaggctcgtgacacagcagagaaggaggccgaggagaagcaacacgttatcaggagcaaggaacttgaattggagaacatgatcggtttggtcgctgctcttaagacggaggcgactatgatcaaggctgagctcgagggtgcctacggttcgaggaaagaacgtgctgcggaagtggcgaagctgcataatacttctgaatcttcgaaaatgcagatgcgtgtcacggaattggagcaggaactctcatctactgccaacgatctcacggacgtggtcaagcaatcactcgagagcgagaagaagattggcgagctggaggaacaactcgacagggtgaaggctgatcgcaacaggatgagagatgagcaggagaagctccacgagaatctcgagagacaactgcacgaagcgacaagccatatcgaaacacgactggaggcggagatcaacaggctaaggaaagagaaggagcaggtccaggaagatctggataaggagaggttcaagagcggcacaacgacaccgaatggcgcgactaagacttcgtatcttacggattcttatagagttgggctaagggctgagaggaagaagtatgaggagttgttgagggcggaacaaatgcaacgaaggaagatcgaagatgagcttagacttttgaaaaggcaacaaggtccggggaagagtcccttgagtcccagaccttgagattcagattagtcaacatccctcgtcggacgtgtgcctgacgcgccgtctttcttctctatcttgtcaatgaactgtacgattatgagaagaaaaaacagatcctgatttggatggagtacattgtgctggattgacggacggcatttgtatatacttggcttggctcggtgccgctagactattatcgctattactattactcttggaagactgagaatatcatcagcatttgatggaca

SEQ ID NO: 38143 - DNA, 822 bp, Muscodor strobelii
  misc_feature: SGI cDNA ID NO. 573249
  misc_feature: Encodes the peptide sequence at SEQ ID NO 38144
atgtctttcactaatgcgcctgtcacgcgcagcttagtctacgggctcattggcatgtccatagcggccagtctgctcgacatcaagcactacttctacatcctcgtcgacctgcacctttggcgattccatcagacatggcgagccttgatctaccagctgtgctacaccaactcttccgaagtcttgttcgcagccatgacgctctataacatgaggacggtcgagagactatggggctctcgcaagtacggcactttcgtgttgattaccttcctccttacgagcatactcccgccgggcatcttggcctttggtcttcgacctcttacctttggcctgttcaactatctgcccgccggaccgacgcccgtcatcttcgccatcctcgcccaataccacgccatgattccgcacacctacaaatacagaatagctacatctatgtcacaatcctccaacgacgacttccaaggcatcactctctctgacaaatcgtaccgatacatgctagcattccaactggctctcttccagtggccaggttccatctttggcgccttgatgggctggatcataggatatgcctggcggatggagatcctgccgaggtcgttgatgcgttggcgaataccgggctggatcgtggggattaggactccccgccgaagtcaagagttcgaaggtttgaggcggagacttgaagacgagaatgcgcctacagcagcggcctcaggagtccagggacaaggaggtagcgacaacggacggaggaggacgatgggccaacaggtcatggaccaattccaagggacgttttga

SEQ ID NO: 38144 - protein, 273 aa, Muscodor strobelii
  misc_feature: SGI Peptide ID NO. 573249
  misc_feature (1)..(249): NCBI GI: 261356801 Blast Desc: conserved [Verticillium albo-atrum VaMs.102]
  misc_feature (1)..(273): NCBI GI: 171689898 Blast Desc: protein product [Podospora anserina] gi|170944911|emb|CAP71022.1| protein product [Podospora anserina]
  misc_feature (1)..(273): NCBI GI: 39943880 Blast Desc: MGG_03951 [Magnaporthe grisea 70-15] gi|145014660|gb|EDJ99228.1| MGG_03951 [Magnaporthe grisea 70-15]
  misc_feature (1)..(270): NCBI GI: 46121657 Blast Desc: FG05207.1 [Gibberella zeae PH-1]
  misc_feature (1)..(270): NCBI GI: 256732515 Blast Desc: NECHADRAFT_78787 [Nectria haematococca mpVI 77-13-4]
  misc_feature (1)..(273): NCBI GI: 85077735 Blast Desc: NCU03459 [Neurospora crassa OR74A] gi|18376081|emb|CAD21108.1| conserved [Neurospora crassa] gi|28917093|gb|EAA26814.1| conserved [Neurospora crassa OR74A]
  misc_feature (3)..(271): NCBI GI: 156054684 Blast Desc: SS1G_06190 [Sclerotinia sclerotiorum 1980] gi|154703970|gb|EDO03709.1| SS1G_06190 [Sclerotinia sclerotiorum 1980]
  misc_feature (3)..(271): NCBI GI: 169622216 Blast Desc: SNOG_14325 [Phaeosphaeria nodorum SN15] gi|111057076|gb|EAT78196.1| SNOG_14325 [Phaeosphaeria nodorum SN15]
  misc_feature (3)..(273): NCBI GI: 242768654 Blast Desc: conserved [Talaromyces stipitatus ATCC 10500] gi|218724809|gb|EED24226.1| conserved [Talaromyces stipitatus ATCC 10500]
  misc_feature (3)..(273): NCBI GI: 238843848 Blast Desc: conserved [Microsporum canis CBS 113480]
MSFTNAPVTRSLVYGLIGMSIAASLLDIKHYFYILVDLHLWRFHQTWRALIYQLCYTNSSEVLFAAMTLYNMRTVERLWGSRKYGTFVLITFLLTSILPPGILAFGLRPLTFGLFNYLPAGPTPVIFAILAQYHAMIPHTYKYRIATSMSQSSNDDFQGITLSDKSYRYMLAFQLALFQWPGSIFGALMGWIIGYAWRMEILPRSLMRWRIPGWIVGIRTPRRSQEFEGLRRRLEDENAPTAAASGVQGQGGSDNGRRRTMGQQVMDQFQGTF

SEQ ID NO: 38145 - DNA, 5736 bp, Muscodor strobelii; identical to SEQ ID NO: 38142
  misc_feature: SGI EST ID NO. CUFF.91513.0
  misc_feature: Variant of the nucleotide sequence at SEQ ID NO 38143

SEQ ID NO: 38146 - DNA, 1050 bp, Muscodor strobelii
  misc_feature: SGI cDNA ID NO. 573250
  misc_feature: Reduced expression when VOC is produced
  misc_feature: Encodes the peptide sequence at SEQ ID NO 38147
atgtccgacctctatctatcccaccttaggaattggttctggaagtcgccgcctgcagaatggctgatcaagaatgcccgcgagatcctcatcggcaccctcaagcaggggcccatccccaaacacgtcgcctttgagatggacggaaacaggcgctttgctaagaaccataagatcgagaccatagaaggccatcacctcggcttcgaggccctcgcaagagtgctcgagatttgctacaagagtggtgttaaagtcgttaccgtatatgccttcagcatcgagaacttcaaccgacctcgcggggaggtcaagggcttgatggccatggccaaggtgaagctcgaacagctagtgcagcacggcgaattgctggatcgatatggcgcaggcatccgcgtgctgggcgagcgtgacctcatccccgctgacgtgcttcctttcgtcgacaaggccatcgagatgaccaaacacaacaaggatgccgtcttgaacatctgcttcccttacacatcccgcgccgagatgaccagcgccatcaaggccaccgtcgacgagttcgccaccccatgcggacccccgacccagccgttttctcaaacccgcatcacgcagaagataaagtctaaccactcgaaacggctgcacacgatggactcgatccgagagacctcgcctgaccctagcgtgaggtcagacgtggacgattccatgtcttcttccaccgccatcgaccccgagtctcccaccctgcagtccactgctgctcctaagcgtcacacatacccgaaccccgagaacatcacagccgagactatcaacaatcatacctacacggcagagtgcccaccgctggacatttttatccggactagtaacgtcacgcggctgagcgacttcatgctctggcagtgccacgagaatacccacatcttcttcctcaagtgcttctggcccgagtttgatctctggcatttcgtgcctgttctgctcgagtggcagtggagacagaagaagctcctcgagaaggagagtgcgtcacggaagtaa

SEQ ID NO: 38147 - protein, 349 aa, Muscodor strobelii
  misc_feature: SGI Peptide ID NO. 573250
  misc_feature (47)..(342): Pfam Id: PF01255 Pfam Desc: undecaprenyl diphosphate synthase
  misc_feature (47)..(184): Pfam Id: PF01255 Pfam Desc: undecaprenyl diphosphate synthase
  misc_feature (264)..(322): Pfam Id: PF01255 Pfam Desc: undecaprenyl diphosphate synthase
  misc_feature (1)..(339): NCBI GI: 85077739 Blast Desc: NCU03460 [Neurospora crassa OR74A] gi|28917094|gb|EAA26815.1| NCU03460 [Neurospora crassa OR74A]
  misc_feature (1)..(348): NCBI GI: 171689896 Blast Desc: protein product [Podospora anserina] gi|170944910|emb|CAP71021.1| protein product [Podospora anserina]
  misc_feature (1)..(348): NCBI GI: 145607055 Blast Desc: MGG_12110 [Magnaporthe grisea 70-15] gi|145014659|gb|EDJ99227.1| MGG_12110 [Magnaporthe grisea 70-15]
  misc_feature (1)..(343): NCBI GI: 156054508 Blast Desc: SS1G_06102 [Sclerotinia sclerotiorum 1980] gi|154703882|gb|EDO03621.1| SS1G_06102 [Sclerotinia sclerotiorum 1980]
  misc_feature (1)..(328): NCBI GI: 116200041 Blast Desc: CHGG_08176 [Chaetomium globosum CBS 148.51] gi|88179455|gb|EAQ86923.1| CHGG_08176 [Chaetomium globosum CBS 148.51]
  misc_feature (1)..(343): NCBI GI: 154321075 Blast Desc: BC1G_01412 [Botryotinia fuckeliana B05.10] gi|150851950|gb|EDN27142.1| BC1G_01412 [Botryotinia fuckeliana B05.10]
  misc_feature (1)..(348): NCBI GI: 256734631 Blast Desc: [Nectria haematococca mpVI 77-13-4]
  misc_feature (1)..(349): NCBI GI: 261356800 Blast Desc: dehydrodolichyl diphosphate synthase [Verticillium albo-atrum VaMs.102]
  misc_feature (1)..(339): NCBI GI: 46105340 Blast Desc: FG00298.1 [Gibberella zeae PH-1]
  misc_feature (1)..(335): NCBI GI: 189193273 Blast Desc: dehydrodolichyl diphosphate synthase [Pyrenophora tritici-repentis Pt-1C-BFP] gi|187978539|gb|EDU45165.1| dehydrodolichyl diphosphate synthase [Pyrenophora Pt-1C-BFP]
  misc_feature (40)..(348): SWISSPROT Homolog: EC 2.5.1.31 Di-trans,poly-cis-decaprenylcistransferase
  misc_feature: Useful for introducing or modulating the production of volatile compounds
MSDLYLSHLRNWFWKSPPAEWLIKNAREILIGTLKQGPIPKHVAFEMDGNRRFAKNHKIETIEGHHLGFEALARVLEICYKSGVKVVTVYAFSIENFNRPRGEVKGLMAMAKVKLEQLVQHGELLDRYGAGIRVLGERDLIPADVLPFVDKAIEMTKHNKDAVLNICFPYTSRAEMTSAIKATVDEFATPCGPPTQPFSQTRITQKIKSNHSKRLHTMDSIRETSPDPSVRSDVDDSMSSSTAIDPESPTLQSTAAPKRHTYPNPENITAETINNHTYTAECPPLDIFIRTSNVTRLSDFMLWQCHENTHIFFLKCFWPEFDLWHFVPVLLEWQWRQKKLLEKESASRK

SEQ ID NO: 38148 - DNA, 1749 bp, Muscodor strobelii
  misc_feature: SGI EST ID NO. CUFF.91469.0
  misc_feature: Variant of the nucleotide sequence at SEQ ID NO 38146
gcgggttggccctgcattaaatggacgggtggccagtgctcggcatctcagcgccgtttcgttgcctgatgttgcaggagttgggatagattgccatcttgcagtttgatctggcggagactcgagcgtggcggcgcaccgaggcacacatcatcgcatatccatttcatacattcaagaaagcagtccaagagaggcgtcgtaatacaattgcgtctgtttcgcgcatagccacacgctctcgttctagtattttattgatcgcttccatcttgtcgttcgtctacgaaactaaatacaaaattgatgcacatttcaattcatccgtgacacgcatctaacagaatattctgtcccttgcctgccgcgaccactctcagcaatccttcgcaggccctctctgcgacctcttctgcatcatgtccgacctctatctatcccaccttaggaattggttctggaagtcgccgcctgcagaatggctgatcaagaatgcccgcgagatcctcatcggcaccctcaagcaggggcccatccccaaacacgtcgcctttgagatggacggaaacaggcgctttgctaagaaccataagatcgagaccatagaaggccatcacctcggcttcgaggccctcgcaagagtgctcgagatttgctacaagagtggtgttaaagtcgttaccgtatatgccttcagcatcgagaacttcaaccgacctcgcggggaggtcaagggcttgatggccatggccaaggtgaagctcgaacagctagtgcagcacggcgaattgctggatcgatatggcgcaggcatccgcgtgctgggcgagcgtgacctcatccccgctgacgtgcttcctttcgtcgacaaggccatcgagatgaccaaacacaacaaggatgccgtcttgaacatctgcttcccttacacatcccgcgccgagatgaccagcgccatcaaggccaccgtcgacgagttcgccaccccatgcggacccccgacccagccgttttctcaaacccgcatcacgcagaagataaagtctaaccactcgaaacggctgcacacgatggactcgatccgagagacctcgcctgaccctagcgtgaggtcagacgtggacgattccatgtcttcttccaccgccatcgaccccgagtctcccaccctgcagtccactgctgctcctaagcgtcacacatacccgaaccccgagaacatcacagccgagactatcaacaatcatacctacacggcagagtgcccaccgctggacatttttatccggactagtaacgtcacgcggctgagcgacttcatgctctggcagtgccacgagaatacccacatcttcttcctcaagtgcttctggcccgagtttgatctctggcatttcgtgcctgttctgctcgagtggcagtggagacagaagaagctcctcgagaaggagagtgcgtcacggaagtaattctatgaagattagcattgcgtttaaaatttggaactcagtcttaatcgtaagattttgagttgacatatggttatggagccgcgtttggcgttcaaggcattagcaggcgatatgattttaccaaaaaggagcgagagttgaatgcattattgcattattagacaaaatggattagttgtaattacgcagtaaaagcttagtcatagctgacttgactgcccttcaaaatatcaacgttggaagagatatgggtatctgttctatgataatcgtgaca

SEQ ID NO: 38149 - DNA, 282 bp, Muscodor strobelii
  misc_feature: SGI cDNA ID NO. 573251
  misc_feature: Encodes the peptide sequence at SEQ ID NO 38150
atgttttcttacactgatgcaggctccgaagacgtctcagatgatgtcgagcaacctgtcgatctagttgatgacgcgcccaaagcatctaccgctaccgactcttctcacgacttcgattcttctcttgacgtcaattctccccccaacgccgactattctcccggcgctgtccccgccaccaccgaagccaagcctgatggtgaggccgaggcacgggagtccaacgcggtccccgagcaagaggatggttccaacggttgcagatcgaccctgtgctag

SEQ ID NO: 38150 - protein, 93 aa, Muscodor strobelii
  misc_feature: SGI Peptide ID NO. 573251
MFSYTDAGSEDVSDDVEQPVDLVDDAPKASTATDSSHDFDSSLDVNSPPNADYSPGAVPATTEAKPDGEAEARESNAVPEQEDGSNGCRSTLC

SEQ ID NO: 38151 - DNA, 2136 bp, Muscodor strobelii
  misc_feature: SGI cDNA ID NO. 573252
  misc_feature: Reduced expression when VOC is produced
  misc_feature: Encodes the peptide sequence at SEQ ID NO 38152
atgaaagctgcgaggacgccccaggcggaagctgggccttcgaatcggagggcccaaccggtacgccagactcgaaccaaccctcctcgcaccaaccctactgctgctcgtggcagagactcgctacgaggcggtcagcccccagaccaacccatcgacatctttccagcgatcacccacttcaccgacgccatcacggccctccccaacgacctcgtcaggcacttcaccctgctgaaggaggtcgacgccaagatcttcgctcccgaggaagccctcttccagctcgtcgacctcgccctcaagtccaacccccccgaccccagaaccacatacgatggctccagcagtgtcgcgcaggcctcgactcccatgagtgttcaagacagcttcagtggacacgctagtgctgccgccgctgctcctgcgtcggtcaatgggtcagtcgcctcgaatgtcttcgattcgagcaatgtgccccggcggaacctgttcttccagacggcgctcaagatccaagagatgcttgtgtcgctcgaggagaagaaccacgtcatcgccacggccaacgatgcgctctccaagcagctcggtcgcatcaacgaggtctggccacacttggagaacgagttcagcgacgaggccaaatggggcagcaccacgcactgggcctatcccgagaaccgcatcagtcgagcaacacaggccgaacgatcgcgtcgtgatggtgccgccttcatcactgctgcggcccagcagctccaggtggaagaagccgcggcagcacggagcgacgccaggaaacaagccatgattgccaagaagggcctcaagaatcagcagcatcaggactcggatgcagacgatcacgacaacggcaataatagcaataataacaataacaacggcaagcagaaaccagaacccgcgaagaaggcatcgggcggggccaaagcccgcaaagctgctgctactgccgctgccgccgccgaatccacaacacctgtgggcttgggcatctccacagcggccaatgtgaatggcggcaatccacctgcaaagaggcgaaaggtcgagaacaaggacaaggaggccaaagcagtcaatggcggtgttcctatggagcgcgccatgagctctgtctttggcaacggcgcttccaagaccaagacggtgagcccgcgagcaactccagcacctgctgagcctaccaagaagcggaaagcccttcccactgccaccaatggcttagccaagaagagcaaaaccgcgaccgctcccgcagctccgtctccctccatgctctcgccggctgcaccattaaatccgaccgacaaacccaatacccagcctccccccgccccggctattcccgtgcctcgacctgcttcctcacgcgcaagggggaattccattgcgtcgaatgccgaaaacagtcgacagcgccccgcgtcctctgcctcaaacaaaccaaatggcatccccaccgttgccccagagactatggcgacactaaacggtccgcgtgctctagtcgaacctaaacctccaaaggaacccgcaacgattatcaagacagagtcgactaaggacgactcgagtactgttgccacgcctgttcagaacggtacgagtaagaaggataatgctccaaagcccgacgaactagcagcgaaggcagaggcaacaccgaatcacacaccgactacaacgaccgtggtcacgaccaagagcgggcgagccagtaaaccttcgacacctgcactaggctcgttccccgacgccataccgcgctctcgtgcagccaggaactcaacggctggcacaggcaagagaagtcacaagaagggtgcttctcagcataccatccccttacacattgcgccggacaaggaaccccgtagtaatggtcgcggcgacgacgaaaacgaagtcgatgctgatgaaccgttatattgctattgcaatggtgtctcatatggcgagatggtcgcttgcgatgcggatgattgtccgcgcgagtggttccatctcgactgtgtcggactgaaagccgcgccgccggataacatgacgtggtattgcgacaactgtaaagatcggataaagacagggaagaaggccaaaccttcttga

SEQ ID NO: 38152 - protein, 711 aa, Muscodor strobelii
  misc_feature: SGI Peptide ID NO. 573252
  misc_feature (652)..(701): Pfam Id: PF00628 Pfam Desc: PHD-finger
  misc_feature (1)..(707): NCBI GI: 256734632 Blast Desc: NECHADRAFT_75096 [Nectria haematococca mpVI 77-13-4]
  misc_feature (1)..(708): NCBI GI: 46105338 Blast Desc: FG00297.1 [Gibberella zeae PH-1]
  misc_feature (14)..(703): NCBI GI: 156054510 Blast Desc: SS1G_06103 [Sclerotinia sclerotiorum 1980] gi|154703883|gb|EDO03622.1| SS1G_06103 [Sclerotinia sclerotiorum 1980]
  misc_feature (1)..(703): NCBI GI: 154321073 Blast Desc: BC1G_01411 [Botryotinia fuckeliana B05.10] gi|150851949|gb|EDN27141.1| BC1G_01411 [Botryotinia fuckeliana B05.10]
  misc_feature (1)..(614): NCBI GI: 18376083 Blast Desc: related to p33ING1b (ING1) protein [Neurospora crassa]
  misc_feature (1)..(614): NCBI GI: 85077744 Blast Desc: NCU03461 [Neurospora crassa OR74A] gi|28917095|gb|EAA26816.1| [Neurospora crassa OR74A]
  misc_feature (13)..(699): NCBI GI: 145607053 Blast Desc: MGG_12109 [Magnaporthe grisea 70-15] gi|145014658|gb|EDJ99226.1| MGG_12109 [Magnaporthe grisea 70-15]
  misc_feature (1)..(619): NCBI GI: 116200041 Blast Desc: CHGG_08176 [Chaetomium globosum CBS 148.51] gi|88179455|gb|EAQ86923.1| CHGG_08176 [Chaetomium globosum CBS 148.51]
  misc_feature (1)..(595): NCBI GI: 171689894 Blast Desc: protein product [Podospora anserina] gi|170944909|emb|CAP71020.1| protein product [Podospora anserina]
  misc_feature (19)..(709): NCBI GI: 169771377 Blast Desc: [Aspergillus oryzae RIB40] gi|83768017|dbj|BAE58156.1| protein product [Aspergillus oryzae]
  misc_feature: Useful for introducing or modulating the production of volatile compounds
MKAARTPQAEAGPSNRRAQPVRQTRTNPPRTNPTAARGRDSLRGGQPPDQPIDIFPAITHFTDAITALPNDLVRHFTLLKEVDAKIFAPEEALFQLVDLALKSNPPDPRTTYDGSSSVAQASTPMSVQDSFSGHASAAAAAPASVNGSVASNVFDSSNVPRRNLFFQTALKIQEMLVSLEEKNHVIATANDALSKQLGRINEVWPHLENEFSDEAKWGSTTHWAYPENRISRATQAERSRRDGAAFITAAAQQLQVEEAAAARSDARKQAMIAKKGLKNQQHQDSDADDHDNGNNSNNNNNNGKQKPEPAKKASGGAKARKAAATAAAAAESTTPVGLGISTAANVNGGNPPAKRRKVENKDKEAKAVNGGVPMERAMSSVFGNGASKTKTVSPRATPAPAEPTKKRKALPTATNGLAKKSKTATAPAAPSPSMLSPAAPLNPTDKPNTQPPPAPAIPVPRPASSRARGNSIASNAENSRQRPASSASNKPNGIPTVAPETMATLNGPRALVEPKPPKEPATIIKTESTKDDSSTVATPVQNGTSKKDNAPKPDELAAKAEATPNHTPTTTTVVTTKSGRASKPSTPALGSFPDAIPRSRAARNSTAGTGKRSHKKGASQHTIPLHIAPDKEPRSNGRGDDENEVDADEPLYCYCNGVSYGEMVACDADDCPREWFHLDCVGLKAAPPDNMTWYCDNCKDRIKTGKKAKPS

SEQ ID NO: 38153 - DNA, 3401 bp, Muscodor strobelii
  misc_feature: SGI EST ID NO. CUFF.91639.0
  misc_feature: Variant of the nucleotide sequence at SEQ ID NO 38151
gaccaatcagaccgtcagactgagctgattgaagctgtgtcgacccactcgagcgctgggatggtggcccgcgccgggagcgaacagagcaaagccagcagcgctgcaggtcattgagtggtgtcacggtgctctgcgctgggagggcctggcagtgtcaatccccgatcccgtcctgattcccgtcttcttctgcttttgcgcctctccgcagaccagccatcccccttggtcgcgtccgccgaagaacacatagaagcactgttttgttagcctgtcatgccagagtgagtcgagcttcgactgtcgaagctgctttgtctacttttattctggttcaccacctctgcctcgtttagaaagtattctttctgtcgccctcctcgacccgcagcccaccacggccgccctctcgtctgccctcgtcgccttgtcgccaacctgaccactgccgccaaaatccaaagtcgaaggcctgttctattgcccctcacctatcccctctgttgaactgcagaatgaaagctgcgaggacgccccaggcggaagctgggccttcgaatcggagggcccaaccggtacgccagactcgaaccaaccctcctcgcaccaaccctactgctgctcgtggcagagactcgctacgaggcggtcagcccccagaccaacccatcgacatctttccagcgatcacccacttcaccgacgccatcacggccctccccaacgacctcgtcaggcacttcaccctgctgaaggaggtcgacgccaagatcttcgctcccgaggaagccctcttccagctcgtcgacctcgccctcaagtccaacccccccgaccccagaaccacatacgatggctccagcagtgtcgcgcaggcctcgactcccatgagtgttcaagacagcttcagtggacacgctagtgctgccgccgctgctcctgcgtcggtcaatgggtcagtcgcctcgaatgtcttcgattcgagcaatgtgccccggcggaacctgttcttccagacggcgctcaagatccaagagatgcttgtgtcgctcgaggagaagaaccacgtcatcgccacggccaacgatgcgctctccaagcagctcggtcgcatcaacgaggtctggccacacttggagaacgagttcagcgacgaggccaaatggggcagcaccacgcactgggcctatcccgagaaccgcatcagtcgagcaacacaggccgaacgatcgcgtcgtgatggtgccgccttcatcactgctgcggcccagcagctccaggtggaagaagccgcggcagcacggagcgacgccaggaaacaagccatgattgccaagaagggcctcaagaatcagcagcatcaggactcggatgcagacgatcacgacaacggcaataatagcaataataacaataacaacggcaagcagaaaccagaacccgcgaagaaggcatcgggcggggccaaagcccgcaaagctgctgctactgccgctgccgccgccgaatccacaacacctgtgggcttgggcatctccacagcggccaatgtgaatggcggcaatccacctgcaaagaggcgaaaggtcgagaacaaggacaaggaggccaaagcagtcaatggcggtgttcctatggagcgcgccatgagctctgtctttggcaacggcgcttccaagaccaagacggtgagcccgcgagcaactccagcacctgctgagcctaccaagaagcggaaagcccttcccactgccaccaatggcttagccaagaagagcaaaaccgcgaccgctcccgcagctccgtctccctccatgctctcgccggctgcaccattaaatccgaccgacaaacccaatacccagcctccccccgccccggctattcccgtgcctcgacctgcttcctcacgcgcaagggggaattccattgcgtcgaatgccgaaaacagtcgacagcgccccgcgtcctctgcctcaaacaaaccaaatggcatccccaccgttgccccagagactatggcgacactaaacggtccgcgtgctctagtcgaacctaaacctccaaaggaacccgcaacgattatcaagacagagtcgactaaggacgactcgagtactgttgccacgcctgttcagaacggtacgagtaagaaggataatgctccaaagcccgacgaactagcagcgaaggcagaggcaacaccgaatcacacaccgactacaacgaccgtggtcacgaccaagagcgggcgagccagtaaaccttcgacacctgcactaggctcgttccccgacgccataccgcgctctcgtgcagccaggaactcaacggctggcacaggcaagagaagtcacaagaagggtgcttctcagcataccatccccttacacattgcgccggacaaggaaccccgtagtaatggtcgcggcgacgacgaaaacgaagtcgatgctgatgaaccgttatattgctattgcaatggtgtctcatatggcgagatggtcgcttgcgatgcggatgattgtccgcgcgagtggttccatctcgactgtgtcggactgaaagccgcgccgccggataacatgacgtggtattgcgacaactgtaaagatcggataaagacagggaagaaggccaaaccttcttgacccgtcttctttcccaaatgaatatgggggacgcaaatagttgctttactgtaccatgcatagatggcgtttttggcaggcgatgataccaacgaagatcaagagatattcatgcacacatgttattcactggaagctacgaatgggaatgggaacgggactggcgtaatcatgggctcggaaggcattcttattggagcatttacagatatactcgatatgggactgaggtcctttgctacctatatggacaggtcatatacattatcatggctcttattttgtcttggggaatgattgcggatggtgttgggtgatgtgatatgtttcaagatttggagtgaaagaaaagctagcattttgttcttatgtcggactccccttactcagaagtaccttgcgaggcaaagcttgcaaagcaaatacagatatgaagctccgcgaggatattatcacgcctctttttggcgttttataaaataggcagctattgcgctctacacgtggcttgtccgtgtatgtatgttttcacagacaacgatatgcatcgttgaaagaatcttatagatatcgtacaagtatgttcatcatttcaggcatgagaaagcgaggcttattatgtatcattcctcaactcgaaatgcgtacgaaatgcgtggggcatccgaccctcctctcgtaaacagcagacatttcaggcagtggatgttaaacagttcagaacatacatttcgaggaaggtgaggc

SEQ ID NO: 38154 - DNA, 1926 bp, Muscodor strobelii
  misc_feature: SGI cDNA ID NO. 573253
  misc_feature: Reduced expression when VOC is produced
  misc_feature: Encodes the peptide sequence at SEQ ID NO 38155
atggattccgtccccagcagctctgtgctacggaagcttgaagagcaggtctctaagaagcttaaaatcaagccttcgcccagctcagccgtagcaatggacgcaactacatcaccacacgccacaacctcgccttctgaacactcgacctccggtcgggcttccttctcctcagttagagaagtagacaacgatcttgctcaggcttttagtagtactaaggtctcatcatatttcaacggtgattcagacgaggctgtcgttggcgagagcaagactccagctcgcgaactagatatggccgagactcagtttatgacaccacttacccagccacatagtagacttcatggctgttggttccctgctgtcgccgccgacagctttcaaggatggaaacagattgacgtgaggggcaagccggcgagtcggagctttggagacttacaggcgttgcggatggtctggtcggcgcctactcctgtgtctaagaagccgaaagaagcccccgttcaacccgctcccggtagttcgatgattgagagacttccaatagagttaaagatgtcaatcatcgaccacctagtccttgatgtcccaccagaaggcctgaccagccgcaatgcagacttgatggctatgctcctgacctccaggaccatgcattctgccacacttaacgcgttgtacaggaacatcactattccacactccaagatctttcgaaagtttctaaaccacattactcaaaatcaggagctaggaactattgtacgaagactagacttcagccacttcaacccaacattgcttttcgagatggcaagtgagcgcgctactacccgcaacttgaccaacgaaacactactacagtgcttggagttgacgccattcttgcgcgagttcttggcgcaagagtatgtagacgatgacatagacaagcatgttctgaaaaagctgtttttcgggctcccacaattgaagggggtggatttctgtggctgttcatctgccaaattccggaccgcatttgaatcgatagtcgtcgaagattggccggagcagctatcaatccaacgcttgtcacttcaccgatgcatcaacatacattcttccgtttatgagacattgctaccacgacttgctcatctcacacatctcgacgtcgcagcgacccgtatcaccgacgcggcgctcatggcgattccgcacacagccagactcacccatctcaacctcgcgaagtgcaagctcctttccgcttcagcagtcatcgactttctcaccaaccacccagcggcccaggaccttgtgtacctgagcctggctgccgactgccgcagccatgagcttcttggcgaggaggatctcactcgtctcattcccattctcccttcaacccttcgctcactcagcttgaagggaagcaagatgaacagctcacacatcaaccttctgcgaccactcacgaagcatctcgaggagctttcactcggccgcagtctgaagactgaagacatcaaccgcctcttcatgccagacgaggaaatggaacaactgacatgggtcccacactccctcaagtacctcgatctctcggactatagctcagcctcactgaacatgactgcgctcttcggtagctcgtctctccttagccgacactcaacacctctcgaggttgtagagttccctgacgacgccttcaagcggctttcgcggtcccccgcgaccgagcgggctggttggcaagccacagacttcggcagtcgcgcttggctagttcgacgacctgctggtagtcgtgacctcggattcagagactggaaaatgggcgcggcattctggggcatgcgaaaagtgcctgttgcctttgctaacgtcggaggcatgtatgggagttatatgttcaagcgacaactttga

SEQ ID NO: 38155 - protein, 641 aa, Muscodor strobelii
  misc_feature: SGI Peptide ID NO. 573253
  misc_feature (25)..(641): NCBI GI: 85077748 Blast Desc: NCU03462 [Neurospora crassa OR74A] gi|28917096|gb|EAA26817.1| conserved [Neurospora crassa OR74A]
  misc_feature (25)..(641): NCBI GI: 18376084 Blast Desc: conserved [Neurospora crassa]
  misc_feature (23)..(641): NCBI GI: 116200043 Blast Desc: CHGG_08177 [Chaetomium globosum CBS 148.51] gi|88179456|gb|EAQ86924.1| CHGG_08177 [Chaetomium globosum CBS 148.51]
  misc_feature (45)..(641): NCBI GI: 171689892 Blast Desc: protein product [Podospora anserina] gi|170944908|emb|CAP71019.1| protein product [Podospora anserina]
  misc_feature (44)..(641): NCBI GI: 46107868 Blast Desc: FG00817.1 [Gibberella zeae PH-1]
  misc_feature (44)..(641): NCBI GI: 256734633 Blast Desc: [Nectria haematococca mpVI 77-13-4]
  misc_feature (65)..(633): NCBI GI: 145607051 Blast Desc: MGG_12108 [Magnaporthe grisea 70-15] gi|145014657|gb|EDJ99225.1| MGG_12108 [Magnaporthe grisea 70-15]
  misc_feature (40)..(639): NCBI GI: 156054514 Blast Desc: SS1G_06105 [Sclerotinia sclerotiorum 1980] gi|154703885|gb|EDO03624.1| SS1G_06105 [Sclerotinia sclerotiorum 1980]
  misc_feature (53)..(639): NCBI GI: 154321065 Blast Desc: BC1G_01407 [Botryotinia fuckeliana B05.10] gi|150851945|gb|EDN27137.1| BC1G_01407 [Botryotinia fuckeliana B05.10]
  misc_feature (49)..(639): NCBI GI: 67538796 Blast Desc: AN5568.2 [Aspergillus nidulans FGSC A4] gi|40743083|gb|EAA62273.1| AN5568.2 [Aspergillus nidulans FGSC A4] gi|259484972|tpe|CBF81649.1| TPA: Leucine Rich Repeat domain
  misc_feature: Useful for introducing or modulating the production of volatile compounds
MDSVPSSSVLRKLEEQVSKKLKIKPSPSSAVAMDATTSPHATTSPSEHSTSGRASFSSVREVDNDLAQAFSSTKVSSYFNGDSDEAVVGESKTPARELDMAETQFMTPLTQPHSRLHGCWFPAVAADSFQGWKQIDVRGKPASRSFGDLQALRMVWSAPTPVSKKPKEAPVQPAPGSSMIERLPIELKMSIIDHLVLDVPPEGLTSRNADLMAMLLTSRTMHSATLNALYRNITIPHSKIFRKFLNHITQNQELGTIVRRLDFSHFNPTLLFEMASERATTRNLTNETLLQCLELTPFLREFLAQEYVDDDIDKHVLKKLFFGLPQLKGVDFCGCSSAKFRTAFESIVVEDWPEQLSIQRLSLHRCINIHSSVYETLLPRLAHLTHLDVAATRITDAALMAIPHTARLTHLNLAKCKLLSASAVIDFLTNHPAAQDLVYLSLAADCRSHELLGEEDLTRLIPILPSTLRSLSLKGSKMNSSHINLLRPLTKHLEELSLGRSLKTEDINRLFMPDEEMEQLTWVPHSLKYLDLSDYSSASLNMTALFGSSSLLSRHSTPLEVVEFPDDAFKRLSRSPATERAGWQATDFGSRAWLVRRPAGSRDLGFRDWKMGAAFWGMRKVPVAFANVGGMYGSYMFKRQL

SEQ ID NO: 38156 - DNA, 3028 bp, Muscodor strobelii
  misc_feature: SGI EST ID NO. CUFF.91497.0
  misc_feature: Variant of the nucleotide sequence at SEQ ID NO 38154
cgccggtgccactcgccgccaattgtcggcgtaaactttactatatcaatcagattgtgaaagcacctctttgggtccgcctttagctggtcgcactgaacgagtgaatcaatcaatgactgctgctctactacgttttggtactccctgtcccttgctgccttcttgctctgcattctgcacctgagtgctccataggcggcgctactgcttcgtctaccccatactctttgctgtcttcccgttgctaggaaatagccgcctacgccaaatttgacttcaggaggagctctaccacttacacgcaaattctctcctctagctaacagtcccgttactcatcgccacttgggctcattcccatcaccaaatttcgacctgagaattgtcattcatcatccctcttactacatatcacttattcacataggcacgtaccagcacctaataaatcagccgaattgcttgatctggccgctgcttcttgtcctaccgccagcctttccaattcatcgcaaggccgttcccctgcatcgcaccatcaaaatctcttacctaaacccgccagctcttgactaacagaaacacgaacgttctgttacactcacacggctcctcaacactcatcacctgagtccactttgcatttccggggaagccaacacattcttaccgcttgggtccttgtggccacatcccattgtcatattttattggtaagggcaagggaattgaaagacattgcgctattgagattgttgcttgcaccacctcgcgtcgtatactgtatacatctcccaatctcagccattcctcttccagtttcaccctaccatcatggattccgtccccagcagctctgtgctacggaagcttgaagagcaggtctctaagaagcttaaaatcaagccttcgcccagctcagccgtagcaatggacgcaactacatcaccacacgccacaacctcgccttctgaacactcgacctccggtcgggcttccttctcctcagttagagaagtagacaacgatcttgctcaggcttttagtagtactaaggtctcatcatatttcaacggtgattcagacgaggctgtcgttggcgagagcaagactccagctcgcgaactagatatggccgagactcagtttatgacaccacttacccagccacatagtagacttcatggctgttggttccctgctgtcgccgccgacagctttcaaggatggaaacagattgacgtgaggggcaagccggcgagtcggagctttggagacttacaggcgttgcggatggtctggtcggcgcctactcctgtgtctaagaagccgaaagaagcccccgttcaacccgctcccggtagttcgatgattgagagacttccaatagagttaaagatgtcaatcatcgaccacctagtccttgatgtcccaccagaaggcctgaccagccgcaatgcagacttgatggctatgctcctgacctccaggaccatgcattctgccacacttaacgcgttgtacaggaacatcactattccacactccaagatctttcgaaagtttctaaaccacattactcaaaatcaggagctaggaactattgtacgaagactagacttcagccacttcaacccaacattgcttttcgagatggcaagtgagcgcgctactacccgcaacttgaccaacgaaacactactacagtgcttggagttgacgccattcttgcgcgagttcttggcgcaagagtatgtagacgatgacatagacaagcatgttctgaaaaagctgtttttcgggctcccacaattgaagggggtggatttctgtggctgttcatctgccaaattccggaccgcatttgaatcgatagtcgtcgaagattggccggagcagctatcaatccaacgcttgtcacttcaccgatgcatcaacatacattcttccgtttatgagacattgctaccacgacttgctcatctcacacatctcgacgtcgcagcgacccgtatcaccgacgcggcgctcatggcgattccgcacacagccagactcacccatctcaacctcgcgaagtgcaagctcctttccgcttcagcagtcatcgactttctcaccaaccacccagcggcccaggaccttgtgtacctgagcctggctgccgactgccgcagccatgagcttcttggcgaggaggatctcactcgtctcattcccattctcccttcaacccttcgctcactcagcttgaagggaagcaagatgaacagctcacacatcaaccttctgcgaccactcacgaagcatctcgaggagctttcactcggccgcagtctgaagactgaagacatcaaccgcctcttcatgccagacgaggaaatggaacaactgacatgggtcccacactccctcaagtacctcgatctctcggactatagctcagcctcactgaacatgactgcgctcttcggtagctcgtctctccttagccgacactcaacacctctcgaggttgtagagttccctgacgacgccttcaagcggctttcgcggtcccccgcgaccgagcgggctggttggcaagccacagacttcggcagtcgcgcttggctagttcgacgacctgctggtagtcgtgacctcggattcagagactggaaaatgggcgcggcattctggggcatgcgaaaagtgcctgttgcctttgctaacgtcggaggcatgtatgggagttatatgttcaagcgacaactttgattgagccggtgttattttatatgatgattacatgaatatgagctcacgacatgacacaaaaagaaaagactttgactcggatggtgttggactaggaaaagttgtataactacgatgaagcgttttctctactctcggctttgattgttggatgcattctatctggatttgagtggcattagcgaagggaagggaaatactcgttagtacctacatagtatcagataccagtagattttatcaagcagcggattgcttcgtctca

SEQ ID NO: 38157 - DNA, 1137 bp, Muscodor strobelii
  misc_feature: SGI cDNA ID NO. 573254
  misc_feature: Reduced expression when VOC is produced
  misc_feature: Encodes the peptide sequence at SEQ ID NO 38158
atgacatccaagatcaccatctcgcccctgcaattcccagaaggctcggccatcaactttggggccacagcagccaacgcagatatcgagaacttgactgatgccgacttcgctgtgatacgcgaggccctctttacacaccaagtacttgtttttaagaaccaaggtcatgcttcgccaaaggctcagtacgagctcacacaacgcttcgatccatcgagcgcgggatcttacggccacgggaagacaatcgacgcgaaacgttcgatcctacacccagatctcaagaccatcccccaccagccacaagtccaagtcatcggcaacggaaacatagcttcgtacgagggattgaaggacattaagcttcgccacccgcatcatcgcacattccacgacaccaaaatcccagatgaggaggatctagacttcacgcggttctacaggtggcacatcgatgccgcgctctacggtgctctcgcaccacccgtcgtgacgacacttctcgctgtgcaagttcccggtggtcgacgacagacatgtagatacgacgacggaacgggtgatgtacttgatgtgccactcggtactaccgcgtttgtatccggatacaccatgtacgatgcgctctccgaaaccgacaaggcatttgcacgtgggacaaaagtagagtatgcgcctcacccatacgtatggatgagcggcgcgaagtcacggtccgacgggttgggcatgctgtcgcaaaatctcgaaatcccactcgatgagctccccgcctattcccaagaggagatccagatcctacctctttgctggaaaaacccagtgactggcaaactggcaatccaggttcatccctcggcagtgagaaaactacatctggaggatggaacagtgatcgatgacctggagaaggttagggagattgtgcacaggttgcagagacagggtatcaatcctgatagagtgtatgcacatgattgggagcagggtgatttggtgttgttccataatcgtggcgtgttgcacagtgtcgttggtgcgtttgctgaggatgaggtcaggctgtttaggcagtgcaatttggcggctagtcatttccctgagggacctactgcggttgctacagctgcataa

SEQ ID NO: 38158 - protein, 378 aa, Muscodor strobelii
  misc_feature: SGI Peptide ID NO. 573254
  misc_feature (14)..(369): Pfam Id: PF02668 Pfam Desc: Taurine catabolism dioxygenase TauD, TfdA family
  misc_feature (124)..(369): Pfam Id: PF02668 Pfam Desc: Taurine catabolism dioxygenase TauD, TfdA family
  misc_feature (14)..(70): Pfam Id: PF02668 Pfam Desc: Taurine catabolism dioxygenase TauD, TfdA family
  misc_feature (7)..(371): NCBI GI: 171690566 Blast Desc: protein product [Podospora anserina] gi|170945231|emb|CAP71342.1| protein product [Podospora anserina]
  misc_feature (2)..(371): NCBI GI: 85112953 Blast Desc: NCU09738 [Neurospora crassa OR74A] gi|28926222|gb|EAA35204.1| NCU09738 [Neurospora crassa OR74A]
  misc_feature (1)..(378): NCBI GI: 256725680 Blast Desc: [Nectria haematococca mpVI 77-13-4]
  misc_feature (33)..(378): NCBI GI: 46111621 Blast Desc: FG02692.1 [Gibberella zeae PH-1]
  misc_feature (1)..(371): NCBI GI: 212546929 Blast Desc: conserved [Penicillium marneffei ATCC 18224] gi|210065138|gb|EEA19233.1| conserved [Penicillium marneffei ATCC 18224]
  misc_feature (5)..(364): NCBI GI: 67763579 Blast Desc: alpha-ketoglutarate dependent xanthine dioxygenase [Emericella nidulans]
  misc_feature (1)..(371): NCBI GI: 242822080 Blast Desc: conserved [Talaromyces stipitatus ATCC 10500] gi|218712731|gb|EED12156.1| conserved [Talaromyces stipitatus ATCC 10500]
  misc_feature (6)..(370): NCBI GI: 238497770 Blast Desc: conserved [Aspergillus flavus NRRL3357] gi|220693394|gb|EED49739.1| conserved [Aspergillus flavus NRRL3357]
  misc_feature (6)..(370): NCBI GI: 169768466 Blast Desc: [Aspergillus oryzae RIB40] gi|83766561|dbj|BAE56701.1| protein product [Aspergillus oryzae]
  misc_feature (6)..(368): NCBI GI: 145231184 Blast Desc: An01g14680 [Aspergillus niger] gi|134055986|emb|CAK44165.1| protein product [Aspergillus niger]
  misc_feature: Useful for introducing or modulating the production of volatile compounds
MTSKITISPLQFPEGSAINFGATAANADIENLTDADFAVIREALFTHQVLVFKNQGHASPKAQYELTQRFDPSSAGSYGHGKTIDAKRSILHPDLKTIPHQPQVQVIGNGNIASYEGLKDIKLRHPHHRTFHDTKIPDEEDLDFTRFYRWHIDAALYGALAPPVVTTLLAVQVPGGRRQTCRYDDGTGDVLDVPLGTTAFVSGYTMYDALSETDKAFARGTKVEYAPHPYVWMSGAKSRSDGLGMLSQNLEIPLDELPAYSQEEIQILPLCWKNPVTGKLAIQVHPSAVRKLHLEDGTVIDDLEKVREIVHRLQRQGINPDRVYAHDWEQGDLVLFHNRGVLHSVVGAFAEDEVRLFRQCNLAASHFPEGPTAVATAA

SEQ ID NO: 38159 - DNA, 1440 bp, Muscodor strobelii
  misc_feature: SGI EST ID NO. CUFF.91559.0
  misc_feature: Variant of the nucleotide sequence at SEQ ID NO 38157
cgtgcattgaaatttcttttgaatagatctgagacatcggaagaaattgatcattgaacctcagattttcaagaacaatactacaaagcttccaaaatattcaccgcataggagtcagtggccagaaggatattaccaacaatgacatccaagatcaccatctcgcccctgcaattcccagaaggctcggccatcaactttggggccacagcagccaacgcagatatcgagaacttgactgatgccgacttcgctgtgatacgcgaggccctctttacacaccaagtacttgtttttaagaaccaaggtcatgcttcgccaaaggctcagtacgagctcacacaacgcttcgatccatcgagcgcgggatcttacggccacgggaagacaatcgacgcgaaacgttcgatcctacacccagatctcaagaccatcccccaccagccacaagtccaagtcatcggcaacggaaacatagcttcgtacgagggattgaaggacattaagcttcgccacccgcatcatcgcacattccacgacaccaaaatcccagatgaggaggatctagacttcacgcggttctacaggtggcacatcgatgccgcgctctacggtgctctcgcaccacccgtcgtgacgacacttctcgctgtgcaagttcccggtggtcgacgacagacatgtagatacgacgacggaacgggtgatgtacttgatgtgccactcggtactaccgcgtttgtatccggatacaccatgtacgatgcgctctccgaaaccgacaaggcatttgcacgtgggacaaaagtagagtatgcgcctcacccatacgtatggatgagcggcgcgaagtcacggtccgacgggttgggcatgctgtcgcaaaatctcgaaatcccactcgatgagctccccgcctattcccaagaggagatccagatcctacctctttgctggaaaaacccagtgactggcaaactggcaatccaggttcatccctcggcagtgagaaaactacatctggaggatggaacagtgatcgatgacctggagaaggttagggagattgtgcacaggttgcagagacagggtatcaatcctgatagagtgtatgcacatgattgggagcagggtgatttggtgttgttccataatcgtggcgtgttgcacagtgtcgttggtgcgtttgctgaggatgaggtcaggctgtttaggcagtgcaatttggcggctagtcatttccctgagggacctactgcggttgctacagctgcataaagaccttgaggattgaggacaaggacgctgagaatgagcgcttgatactaagaatggcagatacatgttgtttcgtagcttataagaatgaaatgaattttacattactagtctgatataatacaaccccttcgagacctggcccgggaaatcaaattccta

SEQ ID NO: 38160 - DNA, 2406 bp, Muscodor strobelii
  misc_feature: SGI cDNA ID NO. 573255
  misc_feature: Encodes the peptide sequence at SEQ ID NO 38161
atggctgatatgtcgcaaccaccaatgtcagcgaccagtgtcgataatacagaggcgtcgccagtcctgtctgcccctgatgatcaaacctcggagtcctccaaaccaccaccgaggaaacgcaggcgcatcgtcattagctgtaccgaatgtcaccggcgcaagcagaaatgtgatcgaaaattaccgtgcaccaattgcgtttcacggaaaaaggcatcagcttgtcgctacgaaactggcgcaccggccgcgaagcaactgccaaatcgcaatatcgcatcgcccaacaactcaagccacgaggcgctttctgacaacactgaaatcaataagaatacgaaggcagctgatttcggttattcgacgaatgccggatcgacgcttgggttgttgcgccggatcgagggtgctggcagcggcgaaccactggccggtatgctcaccgacggccagcaggaggtcagcttagatatgcgcgaccgctataagtcattgatccggcagctgcccgcgagaacacacgtagaaaagctcatcgatatatactttcacgatgttaactggcattattccggaatcgacgagacgcttttgcgcggtcttttattacgttggtacagcatccctttttctgtgctgtccagcgcaggacccttagccttggaccccatgcttagagctttgccggctctgttatttcaaatggtcgctaccgccatactctatctgccgtcagacgtggagaagagctttgactgtctgaagtttaccgacaatatgacttttgatgatttggcggtggaatatagtgaaactggtatgtctatagcgtcgcttttgggtaagcgacaaatgtccataattacggtacttgctggttggaccagggcatctttgctcaaatctactggaatggtcacagaagcttggcatcaaatagggacatgtatccgagatgcacaaggtataggcctcgacagagattcattagatccccagccaagcgcccaggactcttccgacgaagcaatggagaaactatggatggtgcaacagcgacgtgtaatctggcttctactgatcagctgggatctacacacgggagctgtcttgggccggccctcaagcgtagatcaccgtctagtaagccgcacttatcccatagacgccaaaacgaccaaagaccccatacattcgcctttgataccgcgcacaatggatgatgcgccaacacccctcacgcgaacaatatgggcatgggagattatgagtcagctacgggatatactggatctcgagaaagaagggccattccctaaggacttcgcgagagtcgataaactgcatgctgatatacaggatctacgtgaccgcacgcctccttgctttcgcctacataacccagatacgagattcgacgatttaccggaatgttggtggataccctgtatacgggcacaattcccacagctttgcgcattcaacacccttgcgctgcatagaccgtatgtgtttacgcgcagcgtgagtagatacgccgctttgaaagcgagtctggagatgttagagtcgcaacgattacaatacgctgttttgaacacagcacagcatagaacatatgcccttttcttcggtacatttgacgccgttgtcatggtggcatccatctatattctgtttccccgcgagcatcccgagttactcgaagaagcaagacagcatttccagtgggcggttgacaggttcgagaaaatggctgagcgaaaccaactcgcgcgctctgcgcttggcgtgctgcaggctatctggatacgattcaagaaagcagttggtcgaggatttatcgcttgcagatgcagcaaccaggctgaggctgagacagaagctgctacaaactggctggaatcagctgctagacagcatggcatgaacgcatcggcgtctcccgcgacgacagaaacaagtttgccgaatacggaggctacgagaccaccaagttcacagggtaccgggcacacgtcaacgagtattcagtcagataggagcggacttgtgaggcctgattggacccttcctaccgattttgatttaagtgctattatgcccatgtaccccatgggagatatcgcatataacgacctgatgggtgtactcagtgatgcaggccctcggattggaggggccgcgagaacggattcctggcatgaggaaagttattcgtctacgcctacgcctcaacatagcggggcaatggggatgccaggcttgcataccatgccgcctggtcaagaacagattccttggcagtttggcggtgaatttggtattgatacgatttggaatgtactgaaccaatttccttcgaattatgaggatcctagagatatgggggcgagacaatag

SEQ ID NO: 38161 - protein, 801 aa, Muscodor strobelii
  misc_feature: SGI Peptide ID NO. 573255
  misc_feature (46)..(85): Pfam Id: PF00172 Pfam Desc: Fungal Zn(2)-Cys(6) binuclear cluster domain
  misc_feature (46)..(78): Pfam Id: PF00172 Pfam Desc: Fungal Zn(2)-Cys(6) binuclear cluster domain
  misc_feature (44)..(715): NCBI GI: 116200083 Blast Desc: CHGG_08197 [Chaetomium globosum CBS 148.51] gi|88179476|gb|EAQ86944.1| CHGG_08197 [Chaetomium globosum CBS 148.51]
  misc_feature (36)..(792): NCBI GI: 46121557 Blast Desc: FG05157.1 [Gibberella zeae PH-1]
  misc_feature (47)..(789): NCBI GI: 256732969 Blast Desc: NECHADRAFT_92542 [Nectria haematococca mpVI 77-13-4]
  misc_feature (99)..(787): NCBI GI: 171689964 Blast Desc: protein product [Podospora anserina] gi|170944944|emb|CAP71055.1| protein product [Podospora anserina]
  misc_feature (44)..(612): NCBI GI: 164427437 Blast Desc: NCU03489 [Neurospora crassa OR74A] gi|18376338|emb|CAD21084.1| conserved [Neurospora crassa] gi|157071742|gb|EAA26640.2| [Neurospora crassa OR74A]
  misc_feature (53)..(787): NCBI GI: 156043974 Blast Desc: SS1G_10090 [Sclerotinia sclerotiorum 1980] gi|154694479|gb|EDN94217.1| SS1G_10090 [Sclerotinia sclerotiorum 1980]
  misc_feature (43)..(596): NCBI GI: 145607005 Blast Desc: MGG_12097 [Magnaporthe grisea 70-15] gi|145014621|gb|EDJ99189.1| MGG_12097 [Magnaporthe grisea 70-15]
  misc_feature (35)..(787): NCBI GI: 261356825 Blast Desc: conserved [Verticillium albo-atrum VaMs.102]
  misc_feature (40)..(614): NCBI GI: 256726487 Blast Desc: NECHADRAFT_79743 [Nectria haematococca mpVI 77-13-4]
  misc_feature (167)..(610): NCBI GI: 238482205 Blast Desc: AFLA_074230 [Aspergillus flavus NRRL3357] gi|220700391|gb|EED56729.1| AFLA_074230 [Aspergillus flavus NRRL3357]
MADMSQPPMSATSVDNTEASPVLSAPDDQTSESSKPPPRKRRRIVISCTECHRRKQKCDRKLPCTNCVSRKKASACRYETGAPAAKQLPNRNIASPNNSSHEALSDNTEINKNTKAADFGYSTNAGSTLGLLRRIEGAGSGEPLAGMLTDGQQEVSLDMRDRYKSLIRQLPARTHVEKLIDIYFHDVNWHYSGIDETLLRGLLLRWYSIPFSVLSSAGPLALDPMLRALPALLFQMVATAILYLPSDVEKSFDCLKFTDNMTFDDLAVEYSETGMSIASLLGKRQMSIITVLAGWTRASLLKSTGMVTEAWHQIGTCIRDAQGIGLDRDSLDPQPSAQDSSDEAMEKLWMVQQRRVIWLLLISWDLHTGAVLGRPSSVDHRLVSRTYPIDAKTTKDPIHSPLIPRTMDDAPTPLTRTIWAWEIMSQLRDILDLEKEGPFPKDFARVDKLHADIQDLRDRTPPCFRLHNPDTRFDDLPECWWIPCIRAQFPQLCAFNTLALHRPYVFTRSVSRYAALKASLEMLESQRLQYAVLNTAQHRTYALFFGTFDAVVMVASIYILFPREHPELLEEARQHFQWAVDRFEKMAERNQLARSALGVLQAIWIRFKKAVGRGFIACRCSNQAEAETEAATNWLESAARQHGMNASASPATTETSLPNTEATRPPSSQGTGHTSTSIQSDRSGLVRPDWTLPTDFDLSAIMPMYPMGDIAYNDLMGVLSDAGPRIGGAARTDSWHEESYSSTPTPQHSGAMGMPGLHTMPPGQEQIPWQFGGEFGIDTIWNVLNQFPSNYEDPRDMGARQ

SEQ ID NO: 38162 - DNA, 3081 bp, Muscodor strobelii
  misc_feature: SGI EST ID NO. CUFF.91516.0
  misc_feature: Variant of the nucleotide sequence at SEQ ID NO 38160
tacatacgcagagagcgtcgcattggcatcatcttctcctctacataattcatcggccttaccaggtcttcggcgttgaagctgtactcacaacattgaactttatgtctttacttgctactgttgcgagcacgatactccacaactctaatcctgtcttcctggcatctacttttgcgcttgtgagcttaatcctacgagacaagctcttatgatcccatcggcaatgtgctaagtccgacaacggttattggactttcttttctgagaacctggcactgtttcgtatctattagctactctgacatcatggctgatatgtcgcaaccaccaatgtcagcgaccagtgtcgataatacagaggcgtcgccagtcctgtctgcccctgatgatcaaacctcggagtcctccaaaccaccaccgaggaaacgcaggcgcatcgtcattagctgtaccgaatgtcaccggcgcaagcagaaatgtgatcgaaaattaccgtgcaccaattgcgtttcacggaaaaaggcatcagcttgtcgctacgaaactggcgcaccggccgcgaagcaactgccaaatcgcaatatcgcatcgcccaacaactcaagccacgaggcgctttctgacaacactgaaatcaataagaatacgaaggcagctgatttcggttattcgacgaatgccggatcgacgcttgggttgttgcgccggatcgagggtgctggcagcggcgaaccactggccggtatgctcaccgacggccagcaggaggtcagcttagatatgcgcgaccgctataagtcattgatccggcagctgcccgcgagaacacacgtagaaaagctcatcgatatatactttcacgatgttaactggcattattccggaatcgacgagacgcttttgcgcggtcttttattacgttggtacagcatccctttttctgtgctgtccagcgcaggacccttagccttggaccccatgcttagagctttgccggctctgttatttcaaatggtcgctaccgccatactctatctgccgtcagacgtggagaagagctttgactgtctgaagtttaccgacaatatgacttttgatgatttggcggtggaatatagtgaaactggtatgtctatagcgtcgcttttgggtaagcgacaaatgtccataattacggtacttgctggttggaccagggcatctttgctcaaatctactggaatggtcacagaagcttggcatcaaatagggacatgtatccgagatgcacaaggtataggcctcgacagagattcattagatccccagccaagcgcccaggactcttccgacgaagcaatggagaaactatggatggtgcaacagcgacgtgtaatctggcttctactgatcagctgggatctacacacgggagctgtcttgggccggccctcaagcgtagatcaccgtctagtaagccgcacttatcccatagacgccaaaacgaccaaagaccccatacattcgcctttgataccgcgcacaatggatgatgcgccaacacccctcacgcgaacaatatgggcatgggagattatgagtcagctacgggatatactggatctcgagaaagaagggccattccctaaggacttcgcgagagtcgataaactgcatgctgatatacaggatctacgtgaccgcacgcctccttgctttcgcctacataacccagatacgagattcgacgatttaccggaatgttggtggataccctgtatacgggcacaattcccacagctttgcgcattcaacacccttgcgctgcatagaccgtatgtgtttacgcgcagcgtgagtagatacgccgctttgaaagcgagtctggagatgttagagtcgcaacgattacaatacgctgttttgaacacagcacagcatagaacatatgcccttttcttcggtacatttgacgccgttgtcatggtggcatccatctatattctgtttccccgcgagcatcccgagttactcgaagaagcaagacagcatttccagtgggcggttgacaggttcgagaaaatggctgagcgaaaccaactcgcgcgctctgcgcttggcgtgctgcaggctatctggatacgattcaagaaagcagttggtcgaggatttatcgcttgcagatgcagcaaccaggctgaggctgagacagaagctgctacaaactggctggaatcagctgctagacagcatggcatgaacgcatcggcgtctcccgcgacgacagaaacaagtttgccgaatacggaggctacgagaccaccaagttcacagggtaccgggcacacgtcaacgagtattcagtcagataggagcggacttgtgaggcctgattggacccttcctaccgattttgatttaagtgctattatgcccatgtaccccatgggagatatcgcatataacgacctgatgggtgtactcagtgatgcaggccctcggattggaggggccgcgagaacggattcctggcatgaggaaagttattcgtctacgcctacgcctcaacatagcggggcaatggggatgccaggcttgcataccatgccgcctggtcaagaacagattccttggcagtttggcggtgaatttggtattgatacgatttggaatgtactgaaccaatttccttcgaattatgaggatcctagagatatgggggcgagacaatagaatttatgaaagagagaacgggatggacgatgtgttatacagattacaatatgatagcgttacgtatcaaatattcgaatatgtcagtcatgttgatcggattatcttgtatatctttgtttgctttgcaatgccaacattctctgactgggaatacagttgatgtatttgtgtatccttcgccttttgccgttttaaatgagtaaaatttcgagagcaactgcacactcacatcatttcacatacaagccaaataggaattttcacgaatttcaacccttcatacaaacaagtaatccagaagctcaactattcggcatatggcgatttgcatgaatccaaacagatatcccgcgatttagaagc

SEQ ID NO: 38163 - DNA, 651 bp, Muscodor strobelii
  misc_feature: SGI cDNA ID NO. 573256
  misc_feature: Elevated expression when VOC is produced
  misc_feature: Encodes the peptide sequence at SEQ ID NO 38164
atggctgagcgaaaccaactcgcgcgctctgcgcttggcgtgctgcaggctatctggatacgattcaagaaagcagttggtcgaggatttatcgcttgcagatgcagcaaccaggctgaggctgagacagaagctgctacaaactggctggaatcagctgctagacagcatggcatgaacgcatcggcgtctcccgcgacgacagaaacaagtttgccgaatacggaggctacgagaccaccaagttcacagggtaccgggcacacgtcaacgagtattcagtcagataggagcggacttgtgaggcctgattggacccttcctaccgattttgatttaagtgctattatgcccatgtaccccatgggagatatcgcatataacgacctgatgggtgtactcagtgatgcaggccctcggattggaggggccgcgagaacggattcctggcatgaggaaagttattcgtctacgcctacgcctcaacatagcggggcaatggggatgccaggcttgcataccatgccgcctggtcaagaacagattccttggcagtttggcggtgaatttggtattgatacgatttggaatgtactgaaccaatttccttcgaattatgaggatcctagagatatgggggcgagacaatag

SEQ ID NO: 38164 - protein, 216 aa, Muscodor strobelii
  misc_feature: SGI Peptide ID NO. 573256
  misc_feature (1)..(204): NCBI GI: 256732969 Blast Desc: NECHADRAFT_92542 [Nectria haematococca mpVI 77-13-4]
  misc_feature (1)..(202): NCBI GI: 171689964 Blast Desc: protein product [Podospora anserina] gi|170944944|emb|CAP71055.1| protein product [Podospora anserina]
  misc_feature (1)..(202): NCBI GI: 261356825 Blast Desc: conserved [Verticillium albo-atrum VaMs.102]
  misc_feature (1)..(207): NCBI GI: 46121557 Blast Desc: FG05157.1 [Gibberella zeae PH-1]
  misc_feature (1)..(202): NCBI GI: 156043974 Blast Desc: SS1G_10090 [Sclerotinia sclerotiorum 1980] gi|154694479|gb|EDN94217.1| SS1G_10090 [Sclerotinia sclerotiorum 1980]
  misc_feature: Useful for introducing or modulating the production of volatile compounds
MAERNQLARSALGVLQAIWIRFKKAVGRGFIACRCSNQAEAETEAATNWLESAARQHGMNASASPATTETSLPNTEATRPPSSQGTGHTSTSIQSDRSGLVRPDWTLPTDFDLSAIMPMYPMGDIAYNDLMGVLSDAGPRIGGAARTDSWHEESYSSTPTPQHSGAMGMPGLHTMPPGQEQIPWQFGGEFGIDTIWNVLNQFPSNYEDPRDMGARQ

SEQ ID NO: 38165 - DNA, 3081 bp, Muscodor strobelii; identical to SEQ ID NO: 38162
  misc_feature: SGI EST ID NO. CUFF.91516.0
  misc_feature: Variant of the nucleotide sequence at SEQ ID NO 38163

SEQ ID NO: 38166 - DNA, 843 bp, Muscodor strobelii
  misc_feature: SGI cDNA ID NO. 573257
  misc_feature: Encodes the peptide sequence at SEQ ID NO 38167
atgttagagtcgcaacgattacaatacgctgttttgaacacagcacagcatagaacatatgcccttttcttcggtacatttgacgccgttgtcatggtggcatccatctatattctgtttccccgcgagcatcccgagttactcgaagaagcaagacagcatttccagtgggcggttgacaggttcgagaaaatggctgagcgaaaccaactcgcgcgctctgcgcttggcgtgctgcaggctatctggatacgattcaagaaagcagttggtcgaggatttatcgcttgcagatgcagcaaccaggctgaggctgagacagaagctgctacaaactggctggaatcagctgctagacagcatggcatgaacgcatcggcgtctcccgcgacgacagaaacaagtttgccgaatacggaggctacgagaccaccaagttcacagggtaccgggcacacgtcaacgagtattcagtcagataggagcggacttgtgaggcctgattggacccttcctaccgattttgatttaagtgctattatgcccatgtaccccatgggagatatcgcatataacgacctgatgggtgtactcagtgatgcaggccctcggattggaggggccgcgagaacggattcctggcatgaggaaagttattcgtctacgcctacgcctcaacatagcggggcaatggggatgccaggcttgcataccatgccgcctggtcaagaacagattccttggcagtttggcggtgaatttggtattgatacgatttggaatgtactgaaccaatttccttcgaattatgaggatcctagagatatgggggcgagacaatag

SEQ ID NO: 38167 - protein, 280 aa, Muscodor strobelii
  misc_feature: SGI Peptide ID NO. 573257
  misc_feature (20)..(266): NCBI GI: 171689964 Blast Desc: protein product [Podospora anserina] gi|170944944|emb|CAP71055.1| protein product [Podospora anserina]
  misc_feature (2)..(268): NCBI GI: 256732969 Blast Desc: NECHADRAFT_92542 [Nectria haematococca mpVI 77-13-4]
  misc_feature (2)..(271): NCBI GI: 46121557 Blast Desc: FG05157.1 [Gibberella zeae PH-1]
  misc_feature (1)..(194): NCBI GI: 116200083 Blast Desc: CHGG_08197 [Chaetomium globosum CBS 148.51] gi|88179476|gb|EAQ86944.1| CHGG_08197 [Chaetomium globosum CBS 148.51]
  misc_feature (2)..(266): NCBI GI: 261356825 Blast Desc: conserved [Verticillium albo-atrum VaMs.102]
  misc_feature (1)..(266): NCBI GI: 156043974 Blast Desc: SS1G_10090 [Sclerotinia sclerotiorum 1980] gi|154694479|gb|EDN94217.1| SS1G_10090 [Sclerotinia sclerotiorum 1980]
  misc_feature (1)..(74): NCBI GI: 145607005 Blast Desc: MGG_12097 [Magnaporthe grisea 70-15] gi|145014621|gb|EDJ99189.1| MGG_12097 [Magnaporthe grisea 70-15]
  misc_feature (1)..(91): NCBI GI: 164427437 Blast Desc: NCU03489 [Neurospora crassa OR74A] gi|18376338|emb|CAD21084.1| conserved [Neurospora crassa] gi|157071742|gb|EAA26640.2| [Neurospora crassa OR74A]
  misc_feature (1)..(93): NCBI GI: 256726487 Blast Desc: NECHADRAFT_79743 [Nectria haematococca mpVI 77-13-4]
MLESQRLQYAVLNTAQHRTYALFFGTFDAVVMVASIYILFPREHPELLEEARQHFQWAVDRFEKMAERNQLARSALGVLQAIWIRFKKAVGRGFIACRCSNQAEAETEAATNWLESAARQHGMNASASPATTETSLPNTEATRPPSSQGTGHTSTSIQSDRSGLVRPDWTLPTDFDLSAIMPMYPMGDIAYNDLMGVLSDAGPRIGGAARTDSWHEESYSSTPTPQHSGAMGMPGLHTMPPGQEQIPWQFGGEFGIDTIWNVLNQFPSNYEDPRDMGARQ

SEQ ID NO: 38168 - DNA, 3081 bp, Muscodor strobelii; identical to SEQ ID NO: 38162
  misc_feature: SGI EST ID NO. CUFF.91516.0
  misc_feature: Variant of the nucleotide sequence at SEQ ID NO 38166

SEQ ID NO: 38169 - DNA, 1143 bp, Muscodor strobelii
  misc_feature: SGI cDNA ID NO. 573258
  misc_feature: Encodes the peptide sequence at SEQ ID NO 38170
atgagtgcgactcaggagcgacgaccggccgtgtccgcgacgtttgccgacagggcgaaggccgcgacgcacccgctcgcgaattacctattccgattaatggaactgaagcaatctaatctctgcctcagtgccgacgtcaccaatgctcgcgaattactcgccttagccgacgccatcggtccctccatagtcgtgttcaagacgcactacgatctcgttgcaggctgggattatcatcacaagactggcactggcgcgaaactatgcgcccttggcaggaaacatggatttctcatctttgaggatcggaaattcggtgacattggccacacggtccagatgcagtacactggaggtactgcacgcatcatcgactgggctcacatcgtcaatgtgaacatggtcccgggtaaaccagctgttaaggctctttctgaggcagcgaagcactggcggtcgcgtgtcaattatgaggtgaacacggccattacagtgggcactcctgtctccgatacatttgaaaatgaagacgacgaagaagcagatcagattggtcccatgcacccactccctccgccagtgcagcatcatgaatcaagcggtagtggaaggaaaggtagcatcgtatctattactactctgacccagtcattcgagccagtcgactcgccacgttttcccggcggtatcattacggaaggagatgagatggtgttccaggggattgaagagcccccgtttgagcgaggactgttgatattggcacagatgtcaagtcaaggaaactttatgggccctgactacacacgagcttgccaggaagccgctcgggagaatcaagactttgttatgggtttcatatcccagggaacacttaacacagagcccagcgacaacttcatttccttgacgccaggtgttcagttgccacctgagggcgatgacgagggcgcaacagttgaaggagacgggcttggccaacagtacaatacaccagcgaagatggttggcgaggacggaagtgatatcatcattgttggtcggggcattctaaaagccggagcgccgcgtgcggaagctgaacgataccgaaggcgggcatggaaggaatatctcacccggacgggacagcgcccatag

SEQ ID NO: 38170 - protein, 380 aa, Muscodor strobelii
  misc_feature: SGI Peptide ID NO. 573258
  misc_feature (39)..(364): Pfam Id: PF00215 Pfam Desc: Orotidine 5'-phosphate decarboxylase / HUMPS family
  misc_feature (5)..(378): NCBI GI: 145607007 Blast Desc: MGG_12098 [Magnaporthe grisea 70-15] gi|145014622|gb|EDJ99190.1| MGG_12098 [Magnaporthe grisea 70-15]
  misc_feature (6)..(375): NCBI GI: 171689962 Blast Desc: protein product [Podospora anserina] gi|170944943|emb|CAP71054.1| protein product [Podospora anserina]
  misc_feature (9)..(375): NCBI GI: 118370 Blast Desc: PYRF_TRIRE RecName: Full=Orotidine 5'-phosphate decarboxylase; AltName: Full=OMP decarboxylase; Short=OMPdecase; Short=OMPDCase; AltName: Full=Uridine 5'-monophosphate synthase;
  misc_feature (9)..(375): NCBI GI: 256732970 Blast Desc: [Nectria haematococca mpVI 77-13-4]
  misc_feature (9)..(375): NCBI GI: 46121555 Blast Desc: FG05156.1 [Gibberella zeae PH-1]
  misc_feature (11)..(375): NCBI GI: 1083936 Blast Desc: FG05156.1 [Gibberella zeae PH-1]
  misc_feature (11)..(375): NCBI GI: 1078642 Blast Desc: FG05156.1 [Gibberella zeae PH-1]
  misc_feature (9)..(375): NCBI GI: 2499363 Blast Desc: PYRF_TRIAT RecName: Full=Orotidine 5'-phosphate decarboxylase; AltName: Full=OMP decarboxylase; Short=OMPdecase; Short=OMPDCase; AltName: Full=Uridine 5'-monophosphate synthase;
  misc_feature (9)..(375): NCBI GI: 156064265 Blast Desc: SS1G_00140 [Sclerotinia sclerotiorum 1980] gi|154691002|gb|EDN90740.1| SS1G_00140 [Sclerotinia sclerotiorum 1980]
  misc_feature (1)..(375): NCBI GI: 2499362 Blast Desc: PYRF_SORMA RecName: Full=Orotidine 5'-phosphate decarboxylase; AltName: Full=OMP decarboxylase; Short=OMPdecase; Short=OMPDCase; AltName: Full=Uridine 5'-monophosphate synthase;
  misc_feature (9)..(375): SWISSPROT Homolog: EC 4.1.1.23 Orotidine-5'-phosphate decarboxylase
MSATQERRPAVSATFADRAKAATHPLANYLFRLMELKQSNLCLSADVTNARELLALADAIGPSIVVFKTHYDLVAGWDYHHKTGTGAKLCALGRKHGFLIFEDRKFGDIGHTVQMQYTGGTARIIDWAHIVNVNMVPGKPAVKALSEAAKHWRSRVNYEVNTAITVGTPVSDTFENEDDEEADQIGPMHPLPPPVQHHESSGSGRKGSIVSITTLTQSFEPVDSPRFPGGIITEGDEMVFQGIEEPPFERGLLILAQMSSQGNFMGPDYTRACQEAARENQDFVMGFISQGTLNTEPSDNFISLTPGVQLPPEGDDEGATVEGDGLGQQYNTPAKMVGEDGSDIIIVGRGILKAGAPRAEAERYRRRAWKEYLTRTGQRP

SEQ ID NO: 38171 - DNA, 3020 bp, Muscodor strobelii
  misc_feature: SGI EST ID NO. CUFF.91897.2
  misc_feature: Variant of the nucleotide sequence at SEQ ID NO 38169
ttatgtttggacagagtacgctagggattgtgatggtctgaccaacaacaaaatagtatacaaggtctactgtcgtgtgctgctgctcttagtccgtcccgaccctcagggcacttttcaagggtgtccgatctgggctctgcaagcttggggtaagccaacgctttttttgtcttgacacagaggctttcccacctcctcagctcctcattcgcggcccttcttcccttcgcagtccatccctccaatctcctttgccctccaatctcaaacctgccgacctgccacagagggtgtttgtgtgtcgcagaccattgtggcgagtgcgggcaagcgggcgtcatcggcatccttatactcatccttcgttatgccccaatagtaagtatatggatgcatacttgtctacggagtataagtttacccagctgcgccgtctccctaccgtaggctcccgagtcccgtcttttgccgccgcaatctcaggtgcatctcgagggcggtgtatgtcggacacaataactgacctttccctgtaggcataggcagaccaaactttgaacgccagcaagcaacaacctgggacagctgagggcgattgttagcttgtgcaatttgcttctcgaattgagaggattgttgggatccttgaaccaggcccttggcagggaatagagcttggaggtcgagaatcactacaaaaagggctaagaagacaccctggaattgacatcattgggcgctccacagggttctcgtccatcagccgatcgccctgccaccactgtgggcagactattggaagtcagttgttttcgtgggggatacctgtccgtcgacgtaacctatactacaccgaccacaggtttttgctgcctccttgacagctcttatctgccaccttacctggatttctttacctcctacacacatgccaattcgcattgcggccacgtagcagcaccggcattgttgatttctccagcatcgaacatcaggtgccgcccttcggacagcctgaacaagcccgacgtcgtacgaatacggcgcagctcctttgcaaccactgactaagacttcggccgcctgccacttagtcctcgaatcgacaccggcaggcataagacatacggcgacgcatctcatgcacacgatttttcacgtcaacacgccttgcaattgtttacatatcagggcttttggctccctcatcgccaattgaccttgtcgccaagttcttgagagcttcaggtctcgccgcttcgtccgcgctcgagaaccttggcattgagactacagcgagtcacgacttctcctgcaagactctggattgactagccacgaacagaactggctatgagtgcgactcaggagcgacgaccggccgtgtccgcgacgtttgccgacagggcgaaggccgcgacgcacccgctcgcgaattacctattccgattaatggaactgaagcaatctaatctctgcctcagtgccgacgtcaccaatgctcgcgaattactcgccttagccgacgccatcggtccctccatagtcgtgttcaagacgcactacgatctcgttgcaggctgggattatcatcacaagactggcactggcgcgaaactatgcgcccttggcaggaaacatggatttctcatctttgaggatcggaaattcggtgacattggccacacggtccagatgcagtacactggaggtactgcacgcatcatcgactgggctcacatcgtcaatgtgaacatggtcccgggtaaaccagctgttaaggctctttctgaggcagcgaagcactggcggtcgcgtgtcaattatgaggtgaacacggccattacagtgggcactcctgtctccgatacatttgaaaatgaagacgacgaagaagcagatcagattggtcccatgcacccactccctccgccagtgcagcatcatgaatcaagcggtagtggaaggaaaggtagcatcgtatctattactactctgacccagtcattcgagccagtcgactcgccacgttttcccggcggtatcattacggaaggagatgagatggtgttccaggggattgaagagcccccgtttgagcgaggactgttgatattggcacagatgtcaagtcaaggaaactttatgggccctgactacacacgagcttgccaggaagccgctcgggagaatcaagactttgttatgggtttcatatcccagggaacacttaacacagagcccagcgacaacttcatttccttgacgccaggtgttcagttgccacctgagggcgatgacgagggcgcaacagttgaaggagacgggcttggccaacagtacaatacaccagcgaagatggttggcgaggacggaagtgatatcatcattgttggtcggggcattctaaaagccggagcgccgcgtgcggaagctgaacgataccgaaggcgggcatggaaggaatatctcacccggacgggacagcgcccatagtttagaaggcaattcagcaaagcaacgcagtcttacacaaagctcgcgttgaggaggttgcaagagcagctaaaggtgaactcgaactaagcagtttggtgctaggtgttttggtatctcgcgttttaggcctgaaaatagagatgggcaaagggaaatacccatcaatcaatggaggaagtcaatcgtcattgtggtgcatttacacgatacaatcacgaacacgactccgcgaggagcatactcactaagacaaggttagaaatgagaagacacaatattttgacctacactttcgggacagcaaatgtccgtggactcgtcatctagcatcatgactccagccagcgctatgattgctgataggtgcagttgcgaggagaccaatgaaggcggcgatctctgttgaggtgatggagtagagtaagcaatctcgatacagcaactatccttggacttattactctaccgaacgagagtatatgggtcacacactaccccaatacatccgtacctttcta

SEQ ID NO: 38172 - DNA, 891 bp, Muscodor strobelii
  misc_feature: SGI cDNA ID NO. 573259
  misc_feature: Encodes the peptide sequence at SEQ ID NO 38173
atgggacagtgcttatcaaaaaagtctcgagacacctatcctatttttgtctcgctaggtatggtggtcctcgacgaactacggttcacccatcgcgatccattattcgacatattaggcggctcggggttgtatgctacctttggtgctcgtttattgaagccagcaaaccactctgctaaagtcggttgcatcatcatagctggtcacgactttcccaagcccgctactcgtctgctacaaagctggaaaatgacgctcttaattgcgccctgtcttgacaaaccatcgactcgaggccttctgcagtatgaagacgacagtttcggtaaagaaaggtcattcgcgtataccactcctccactacggcctacaccaacgcacttagccaactccgttttacttggtgcccgatcattccacttccttgcacacccaacatatttacagaatgacattgccgcgttgctccatttgcgtcaagaaaaagacatcgtcgaacaacctttgattgtgtgggagcctgctccagtgggttgcgatcctgccaacctcgcaagccatctcaaagcatgtaaactagtagacgtcttctcacctaaccatttagaactcggatatctgattgaaggcaagcaacaaaatgagcctgtgttctcgcgtgaagtcatcgaggctcaggcgcggatgttccttgactcgggcgttgggagagatggagacgggctggtcgtaatccgttcaggagagcatggtgtttactacttatcgaaggaacagttcggtccggccaagctcagtgcctcatcctgtaggtctgcggagcgctggaatgggtcagatgtcatgtaccgtgtgcaggaatttgagtctcgcatctcaggctcctga

SEQ ID NO: 38173 - protein, 296 aa, Muscodor strobelii
  misc_feature: SGI Peptide ID NO. 573259
  misc_feature (1)..(259): NCBI GI: 256723482 Blast Desc: NECHADRAFT_81108 [Nectria haematococca mpVI 77-13-4]
  misc_feature (15)..(256): NCBI GI: 212546665 Blast Desc: 60S ribosomal protein Nsa2, [Penicillium marneffei ATCC 18224] gi|210065006|gb|EEA19101.1| 60S ribosomal protein Nsa2, [Penicillium marneffei ATCC 18224]
  misc_feature (16)..(259): NCBI GI: 119500606 Blast Desc: PfkB family kinase, [Neosartorya fischeri NRRL 181] gi|119415225|gb|EAW25163.1| PfkB family kinase, [Neosartorya fischeri NRRL 181]
  misc_feature (16)..(258): NCBI GI: 255931799 Blast Desc: Pc12g06130 [Penicillium chrysogenum Wisconsin 54-1255] gi|211582075|emb|CAP80240.1| Pc12g06130 [Penicillium chrysogenum Wisconsin 54-1255]
  misc_feature (16)..(260): NCBI GI: 169610007 Blast Desc: SNOG_08096 [Phaeosphaeria nodorum SN15] gi|111063252|gb|EAT84372.1| SNOG_08096 [Phaeosphaeria nodorum SN15]
  misc_feature (16)..(259): NCBI GI: 70994056 Blast Desc: pfkB family carbohydrate kinase superfamily [Aspergillus fumigatus Af293] gi|66849509|gb|EAL89837.1| pfkB family carbohydrate kinase superfamily [Aspergillus fumigatus
  misc_feature (16)..(252): NCBI GI: 259487278 Blast Desc: TPA: pfkB family carbohydrate kinase superfamily (AFU_orthologue; AFUA_4G09500) [Aspergillus nidulans FGSC A4]
  misc_feature (16)..(252): NCBI GI: 67522925 Blast Desc: AN1919.2 [Aspergillus nidulans FGSC A4] gi|40745928|gb|EAA65084.1| AN1919.2 [Aspergillus nidulans FGSC A4]
  misc_feature (16)..(258): NCBI GI: 189198169 Blast Desc: MAK32-like protein [Pyrenophora tritici-repentis Pt-1C-BFP] gi|187981370|gb|EDU47996.1| MAK32-like protein [Pyrenophora tritici-repentis Pt-1C-BFP]
  misc_feature (16)..(259): NCBI GI: 115490979 Blast Desc: conserved [Aspergillus terreus NIH2624] gi|114196977|gb|EAU38677.1| conserved [Aspergillus terreus NIH2624]
MGQCLSKKSRDTYPIFVSLGMVVLDELRFTHRDPLFDILGGSGLYATFGARLLKPANHSAKVGCIIIAGHDFPKPATRLLQSWKMTLLIAPCLDKPSTRGLLQYEDDSFGKERSFAYTTPPLRPTPTHLANSVLLGARSFHFLAHPTYLQNDIAALLHLRQEKDIVEQPLIVWEPAPVGCDPANLASHLKACKLVDVFSPNHLELGYLIEGKQQNEPVFSREVIEAQARMFLDSGVGRDGDGLVVIRSGEHGVYYLSKEQFGPAKLSASSCRSAERWNGSDVMYRVQEFESRISGS

SEQ ID NO: 38174 - DNA, 870 bp, Muscodor strobelii
  misc_feature: SGI cDNA ID NO. 573260
  misc_feature: Encodes the peptide sequence at SEQ ID NO 38175
atggcagacaccaatatgcatgagcgaacgatataccgtacgttgtttttctatgcaccaccagctgagggcgccgatcccgagtacatcgctgaaacgacgacgatatcgggaaagcgtaattaccctcaccataaggctctggtaccaatcacagacattcgtggtcaagaagggagcttcactctggatcagcattcctttactgctcttcctggagtattccaactggcagttgactttcatgatagagaagctatcatcgggacctatctgccatgggtaacgaacttgctcgtcaacttcctcccggacgcagtacacgccacagtatttgactatgtcctacggaaagcatcagcagtcaagacacctcatcgccaagtccacaagattcacatcgatcagtctcctattggatcttttggacgtgcccgtcgtcacctaccaaacgaatacagagcggcaatcgagaacggaaaggctgactttcgaatcatcaatgtctggaaacctctatttcggcccgtttctgaccatcctttagccttcgctgaatttcggacgctcgaagccagcgacctaatacctgtgcggcagatctatgaggatcacattggggagacgtatgcagtgcggtaccgcgagggccagacttttcgatactggagcagcatgacaccaagtgatctgttacttcttcaatgctttgatagccggaggcagccgtacaagcttgtagcttctgggggattgaaccactgccagtgtgcgcacggttgttttcgactccaggaggaagacgaaccatgcacacgggagagcatcgaggttcggtgcctggtggtaatgaacaaaaaccacctgtga

SEQ ID NO: 38175 - protein, 289 aa, Muscodor strobelii
  misc_feature: SGI Peptide ID NO. 573260
  misc_feature (15)..(282): NCBI GI: 240278959 Blast Desc: methyltransferase [Ajellomyces capsulatus H143]
  misc_feature (15)..(282): NCBI GI: 225560207 Blast Desc: conserved [Ajellomyces capsulatus G186AR]
  misc_feature (14)..(282): NCBI GI: 258563528 Blast Desc: conserved [Uncinocarpus reesii 1704] gi|237908016|gb|EEP82417.1| conserved [Uncinocarpus reesii 1704]
  misc_feature (15)..(282): NCBI GI: 261201085 Blast Desc: methyltransferase [Ajellomyces dermatitidis SLH14081] gi|239594015|gb|EEQ76596.1| methyltransferase [Ajellomyces dermatitidis SLH14081] gi|239607111|gb|EEQ84098.1| [Ajellomyces
  misc_feature (14)..(282): NCBI GI: 154321365 Blast Desc: BC1G_01557 [Botryotinia fuckeliana B05.10] gi|150852095|gb|EDN27287.1| BC1G_01557 [Botryotinia fuckeliana B05.10]
  misc_feature (14)..(282): NCBI GI: 156053798 Blast Desc: SS1G_05747 [Sclerotinia sclerotiorum 1980] gi|154703527|gb|EDO03266.1| SS1G_05747 [Sclerotinia sclerotiorum 1980]
  misc_feature (14)..(282): NCBI GI: 240108414 Blast Desc: 7alpha-cephem-methoxylase P8 chain related protein , [Coccidioides posadasii C735 delta SOWgp]
  misc_feature (14)..(282): NCBI GI: 119186851 Blast Desc: CIMG_03473 [Coccidioides immitis RS]
  misc_feature (14)..(282): NCBI GI: 261356715 Blast Desc: conserved [Verticillium albo-atrum VaMs.102]
  misc_feature (15)..(282): NCBI GI: 189190742 Blast Desc: conserved [Pyrenophora tritici-repentis Pt-1C-BFP] gi|187973316|gb|EDU40815.1| conserved [Pyrenophora tritici-repentis Pt-1C-BFP]
MADTNMHERTIYRTLFFYAPPAEGADPEYIAETTTISGKRNYPHHKALVPITDIRGQEGSFTLDQHSFTALPGVFQLAVDFHDREAIIGTYLPWVTNLLVNFLPDAVHATVFDYVLRKASAVKTPHRQVHKIHIDQSPIGSFGRARRHLPNEYRAAIENGKADFRIINVWKPLFRPVSDHPLAFAEFRTLEASDLIPVRQIYEDHIGETYAVRYREGQTFRYWSSMTPSDLLLLQCFDSRRQPYKLVASGGLNHCQCAHGCFRLQEEDEPCTRESIEVRCLVVMNKNHL

SEQ ID NO: 38176 - DNA, 426 bp, Muscodor strobelii
  misc_feature: SGI EST ID NO. CUFF.91537.0
  misc_feature: Variant of the nucleotide sequence at SEQ ID NO 38174
ctttactgctcttcctggagtattccaactggcagttgactttcatgatagagaagctatcatcgggacctatctgccatgggtaacgaacttgctcgtcaacttcctcccggacgcagtacacgccacagtatttgactatgtcctacggaaagcatcagcagtcaagacacctcatcgccaagtccacaagattcacatcgatcagtctcctattggatcttttggacgtgcccgtcgtcacctaccaaacgaatacagagcggcaatcgagaacggaaaggctgactttcgaatcatcaatgtctggaaacctctatttcggcccgtttctgaccatcctttagccttcgctgaatttcggacgctcgaagccagcgacctaatacctgtgcggcagatctatgaggatcacattggggagac

SEQ ID NO: 38177 - DNA, 948 bp, Muscodor strobelii
  misc_feature: SGI cDNA ID NO. 573261
  misc_feature: Encodes the peptide sequence at SEQ ID NO 38178
atgactggaaggaaaacccggcgacaagctgctttagaacaagcagaggagaaacttaagcaagtctctccagagcgagacatgaatgggaatgggaatggcgctgctcacaatgtcgtcgccaaagctatcgcagcagacattccccgcgagaacatcttcctattctggccaaacttgatcggctacttccgaatcgtgctggccatcgcatccctatactacatgccgctccacccgaggacgtgctcgctcctctacagtatctcctgcttactcgatgcccttgacggatatgcagcccgatacttcagccaatccactaggttcggcgctgtcctagatatggtcacggatcgatgcaccacgtcttgcctgcttgtcttcctttcgtctgcattcccccgatgggccatcgtcttccagggccttatctccttggacttcgccagccactacatacacatgtacgcaactctagccatgggtggctctggcgaaagccacaagaacgtcgacaagtctcgaagctggcttctcaacctctactacaccaataggactgttcttttcgtcgtgtgcgccttgaacgagcttttcttcatcgccctctaccttttatcattctcttcgcccctcctatcaccgcagcttctcgagtcgatctcgcccggaaaagcttccgccatccagaccggagcccaagtcaacagctccatcatccgccaactgttcacgaacccttacagtgccgcagctttggaaatggcccgtgtcaacaagatggattcaactgtcccctggatcctcaccggcatcagcgctcctgttatgatccttaagaatatccttaacattgtccagctcgtcaaggcgagtaaatggcttgctgagggtgatgttgaggcccgaagggtcgcgggtttgtcaaagaagaagagcacgtga

SEQ ID NO: 38178 - protein, 315 aa, Muscodor strobelii
  misc_feature: SGI Peptide ID NO. 573261
  misc_feature (84)..(230): Pfam Id: PF01066 Pfam Desc: CDP-alcohol phosphatidyltransferase
  misc_feature (1)..(315): NCBI GI: 116200075 Blast Desc: CHGG_08193 [Chaetomium globosum CBS 148.51] gi|88179472|gb|EAQ86940.1| CHGG_08193 [Chaetomium globosum CBS 148.51]
  misc_feature (1)..(315): NCBI GI: 39946288 Blast Desc: MGG_08368 [Magnaporthe grisea 70-15] gi|145019978|gb|EDK04206.1| MGG_08368 [Magnaporthe grisea 70-15]
  misc_feature (31)..(313): NCBI GI: 46121551 Blast Desc: FG05154.1 [Gibberella zeae PH-1]
  misc_feature (1)..(313): NCBI GI: 240108692 Blast Desc: CDP-diacylglycerol--inositol 3-phosphatidyltransferase, [Coccidioides posadasii C735 delta SOWgp]
  misc_feature (1)..(313): NCBI GI: 119186113 Blast Desc: CIMG_03104 [Coccidioides immitis RS]
  misc_feature (1)..(315): NCBI GI: 156054230 Blast Desc: SS1G_05963 [Sclerotinia sclerotiorum 1980] gi|154703743|gb|EDO03482.1| SS1G_05963 [Sclerotinia sclerotiorum 1980]
  misc_feature (1)..(313): NCBI GI: 171689960 Blast Desc: protein product [Podospora anserina] gi|170944942|emb|CAP71053.1| protein product [Podospora anserina]
  misc_feature (1)..(313): NCBI GI: 258578311 Blast Desc: CDP-diacylglycerol--inositol 3-phosphatidyltransferase [Uncinocarpus reesii 1704] gi|237903603|gb|EEP78004.1| CDP-diacylglycerol--inositol 3-phosphatidyltransferase reesii
  misc_feature (3)..(305): NCBI GI: 238484079 Blast Desc: CDP-diacylglycerol-inositol 3-phosphatidyltransferase PIS [Aspergillus flavus NRRL3357] gi|220701328|gb|EED57666.1| CDP-diacylglycerol-inositol 3-phosphatidyltransferase PIS flavus
  misc_feature (1)..(305): NCBI GI: 212531755 Blast Desc: CDP-diacylglycerol-inositol 3-phosphatidyltransferase PIS [Penicillium marneffei ATCC 18224] gi|210071398|gb|EEA25487.1| CDP-diacylglycerol-inositol PIS ATCC
MTGRKTRRQAALEQAEEKLKQVSPERDMNGNGNGAAHNVVAKAIAADIPRENIFLFWPNLIGYFRIVLAIASLYYMPLHPRTCSLLYSISCLLDALDGYAARYFSQSTRFGAVLDMVTDRCTTSCLLVFLSSAFPRWAIVFQGLISLDFASHYIHMYATLAMGGSGESHKNVDKSRSWLLNLYYTNRTVLFVVCALNELFFIALYLLSFSSPLLSPQLLESISPGKASAIQTGAQVNSSIIRQLFTNPYSAAALEMARVNKMDSTVPWILTGISAPVMILKNILNIVQLVKASKWLAEGDVEARRVAGLSKKKST

SEQ ID NO: 38179 - DNA, 1958 bp, Muscodor strobelii
  misc_feature: SGI EST ID NO. CUFF.91546.0
  misc_feature: Variant of the nucleotide sequence at SEQ ID NO 38177
agcgcgtgtctcccgccctgagctgtcgcaatcgcccctaatctgataacgacaatttggaggttgtcgaggttgttcaccttgtgtcaactccacgtcgacagctctctcatcgccatctccttacctcgatcgttctctactaaccatactctttgcgcccaatattcttctcttctacctgtattatcagtccaccgaaaattcgagcatctgccctcacgagtgtccacgacaacggatatcaggaaatagagtgctgaccttcgtcgacaaatctcgaaatccttcagcccgtacttcgtgccgcgatttctctacctatattgttcttacttctcacgcgacatccctcccaagcttcgttgagactcggccgcgttgtccactcaccacaaactctgctccaatctcacgtgtgacgactgcgttggacccctaaacttccgattgatccgacgcccaacctaaacacacgcatcccaccatcacatacatcagcaaccatgactggaaggaaaacccggcgacaagctgctttagaacaagcagaggagaaacttaagcaagtctctccagagcgagacatgaatgggaatgggaatggcgctgctcacaatgtcgtcgccaaagctatcgcagcagacattccccgcgagaacatcttcctattctggccaaacttgatcggctacttccgaatcgtgctggccatcgcatccctatactacatgccgctccacccgaggacgtgctcgctcctctacagtatctcctgcttactcgatgcccttgacggatatgcagcccgatacttcagccaatccactaggttcggcgctgtcctagatatggtcacggatcgatgcaccacgtcttgcctgcttgtcttcctttcgtctgcattcccccgatgggccatcgtcttccagggccttatctccttggacttcgccagccactacatacacatgtacgcaactctagccatgggtggctctggcgaaagccacaagaacgtcgacaagtctcgaagctggcttctcaacctctactacaccaataggactgttcttttcgtcgtgtgcgccttgaacgagcttttcttcatcgccctctaccttttatcattctcttcgcccctcctatcaccgcagcttctcgagtcgatctcgcccggaaaagcttccgccatccagaccggagcccaagtcaacagctccatcatccgccaactgttcacgaacccttacagtgccgcagctttggaaatggcccgtgtcaacaagatggattcaactgtcccctggatcctcaccggcatcagcgctcctgttatgatccttaagaatatccttaacattgtccagctcgtcaaggcgagtaaatggcttgctgagggtgatgttgaggcccgaagggtcgcgggtttgtcaaagaagaagagcacgtgacgaaagtcagccaaggaggtgtgaactaaactagatagatggcatggtgtattcgaagggaaaaagaaaaagctgccacatacccgtggacgcggggcggtgatgagcggggcttggtttggattactgtttctctcatttgtatggcattggtaggcgcggaagcattcatctttgtaagaggtacataggacacaagacatctggatggtgatgtcaggtcattcgacgccggggattgggttcgaaattggttcaaattcttccttcgctgtatacatttaattataatcatttacatagagcgggcacagaaccaagacatactgatgtagatattgtctcaatccgataattcaaaggcgcgtctcaatgggcagttgttgtatgttagaagatagcgtaccacatcttgcgcatcatagaccactgttgagggagcacgttgatagatttgaaagaactgtattataataaaatgggcatactgcgcttcgcatgaac

SEQ ID NO: 38180 - DNA, 1767 bp, Muscodor strobelii
  misc_feature: SGI cDNA ID NO. 573262
  misc_feature: Elevated expression when VOC is produced
  misc_feature: Encodes the peptide sequence at SEQ ID NO 38181
atggccgaccccctatctgtgctgggaggtctttccgccggaggtcaaatactcgggactatcttcaaaacaacaatcgctatatcagagttctgtgataatttccgaagcgcgcccttacagctcagtcgtattaacgaccgactcctcactatacgggacatacttgtggaagttgaatctcaatcagtattattagacagtgatgaattgctgccccagcctatacgcatgcgcttgagtgtcgttgtcaagactctagacacagacgtcagtattctacaaaaatatttgcctcctcagtcaggcaagaaatgctctgttagagagcgactccaatgggcgacttttaggaaacggctgtcgaaggaaaagctcgaggacttagataagtgtgagacatctttaacaaacattatacagattttgacatttcgacataccatgatgatattagcacataatcggcagagcaaacaaattcatgtcgcaacgggtacaaaatcgaaagcactgactaagaaactcccaataacccggatcaattcggttgccctaaatagtgacagtattgcgagacgtcttggagtctcaggcagattcacctgtactgaagataaggaaaatcattggaaggcacgtcttgtggttggctttcaaccacccacttgggcttggatgtgctccattatggtgcagctggatcttgctagccccttgaacggcatgcgaggttttgatattacgtctggccatgtgtatttacatcagagaatctcagacgattcgccgttcatgagagcatgccggctcggagacattggtatgatgcaacagattgtggacgaacatccttggatgctacgggccagaactgcaacaactggagaaacgcccttgttgcttgcgatacgagagaagcatctcccagccattgagtggttgttagatcacggcgcagatcccaacgacggggatgatgaccacgttcttcctatcttcgctatgtttagattcgagccccgcggcaattccactgttcaacaacttccacccacctggaatgactggatgacatgtttgcgaatgcttgtatcaaataatgcatctgtccatgagacagtctggggaaagactctcggaatgatgaacatattcggcggtgcaccatcacatccttcaacagtcgatcatgtattagactacattcgcgttctcaagtccgagcactatacagacttcgatacctgcgacgctgctggatggtcagcccttctcagcgctatccggagctattcgcatggtctcgaagcagtgaagatgctcgcaagtctaggcatcaatctatctagaatcttagatgacggcaggacttatcttcatatcgcagccgagatggctcacgacgtccgaattctggagtatctttacatgaacggatgcgattcgcatctgaatagacaggagtattggggatggacacctttacactgctgtgtcttcggagctacgcaaggacatacttttcaagctaaaattgacaaactcaaattccttttggataaaggagcgaatctggacatcaaaagtcgcggggcgcgctggattattatcccagatcacgagcacttcacgcctcttgaactggccgagcatcttgataaatatcaaaaatatggtttgatggcccctttgcttcggagctatattcgcgacgacgacgatgaagatattttctatgatgccgccattgctcagagcgagtga

SEQ ID NO: 38181 - protein, 588 aa, Muscodor strobelii
  misc_feature: SGI Peptide ID NO. 573262
  misc_feature (295)..(327): Pfam Id: PF00023 Pfam Desc: Ankyrin repeat
  misc_feature (491)..(531): Pfam Id: PF00023 Pfam Desc: Ankyrin repeat
  misc_feature (263)..(554): NCBI GI: 115738318 Blast Desc: : similar to ankyrin 2,3/unc44 [Strongylocentrotus purpuratus] gi|115939511|ref|XP_001189858.1| : similar to ankyrin 2,3/unc44 [Strongylocentrotus purpuratus]
  misc_feature (263)..(557): NCBI GI: 115625763 Blast Desc: : similar to ankyrin 2,3/unc44 [Strongylocentrotus purpuratus] gi|115974774|ref|XP_001179294.1| : similar to ankyrin 2,3/unc44 [Strongylocentrotus purpuratus]
  misc_feature (295)..(534): NCBI GI: 115665370 Blast Desc: : similar to ankyrin 2,3/unc44, partial [Strongylocentrotus purpuratus] gi|115939157|ref|XP_001196401.1| : similar to ankyrin 2,3/unc44, partial [Strongylocentrotus
  misc_feature (259)..(541): NCBI GI: 115950018 Blast Desc: : similar to ankyrin 2,3/unc44, partial [Strongylocentrotus purpuratus]
  misc_feature (259)..(541): NCBI GI: 115613212 Blast Desc: : similar to ankyrin 2,3/unc44, partial [Strongylocentrotus purpuratus]
  misc_feature (263)..(527): NCBI GI: 115665370 Blast Desc: : similar to ankyrin 2,3/unc44, partial [Strongylocentrotus purpuratus] gi|115939157|ref|XP_001196401.1| : similar to ankyrin 2,3/unc44, partial [Strongylocentrotus
  misc_feature (248)..(541): NCBI GI: 115720329 Blast Desc: : similar to ankyrin 2,3/unc44 [Strongylocentrotus purpuratus]
  misc_feature (291)..(584): NCBI GI: 115951932 Blast Desc: : similar to ankyrin 2,3/unc44 [Strongylocentrotus purpuratus]
  misc_feature (291)..(584): NCBI GI: 115746585 Blast Desc: : similar to ankyrin 2,3/unc44 [Strongylocentrotus purpuratus]
  misc_feature (248)..(541): NCBI GI: 115956730 Blast Desc: : similar to ankyrin 2,3/unc44 [Strongylocentrotus purpuratus]
  misc_feature: Useful for introducing or modulating the production of volatile compounds
MADPLSVLGGLSAGGQILGTIFKTTIAISEFCDNFRSAPLQLSRINDRLLTIRDILVEVESQSVLLDSDELLPQPIRMRLSVVVKTLDTDVSILQKYLPPQSGKKCSVRERLQWATFRKRLSKEKLEDLDKCETSLTNIIQILTFRHTMMILAHNRQSKQIHVATGTKSKALTKKLPITRINSVALNSDSIARRLGVSGRFTCTEDKENHWKARLVVGFQPPTWAWMCSIMVQLDLASPLNGMRGFDITSGHVYLHQRISDDSPFMRACRLGDIGMMQQIVDEHPWMLRARTATTGETPLLLAIREKHLPAIEWLLDHGADPNDGDDDHVLPIFAMFRFEPRGNSTVQQLPPTWNDWMTCLRMLVSNNASVHETVWGKTLGMMNIFGGAPSHPSTVDHVLDYIRVLKSEHYTDFDTCDAAGWSALLSAIRSYSHGLEAVKMLASLGINLSRILDDGRTYLHIAAEMAHDVRILEYLYMNGCDSHLNRQEYWGWTPLHCCVFGATQGHTFQAKIDKLKFLLDKGANLDIKSRGARWIIIPDHEHFTPLELAEHLDKYQKYGLMAPLLRSYIRDDDDEDIFYDAAIAQSE

SEQ ID NO: 38182 - DNA, 3202 bp, Muscodor strobelii
  misc_feature: SGI EST ID NO. CUFF.91576.1
  misc_feature: Variant of the nucleotide sequence at SEQ ID NO 38180
tcaacatcaggttcggtgccctcaggcttagtacaaagggtcaacttcgaacagaccgggtaactcttcgttccgccaaatggccgaccccctatctgtgctgggaggtctttccgccggaggtcaaatactcgggactatcttcaaaacaacaatcgctatatcagagttctgtgataatttccgaagcgcgcccttacagctcagtcgtattaacgaccgactcctcactatacgggacatacttgtggaagttgaatctcaatcagtattattagacagtgatgaattgctgccccagcctatacgcatgcgcttgagtgtcgttgtcaagactctagacacagacgtcagtattctacaaaaatatttgcctcctcagtcaggcaagaaatgctctgttagagagcgactccaatgggcgacttttaggaaacggctgtcgaaggaaaagctcgaggacttagataagtgtgagacatctttaacaaacattatacagattttgacatttcgacataccatgatgatattagcacataatcggcagagcaaacaaattcatgtcgcaacgggtacaaaatcgaaagcactgactaagaaactcccaataacccggatcaattcggttgccctaaatagtgacagtattgcgagacgtcttggagtctcaggcagattcacctgtactgaagataaggaaaatcattggaaggcacgtcttgtggttggctttcaaccacccacttgggcttggatgtgctccattatggtgcagctggatcttgctagccccttgaacggcatgcgaggttttgatattacgtctggccatgtgtatttacatcagagaatctcagacgattcgccgttcatgagagcatgccggctcggagacattggtatgatgcaacagattgtggacgaacatccttggatgctacgggccagaactgcaacaactggagaaacgcccttgttgcttgcgatacgagagaagcatctcccagccattgagtggttgttagatcacggcgcagatcccaacgacggggatgatgaccacgttcttcctatcttcgctatgtttagattcgagccccgcggcaattccactgttcaacaacttccacccacctggaatgactggatgacatgtttgcgaatgcttgtatcaaataatgcatctgtccatgagacagtctggggaaagactctcggaatgatgaacatattcggcggtgcaccatcacatccttcaacagtcgatcatgtattagactacattcgcgttctcaagtccgagcactatacagacttcgatacctgcgacgctgctggatggtcagcccttctcagcgctatccggagctattcgcatggtctcgaagcagtgaagatgctcgcaagtctaggcatcaatctatctagaatcttagatgacggcaggacttatcttcatatcgcagccgagatggctcacgacgtccgaattctggagtatctttacatgaacggatgcgattcgcatctgaatagacaggagtattggggatggacacctttacactgctgtgtcttcggagctacgcaaggacatacttttcaagctaaaattgacaaactcaaattccttttggataaaggagcgaatctggacatcaaaagtcgcggggcgcgctggattattatcccagatcacgagcacttcacgcctcttgaactggccgagcatcttgataaatatcaaaaatatggtttgatggcccctttgcttcggagctatattcgcgacgacgacgatgaagatattttctatgatgccgccattgctcagagcgagtgagagggtgagcaggctgatcgactgctgttgaacatggcaatacaaccgataggaaattgggggatgaaaggaaaacgagccgaaccgatttcaacacacaaggcggtcacctcaatgatcgtcaaaggccttagaaaagcacccatttcatggagataacagtatacgcagtcgattgctttaccctgggaagctatttgcttgtaccggagaatcggatattataatggcgactcacgatgcgacaagctgctcagggcgcaggccgcatatcatacagcacgcaataggacactgacgaatacttgcaggataatggaagtgacaacatcagaattgagctaatacgccgtgttgaggatcttgacacacaacaccgagaagaagcttacgctacataccaccgaagcaaaatcgaagaagagcatatcacactacctgtagtccctgatctgatatctgacagccgacacctctagtactcggaatatgacagatgaggtgcatcaatactatcgcctatcccaatagctgggtgctaagtgtcccgacatgcataaatgcaagcccgcagccgcatattccccgaaaccaatacgtggaagcgactctccttctacaagcatctcagccacatgaaacggtactggaagcttcgtcggcctcattcttctatcttgaaaaggttctggaaatcaatagctaaagctgtttatcgcgggtctcatttgcctctgtaacttcagcgtagagtgaagaatgaacaatgcactgttttgcctctctgtcacgccggacataagatagtggaacatggcagtgcagtgacagcgcatcgctgtccaataccatctgatatcgaccctgaggacagatcttggacaagctttccattccaacggctcggagagcgctaactacttctcacgggccgggacgatgtgtgctgtgtgattgggggcttctctcttcaccatggtataccgccattccagtgatatgcatgtggtactatttatgagttgaagaatactatacgatggcggggagctctcggatttggtgtatcgccatgcttgctcattggccgagccgaccctacctggcaattttcaagccattattgcttttactgttggatcaggcagggtaggcctggctcgcatagaggggttgcatagctggagaatggggtcgaaggtggcggaattattgaacactagacgtcggtcagatgtcacacaatggctatatgctttgcgctgaattgcacgttaggatggaactcttgaccgtactgttagatcgtaggaagctactagtagtaagtgcaatcaaattcgaaaaggggttgtg

SEQ ID NO: 38183 - DNA, 1401 bp, Muscodor strobelii
  misc_feature: SGI cDNA ID NO. 573263
  misc_feature: Encodes the peptide sequence at SEQ ID NO 38184
atggactttgtcccgcgctacaagagctatgagcgggagcgagatactacccaggacttgatcaaggacctgatgatctatgccgaacgtctcgagacagccctccaaaccgagaccaaccattatacgcagaagatccgagatctcactctcgatgtcgaggatgccctgaagagccgccgacaggtgcagcaccagctgcaacaggtccaacaacgtgcaggatatgtctcacctggcaagatcggatcaaagaatcaaaatgcttatgtattggttgtcatcgacggtgatcaccttattttccgggatcattttatcagagaaggacttgagggtggaagacaagccgccaacgagcttcgcaaagccgtcgtcgatcagtgcagctattcgagtgaagtcgacattgtggtcaagatcgtcgccaatctctcaaacctcaataaggtcttaaggtgtagcggatcagtatataatgacatcgacctcccggagtttgtgactggcttcaatcagggtaaggccaccttcgactttgtagacatcggctttggaaaagagcgagccgagtcaaaaataaaggagaccgttaaatttcatctccaaaattcaagttgtaaacaggttctcatgggcgtttctcatgaccctaactatgctacatttctcgacgaaaattcaaatgacaataatgacttcaatcgtattagtatcttggaaggatcctcgacggcgcgcgagatagccgctactggggtcaaccttctgaaattcaaccaagtctttcgatctgagaagttaatccctcagcgcacgatgtcgactcactcggtccagtcgggttcgtcgcggtccacgggtgtttctaccactggcacgccgagtttctcgtatgctactatcacacagaaacctgccagccctccgcctcagatgacttttccgaacgctacgatgaaggccaagatggcattagccgagaagcagaaaaatatcattctccaggctccaagaaagccaactccgccgcctgcgtggaatcctggcaaaagaggtttagatgtcccgattccgttaaccccattggctctggaaacgatcaagaaacgcaaagataataacaaactctgcaacaatcatttcctccgcggtccttgttccaaaggcgacgaatgttgcttcgtacatgactaccgccccaataaagacgagaagaatgccattgcctttttggcacgcctcaatccgtgcaccaacgggcaagattgcgatgttgataactgcatctatggccatcattgccccagcgtagtcaatggcatttgcacgcatcctttctgtaaattccgtcctgaggagcatccgccgggaacaaaactcagagctgtcaaggcttaa

SEQ ID NO: 38184 - protein, 466 aa, Muscodor strobelii
  misc_feature: SGI Peptide ID NO. 573263
  misc_feature (373)..(399): Pfam Id: PF00642 Pfam Desc: Zinc finger C-x8-C-x5-C-x3-H type (and similar)
  misc_feature (1)..(465): NCBI GI: 85075492 Blast Desc: NCU03486 [Neurospora crassa OR74A] gi|18376076|emb|CAD21104.1| conserved [Neurospora crassa] gi|28916786|gb|EAA26542.1| [Neurospora crassa OR74A]
  misc_feature (2)..(461): NCBI GI: 256732968 Blast Desc: NECHADRAFT_92541 [Nectria haematococca mpVI 77-13-4]
  misc_feature (3)..(462): NCBI GI: 156064751 Blast Desc: SS1G_00383 [Sclerotinia sclerotiorum 1980] gi|154691245|gb|EDN90983.1| SS1G_00383 [Sclerotinia sclerotiorum 1980]
  misc_feature (1)..(437): NCBI GI: 261356823 Blast Desc: conserved [Verticillium albo-atrum VaMs.102]
  misc_feature (2)..(465): NCBI GI: 116200071 Blast Desc: CHGG_08191 [Chaetomium globosum CBS 148.51] gi|88179470|gb|EAQ86938.1| CHGG_08191 [Chaetomium globosum CBS 148.51]
  misc_feature (2)..(461): NCBI GI: 46121559 Blast Desc: FG05158.1 [Gibberella zeae PH-1]
  misc_feature (3)..(313): NCBI GI: 171689882 Blast Desc: protein product [Podospora anserina] gi|170944903|emb|CAP71014.1| protein product [Podospora anserina]
  misc_feature (336)..(463): NCBI GI: 171689882 Blast Desc: protein product [Podospora anserina] gi|170944903|emb|CAP71014.1| protein product [Podospora anserina]
  misc_feature (326)..(464): NCBI GI: 145607079 Blast Desc: MGG_03964 [Magnaporthe grisea 70-15] gi|145014677|gb|EDJ99245.1| MGG_03964 [Magnaporthe grisea 70-15]
  misc_feature (2)..(464): NCBI GI: 119185244 Blast Desc: CIMG_07328 [Coccidioides immitis RS]
MDFVPRYKSYERERDTTQDLIKDLMIYAERLETALQTETNHYTQKIRDLTLDVEDALKSRRQVQHQLQQVQQRAGYVSPGKIGSKNQNAYVLVVIDGDHLIFRDHFIREGLEGGRQAANELRKAVVDQCSYSSEVDIVVKIVANLSNLNKVLRCSGSVYNDIDLPEFVTGFNQGKATFDFVDIGFGKERAESKIKETVKFHLQNSSCKQVLMGVSHDPNYATFLDENSNDNNDFNRISILEGSSTAREIAATGVNLLKFNQVFRSEKLIPQRTMSTHSVQSGSSRSTGVSTTGTPSFSYATITQKPASPPPQMTFPNATMKAKMALAEKQKNIILQAPRKPTPPPAWNPGKRGLDVPIPLTPLALETIKKRKDNNKLCNNHFLRGPCSKGDECCFVHDYRPNKDEKNAIAFLARLNPCTNGQDCDVDNCIYGHHCPSVVNGICTHPFCKFRPEEHPPGTKLRAVKA

SEQ ID NO: 38185 - DNA, 2909 bp, Muscodor strobelii
  misc_feature: SGI EST ID NO. CUFF.91612.0
  misc_feature: Variant of the nucleotide sequence at SEQ ID NO 38183
cgtgaattaggtccgttttattttccagcttcgatctcctgcaccttccgccacaactcctaggacaatacgcctttttgtatctcgagtcgccggtgcgccttcgttatttggcttctttctgccggcgtaagagagcggagggaccgaccctcttcaaacgtctttcaaattttataattcttccaaggaaaccgccatcgcgactaagcgcagacctataatcatcacttgctccgacgagagctgaattcgatcccattcgagttgcgccgtaacgattttcgcaaccataaactggcaattgcgatccaaacgcacgctatctttctcagtcgtcctcgggctgtcgcctcgacctgctcttgcccatatttcgcattgtgcttggcatacgcattccagtacttggtacttcgttgcgccagcattgctctcgctctcacactcactccctgactttaccatccatattccactgttcaccacacttccatcccttcttttaccgccaattctgtcgccaaatcacacgaatttgcacagcctgtgcaaagcagaagccatggaggccacaagcatcatggactttgtcccgcgctacaagagctatgagcgggagcgagatactacccaggacttgatcaaggacctgatgatctatgccgaacgtctcgagacagccctccaaaccgagaccaaccattatacgcagaagatccgagatctcactctcgatgtcgaggatgccctgaagagccgccgacaggtgcagcaccagctgcaacaggtccaacaacgtgcaggatatgtctcacctggcaagatcggatcaaagaatcaaaatgcttatgtattggttgtcatcgacggtgatcaccttattttccgggatcattttatcagagaaggacttgagggtggaagacaagccgccaacgagcttcgcaaagccgtcgtcgatcagtgcagctattcgagtgaagtcgacattgtggtcaagatcgtcgccaatctctcaaacctcaataaggtcttaaggtgtagcggatcagtatataatgacatcgacctcccggagtttgtgactggcttcaatcagggtaaggccaccttcgactttgtagacatcggctttggaaaagagcgagccgagtcaaaaataaaggagaccgttaaatttcatctccaaaattcaagttgtaaacaggttctcatgggcgtttctcatgaccctaactatgctacatttctcgacgaaaattcaaatgacaataatgacttcaatcgtattagtatcttggaaggatcctcgacggcgcgcgagatagccgctactggggtcaaccttctgaaattcaaccaagtctttcgatctgagaagttaatccctcagcgcacgatgtcgactcactcggtccagtcgggttcgtcgcggtccacgggtgtttctaccactggcacgccgagtttctcgtatgctactatcacacagaaacctgccagccctccgcctcagatgacttttccgaacgctacgatgaaggccaagatggcattagccgagaagcagaaaaatatcattctccaggctccaagaaagccaactccgccgcctgcgtggaatcctggcaaaagaggtttagatgtcccgattccgttaaccccattggctctggaaacgatcaagaaacgcaaagataataacaaactctgcaacaatcatttcctccgcggtccttgttccaaaggcgacgaatgttgcttcgtacatgactaccgccccaataaagacgagaagaatgccattgcctttttggcacgcctcaatccgtgcaccaacgggcaagattgcgatgttgataactgcatctatggccatcattgccccagcgtagtcaatggcatttgcacgcatcctttctgtaaattccgtcctgaggagcatccgccgggaacaaaactcagagctgtcaaggcttaattgatggggattcccgtctcgacaaaacaacgagaaacaagaaatgtattattaggcgaactctgatcggtaaaatcgggttcaaaggattggcatcatgattggtccttgatgggcagaatttgtccgtccacatgggaggaacagcactgaagagaacgacaagacaccaagtgcgtttcgttgattgcttctcatgtgccggctgactagatatcgcgatgcttaaaagaagagtaaaagatcaaacggttccaaatgtcaaggttccagatcgatgttcaaatcggacgtttctgttctaaacagaatcaaagtcgcattgctagcatcccatggcagacgaagtgaactgcctcacgaagagcttacgtagcgcatcaatgataaaaaagtattgataaacttccgtattgcgatgctgcgtgctgcgtgctgcgttgatgtcgagtgttggttgagtggtgtctcgggtacccgaaggctagcaatgtgaaggcaaccaagaggaggcgcggggaatgaaaatcgcccaacgctactgacattgatttcgattgttgaagcgctatgtatatgcatatcagtttgtaggcgatcttcttttccccctttccccctttcctaggttcttggcccgtcatttcgctacagaagaagcctgaatagtcattctccccttcatcgactcatactcgcttcaacatccagcgcgagccttctagcttagatgtgtaaaaccttcatcatgttagaaataagagacttttcttaatcgaggaactgtgacaacaacgtgggttgcaatatcatacacagaagaaatcgcagcttgggctaggatagtcgctctacaatttagcaatagtgactttaaacatttgtgcttcaggggaactttgccacagatgctacactctgccag

SEQ ID NO: 38186 - DNA, 1956 bp, Muscodor strobelii
  misc_feature: SGI cDNA ID NO. 573264
  misc_feature: Encodes the peptide sequence at SEQ ID NO 38187
atgaaagtatgcaaagactgccttgacggtctgcagacaaaagctgagatcggcaaagatgggatatggagttgtacatggacacgcactccgaacttctcaaagcttgccgctgctgcgcgaacttgcttcttctgtcacactctcctcgatggctggcttgaacatgccgaagaagactggtctgtcgagatgacacatgtgcttcgacaatgtcagaaaggtgtcggcgtagcagagcttgctatcacgttgtttatgcgagggcaacagacaagcaaacactttctagtctccgatactcatgatgaggatgtgtcgctaagtcctgtgaatggtgctagcactggtagtgtcgaggcactggatttcctcaaaaagcagtttgacacctgcgagacaacacacgattctggttcttgggttgatgtgcacgatgtctggtaccccacccgacttattgaattgaatgagaaagatggagcgcgtctcatactcacgaaagacacgactcccactcagtggggctggtatgcgagcctcagccactcgtggggtaaagaagaaatgtttcaatgtactaccgataccattgaagatctcatgatgcgcatacctttggacaagcttcgaagaacatttagagaagcctttgatacagtactacatcttgggatccgatacatatggattgactcattatgcattattcaagactcaatagaagattggacgagagaggcacagtgcatgatggaggtgtatcgccgagcacgcattaatctcgctgccactacatctaccggagctacaacggggctcttcagcaataggaacccggatgatctcgtttctgagtcattcgaaatgaaaaatgaggtagttgatggcgttttccgcgctgtcaaggcgacactatacacagatggctggttggaactagtcgacaggagtccactgaatcgtagggcttgggtccagcaggagagattattatcaccacgcgttgcccattttacatctaccgagataatatgggactgtgttcatagtatcgcctcagagtccatattcaaggataagctactcccacttcattttgcagggcaaaatcgccttctgggccacaagcgagactcgtcactttcagtgatccaaccccctgctggaaagcggaaatacatcggccaatgggctcagattgtccaagcctattcaaggtgcggcctcacaaaggagcatgataagctcattgccattggtggggttgcccagtgccttgggatctacaagaatgatgaatactactgtgggctctggcggagcttcatggagattcaactatgttggtatagcgaaaactacgaaggccaccgtggaactactctagagggtattgcaccatcctggtcatgggcatcgttcaacgggcctgtgaataccacacaaccggattctatcgttggtgatgtgatcacttacttcattcacatcgacagaattaccgctaaacgaaaaaatcgcaaagacaggcttgagcagtggtccgggtccatacgcctgaggtgcttcctcaactctgtcacactggaaggggatttctctaagccacgcctcatcggcgacggtatggaggagcactgcaaagacgtcaacctcgatactcctgatgtgttcaacaccaaaagcgatctctacgtcatgccgatcttcgatatccaagaccctgcattcatcaagtataacgtttgcaattctacagtcagaggtctccttctcgaagttgtagatgcgtacaatggcacctacgccagacgcgggcacatctgcctaagttcgtcgtctaaagataagtatccagaaacatggacgagaatcgtttcagcggttgggaaggatcagttcccttgtattgattttgatagcaaaaccggtaatttcatagagcttatttaa

SEQ ID NO: 38187 - protein, 651 aa, Muscodor strobelii
  misc_feature: SGI Peptide ID NO. 573264
  misc_feature (178)..(329): Pfam Id: PF06985 Pfam Desc: Heterokaryon incompatibility protein (HET)
  misc_feature (129)..(483): NCBI GI: 256731921 Blast Desc: NECHADRAFT_3490 [Nectria haematococca mpVI 77-13-4]
  misc_feature (150)..(617): NCBI GI: 154316024 Blast Desc: BC1G_04584 [Botryotinia fuckeliana B05.10] gi|150846980|gb|EDN22173.1| BC1G_04584 [Botryotinia fuckeliana B05.10]
  misc_feature (115)..(651): NCBI GI: 256728738 Blast Desc: NECHADRAFT_85988 [Nectria haematococca mpVI 77-13-4]
  misc_feature (28)..(614): NCBI GI: 154291024 Blast Desc: BC1G_15400 [Botryotinia fuckeliana B05.10] gi|150847129|gb|EDN22322.1| BC1G_15400 [Botryotinia fuckeliana B05.10]
  misc_feature (124)..(481): NCBI GI: 154302191 Blast Desc: BC1G_09776 [Botryotinia fuckeliana B05.10] gi|150855550|gb|EDN30742.1| BC1G_09776 [Botryotinia fuckeliana B05.10]
  misc_feature (111)..(480): NCBI GI: 39955223 Blast Desc: MGG_08988 [Magnaporthe grisea 70-15] gi|145021053|gb|EDK05182.1| MGG_08988 [Magnaporthe grisea 70-15]
  misc_feature (132)..(476): NCBI GI: 256732304 Blast Desc: NECHADRAFT_80764 [Nectria haematococca mpVI 77-13-4]
  misc_feature (1)..(619): NCBI GI: 145242594 Blast Desc: An09g05610 [Aspergillus niger] gi|134078422|emb|CAL00837.1| protein product [Aspergillus niger]
  misc_feature (114)..(480): NCBI GI: 256721585 Blast Desc: NECHADRAFT_78531 [Nectria haematococca mpVI 77-13-4]
  misc_feature (117)..(477): NCBI GI: 256728185 Blast Desc: NECHADRAFT_24038 [Nectria haematococca mpVI 77-13-4]
MKVCKDCLDGLQTKAEIGKDGIWSCTWTRTPNFSKLAAAARTCFFCHTLLDGWLEHAEEDWSVEMTHVLRQCQKGVGVAELAITLFMRGQQTSKHFLVSDTHDEDVSLSPVNGASTGSVEALDFLKKQFDTCETTHDSGSWVDVHDVWYPTRLIELNEKDGARLILTKDTTPTQWGWYASLSHSWGKEEMFQCTTDTIEDLMMRIPLDKLRRTFREAFDTVLHLGIRYIWIDSLCIIQDSIEDWTREAQCMMEVYRRARINLAATTSTGATTGLFSNRNPDDLVSESFEMKNEVVDGVFRAVKATLYTDGWLELVDRSPLNRRAWVQQERLLSPRVAHFTSTEIIWDCVHSIASESIFKDKLLPLHFAGQNRLLGHKRDSSLSVIQPPAGKRKYIGQWAQIVQAYSRCGLTKEHDKLIAIGGVAQCLGIYKNDEYYCGLWRSFMEIQLCWYSENYEGHRGTTLEGIAPSWSWASFNGPVNTTQPDSIVGDVITYFIHIDRITAKRKNRKDRLEQWSGSIRLRCFLNSVTLEGDFSKPRLIGDGMEEHCKDVNLDTPDVFNTKSDLYVMPIFDIQDPAFIKYNVCNSTVRGLLLEVVDAYNGTYARRGHICLSSSSKDKYPETWTRIVSAVGKDQFPCIDFDSKTGNFIELI

SEQ ID NO: 38188 - DNA, 239 bp, Muscodor strobelii
  misc_feature: SGI EST ID NO. CUFF.91567.0
  misc_feature: Variant of the nucleotide sequence at SEQ ID NO 38186
ttcgacaatgtcagaaaggtgtcggcgtagcagagcttgctatcacgttgtttatgcgagggcaacagacaagcaaacactttctagtctccgatactcatgatgaggatgtgtcgctaagtcctgtgaatggtgctagcactggtagtgtcgaggcactggatttcctcaaaaagcagtttgacacctgcgagacaacacacgattctggttcttgggttgatgtgcacgatgtctgg

SEQ ID NO: 38189 - DNA, 558 bp, Muscodor strobelii
  misc_feature: SGI cDNA ID NO. 573265
  misc_feature: Encodes the peptide sequence at SEQ ID NO 38190
atgaacgcacgctgtcagtgcggggctgtccagttccagacaccacagccaaaaccgcttgcattatatatctgccattgtactgaatgtcgaagacagacaggatcggcatttggtacatctgcgatattcgccaagttcgaactgcctgatacggcccaattatcttgctatagacggcttacggcttctggtcacactcttgaatgctacttctgcacgcaatgcggcacgcgcctcgttcactcaactaaaggaaaggacttcgtctccgtcaaaggcggctgtctcgaaggtctagactgggggaaggcaattcacatatggacgaagtcggccatggtgccgatccccgagggaactgagacataccccgaagagccatcggataccgaaacctctagctcacaggagactttggaccaacctcccacccggaattatcggcatagaccgcttcataacagcggtggcccattcgcggatgcgatttcgacaccggagactgaggagctgggccgtgtcagaggtgcgtgtgaacttagcggtgtaatctag

SEQ ID NO: 38190 - protein, 185 aa, Muscodor strobelii
  misc_feature: SGI Peptide ID NO. 573265
  misc_feature (23)..(120): Pfam Id: PF04828 Pfam Desc: Glutathione-dependent formaldehyde-activating enzyme
  misc_feature (23)..(102): Pfam Id: PF04828 Pfam Desc: Glutathione-dependent formaldehyde-activating enzyme
  misc_feature (1)..(143): NCBI GI: 46109222 Blast Desc: FG01493.1 [Gibberella zeae PH-1]
  misc_feature (1)..(129): NCBI GI: 225562174 Blast Desc: conserved [Ajellomyces capsulatus G186AR]
  misc_feature (1)..(129): NCBI GI: 239608974 Blast Desc: conserved [Ajellomyces dermatitidis ER-3]
  misc_feature (1)..(129): NCBI GI: 261189450 Blast Desc: conserved [Ajellomyces dermatitidis SLH14081] gi|239591713|gb|EEQ74294.1| conserved [Ajellomyces dermatitidis SLH14081]
  misc_feature (1)..(128): NCBI GI: 238839248 Blast Desc: glutathione-dependent formaldehyde-activating [Microsporum canis CBS 113480]
  misc_feature (1)..(130): NCBI GI: 226281348 Blast Desc: conserved [Paracoccidioides brasiliensis Pb01]
  misc_feature (1)..(129): NCBI GI: 240109235 Blast Desc: CPC735_027400 [Coccidioides posadasii C735 delta SOWgp]
  misc_feature (1)..(128): NCBI GI: 261358936 Blast Desc: conserved [Verticillium albo-atrum VaMs.102]
  misc_feature (1)..(129): NCBI GI: 225685023 Blast Desc: conserved [Paracoccidioides brasiliensis Pb03]
  misc_feature (1)..(128): NCBI GI: 255944667 Blast Desc: Pc20g05690 [Penicillium chrysogenum Wisconsin 54-1255] gi|211587836|emb|CAP85898.1| Pc20g05690 [Penicillium chrysogenum Wisconsin 54-1255]
MNARCQCGAVQFQTPQPKPLALYICHCTECRRQTGSAFGTSAIFAKFELPDTAQLSCYRRLTASGHTLECYFCTQCGTRLVHSTKGKDFVSVKGGCLEGLDWGKAIHIWTKSAMVPIPEGTETYPEEPSDTETSSSQETLDQPPTRNYRHRPLHNSGGPFADAISTPETEELGRVRGACELSGVI

SEQ ID NO: 38191 - DNA, 1257 bp, Muscodor strobelii
  misc_feature: SGI EST ID NO. CUFF.91616.1
  misc_feature: Variant of the nucleotide sequence at SEQ ID NO 38189
atgcgatcggaaattgatatactggcgtatccccagaacttcctgacatttctgtggacttggagctgcaacttcaaactcaaacgtctaccatcggagttcagtttcaacgtttccagactgagttaaagtgtggggcaccgccgatgcgttgagtcggagtcgaacggtcgcgcaacagctttaaggccactttgaccaagaattggctaattccttacgtatgatcaatcataaccgacagagcaagacctgatcgtcactcaacacatatataactacagtagttcaagagaagagcagcaacagactagcaacatgaacgcacgctgtcagtgcggggctgtccagttccagacaccacagccaaaaccgcttgcattatatatctgccattgtactgaatgtcgaagacagacaggatcggcatttggtacatctgcgatattcgccaagttcgaactgcctgatacggcccaattatcttgctatagacggcttacggcttctggtcacactcttgaatgctacttctgcacgcaatgcggcacgcgcctcgttcactcaactaaaggaaaggacttcgtctccgtcaaaggcggctgtctcgaaggtctagactgggggaaggcaattcacatatggacgaagtcggccatggtgccgatccccgagggaactgagacataccccgaagagccatcggataccgaaacctctagctcacaggagactttggaccaacctcccacccggaattatcggcatagaccgcttcataacagcggtggcccattcgcggatgcgatttcgacaccggagactgaggagctgggccgtgtcagaggtgcgtgtgaacttagcggtgtaatctagattgatggttctcttgaagaacactgggcctagaaatgtagaaagacataggaagaccgttgggtgtcttggaaagtgtggggatgacttcaatatgggcttgaccactgttctttgttctattgcagattcacttcaaaaaagctaattctgtttgtccagtaatggggatgggaaaatatccctccttcacttcttcattaagttctacagagattaattcgacggcgttgatagcctggcgcacatgtttcgacggcgttgatagttgtggtctgggtacgtgaacagcagaaacccaagcagcagcatgtgaaatttgttgggattgttgttgtgagtcaattgtcccccgtcagatagctaattcgatggaccgcc

SEQ ID NO: 38192 - DNA, 1794 bp, Muscodor strobelii
  misc_feature: SGI cDNA ID NO. 573266
  misc_feature: Reduced expression when VOC is produced
  misc_feature: Encodes the peptide sequence at SEQ ID NO 38193
atggcttctgccggctatgttcagatctcccttatttgggtggcctacgctgtcgcggttggcctggctttgatcgctgctgccatcaccacattcacctggcagaccccacgcgagcgatccgccatcgttagcactgtcaccatcatcagcattaccgctctactcgcgaccgtcttcctgctccccgtcgatatcgccttggtttcatccactacaaacactgccctcggtatcaagagagattgggcaactccgcgccgagtgtccgacatcattctcaccctcagaattgtctactactccctatacagcttcgatgcgctgctctgtctcgtcatcattcctttcgcctacttctggcacgaggaatacgacgaggtggaagagcaggaaggcaatcagacattctcgagccggttctggggcgcgttcagatacaccattgccttcctactcttggttgtcatcatcttcctgatcggcttcttcgtccctgctgccggaaatcacgaaggcaaacatatcgatcttgacttcttcaaacgactgcttgatgagaactctggcgagaaggctttgagctttggccttggtttactgatcaccttgggcacactcctctatattctctacactggagctggcctcgccctcttcccgatctcattcattaagtccgccccttccatttcagcacctcaactctcagaaacgacccactctcaacttgaacagaacagagagcgacagcgacagctggagatgcgtaatgctggtcggtccgagggcatgccttctaaggataggcgtgagcttgaggcgctagttcgagaggagcgaactttggttcgccgagagcgcgttgctgcagaagcacaaggcgagggcaagagtttcgttgtgcacgcctggactaagttctgcgcagtcttccgccctgtcaagcttctcggaggcattgtgctcatactcatctcgctcctcgtctgggtgtctatgttgatctctggcatcgacaaggctgcgaactccatctgcaaggagaaatgtggctacatcttggcgcatatcaacatcttccagccgatcaactggctttttgtgcagacagcgaaagccttcccagtcgactatgtcctcatggctctcttggtcttgctcttctttagcagctccatttctggcattgccgccattggcattcgtttcctttggctgcgcattttccagatcagcaagggccggactgcacctcaagctctgctgatggccactgtcatgcttgcactcatcacgctagctatcaactattccgtggcgatgctggtcgcacctcagtatgccagctttggcacccaaaccttctgtgatctcatgccacaccacccagacgagcaggccgactgcagtaacaacccgcaggaggtaaagccatgttcggagtgggtcaactcacatagtcgagccatgcaagtctgcacaccaactgtcatgtcgaccttcctcaaccgcatcaccctgaactggccagtattcggtgcaatcgacttttgggctcagttcgcattcctcggcgtgttcctgatcgttttcttgactgccctgttccgagcgcccaaattgaacattgcagagattgatgaggaggccgaagctgatgaggaggagagtctgctcgctagcacgggacgtcgcttcaacgctacatgggaggacttgactggaaatgtgagaggcaaacgcagcaacaatggggcagctgcaaattatggttcaggatcagcctcatag

SEQ ID NO: 38193 - protein, 597 aa, Muscodor strobelii
  misc_feature: SGI Peptide ID NO. 573266
  misc_feature (1)..(597): NCBI GI: 46120518 Blast Desc: FG04906.1 [Gibberella zeae PH-1]
  misc_feature (4)..(590): NCBI GI: 39974227 Blast Desc: MGG_00740 [Magnaporthe grisea 70-15] gi|224493114|sp|A4RE85.1|LMBD1_MAGGR RecName: Full= lysosomal cobalamin transporter gi|145018327|gb|EDK02606.1| MGG_00740
  misc_feature (1)..(597): NCBI GI: 256735604 Blast Desc: [Nectria haematococca mpVI 77-13-4]
  misc_feature (1)..(596): NCBI GI: 224493174 Blast Desc: [Nectria haematococca mpVI 77-13-4]
  misc_feature (7)..(585): NCBI GI: 154320782 Blast Desc: BC1G_01863 [Botryotinia fuckeliana B05.10] gi|224493112|sp|A6RN41.1|LMBD1_BOTFB RecName: Full= lysosomal cobalamin transporter gi|150853552|gb|EDN28744.1| BC1G_01863
  misc_feature (1)..(596): NCBI GI: 85111768 Blast Desc: NCU02100 [Neurospora crassa OR74A] gi|28925860|gb|EAA34858.1| conserved [Neurospora crassa OR74A]
  misc_feature (1)..(581): NCBI GI: 171695064 Blast Desc: protein product [Podospora anserina] gi|224493117|sp|B2AA26.1|LMBD1_PODAN RecName: Full= lysosomal cobalamin transporter gi|170947774|emb|CAP59937.1| protein
  misc_feature (7)..(590): NCBI GI: 156040481 Blast Desc: SS1G_12257 [Sclerotinia sclerotiorum 1980] gi|224493119|sp|A7F2V9.1|LMBD1_SCLS1 RecName: Full= lysosomal cobalamin transporter gi|154696313|gb|EDN96051.1| SS1G_12257
  misc_feature (7)..(577): NCBI GI: 242798825 Blast Desc: LMBR1 domain protein, [Talaromyces stipitatus ATCC 10500] gi|218716593|gb|EED16014.1| LMBR1 domain protein, [Talaromyces stipitatus ATCC 10500]
  misc_feature (1)..(597): NCBI GI: 261361314 Blast Desc: conserved [Verticillium albo-atrum VaMs.102]
  misc_feature: Useful for introducing or modulating the production of volatile compounds
MASAGYVQISLIWVAYAVAVGLALIAAAITTFTWQTPRERSAIVSTVTIISITALLATVFLLPVDIALVSSTTNTALGIKRDWATPRRVSDIILTLRIVYYSLYSFDALLCLVIIPFAYFWHEEYDEVEEQEGNQTFSSRFWGAFRYTIAFLLLVVIIFLIGFFVPAAGNHEGKHIDLDFFKRLLDENSGEKALSFGLGLLITLGTLLYILYTGAGLALFPISFIKSAPSISAPQLSETTHSQLEQNRERQRQLEMRNAGRSEGMPSKDRRELEALVREERTLVRRERVAAEAQGEGKSFVVHAWTKFCAVFRPVKLLGGIVLILISLLVWVSMLISGIDKAANSICKEKCGYILAHINIFQPINWLFVQTAKAFPVDYVLMALLVLLFFSSSISGIAAIGIRFLWLRIFQISKGRTAPQALLMATVMLALITLAINYSVAMLVAPQYASFGTQTFCDLMPHHPDEQADCSNNPQEVKPCSEWVNSHSRAMQVCTPTVMSTFLNRITLNWPVFGAIDFWAQFAFLGVFLIVFLTALFRAPKLNIAEIDEEAEADEEESLLASTGRRFNATWEDLTGNVRGKRSNNGAAANYGSGSAS

SEQ ID NO: 38194 - DNA, 2669 bp, Muscodor strobelii
  misc_feature: SGI EST ID NO. CUFF.91582.0
  misc_feature: Variant of the nucleotide sequence at SEQ ID NO 38192
ttgcgcctcacaagctgaacctgaagcctggagctatcaacagagacacattccctgtccaactttccagcgcggggcattgctggattgtgacgagaccagcttcattctgttgtctccttcatgagatcctggttgatagatccttgcattcttcaattggcgcgtctttgaggaccgctaggtattcttcaccaaatataccatcatcaccttatctagactacggtcaaacggttcatgttcacaatggcttctgccggctatgttcagatctcccttatttgggtggcctacgctgtcgcggttggcctggctttgatcgctgctgccatcaccacattcacctggcagaccccacgcgagcgatccgccatcgttagcactgtcaccatcatcagcattaccgctctactcgcgaccgtcttcctgctccccgtcgatatcgccttggtttcatccactacaaacactgccctcggtatcaagagagattgggcaactccgcgccgagtgtccgacatcattctcaccctcagaattgtctactactccctatacagcttcgatgcgctgctctgtctcgtcatcattcctttcgcctacttctggcacgaggaatacgacgaggtggaagagcaggaaggcaatcagacattctcgagccggttctggggcgcgttcagatacaccattgccttcctactcttggttgtcatcatcttcctgatcggcttcttcgtccctgctgccggaaatcacgaaggcaaacatatcgatcttgacttcttcaaacgactgcttgatgagaactctggcgagaaggctttgagctttggccttggtttactgatcaccttgggcacactcctctatattctctacactggagctggcctcgccctcttcccgatctcattcattaagtccgccccttccatttcagcacctcaactctcagaaacgacccactctcaacttgaacagaacagagagcgacagcgacagctggagatgcgtaatgctggtcggtccgagggcatgccttctaaggataggcgtgagcttgaggcgctagttcgagaggagcgaactttggttcgccgagagcgcgttgctgcagaagcacaaggcgagggcaagagtttcgttgtgcacgcctggactaagttctgcgcagtcttccgccctgtcaagcttctcggaggcattgtgctcatactcatctcgctcctcgtctgggtgtctatgttgatctctggcatcgacaaggctgcgaactccatctgcaaggagaaatgtggctacatcttggcgcatatcaacatcttccagccgatcaactggctttttgtgcagacagcgaaagccttcccagtcgactatgtcctcatggctctcttggtcttgctcttctttagcagctccatttctggcattgccgccattggcattcgtttcctttggctgcgcattttccagatcagcaagggccggactgcacctcaagctctgctgatggccactgtcatgcttgcactcatcacgctagctatcaactattccgtggcgatgctggtcgcacctcagtatgccagctttggcacccaaaccttctgtgatctcatgccacaccacccagacgagcaggccgactgcagtaacaacccgcaggaggtaaagccatgttcggagtgggtcaactcacatagtcgagccatgcaagtctgcacaccaactgtcatgtcgaccttcctcaaccgcatcaccctgaactggccagtattcggtgcaatcgacttttgggctcagttcgcattcctcggcgtgttcctgatcgttttcttgactgccctgttccgagcgcccaaattgaacattgcagagattgatgaggaggccgaagctgatgaggaggagagtctgctcgctagcacgggacgtcgcttcaacgctacatgggaggacttgactggaaatgtgagaggcaaacgcagcaacaatggggcagctgcaaattatggttcaggatcagcctcataggctcataacctttctaagtctcttttcatttgcttagcgttgaaatattggaggaatgcccgaggcgatacccatgaatcgacgttacaaaaagaagatctatctcgaagattgccgacaggttgaatcatggccttttctctcaaaaaaacaaattgtattgttatgaacaagaaaacggggcgcgggaatgcatggtgcacgggacgcgtagggtcctcgaggtatacggattcaaggaattgtgtatatgatacctggagttatggcttttgctggtagggtagtcaaggaaccatctttggtacagttgtgcatgggtgaaatggtagtgagtgtgtactgtctgctgtgtgtgagtcattgaaggaattataatttgctctagaccacccgacattcaataacaaatgatcaggtttcgtggcccaattggcaaggcgtctgactacgaatcaggagattctgggttcgagccccagcgagatcaatccgtattttcttatactgtggcaaattttttcggaccgaacacttcgttcaggttttggttcaaagtttatggaggttttgtcaagtttttgccccactactggcaggccatgtgggggaaatggggcgatctg

SEQ ID NO: 38195 - DNA, 417 bp, Muscodor strobelii
  misc_feature: SGI cDNA ID NO. 573267
  misc_feature: Reduced expression when VOC is produced
  misc_feature: Encodes the peptide sequence at SEQ ID NO 38196
atgccacaccacccagacgagcaggccgactgcagtaacaacccgcaggaggtaaagccatgttcggagtgggtcaactcacatagtcgagccatgcaagtctgcacaccaactgtcatgtcgaccttcctcaaccgcatcaccctgaactggccagtattcggtgcaatcgacttttgggctcagttcgcattcctcggcgtgttcctgatcgttttcttgactgccctgttccgagcgcccaaattgaacattgcagagattgatgaggaggccgaagctgatgaggaggagagtctgctcgctagcacgggacgtcgcttcaacgctacatgggaggacttgactggaaatgtgagaggcaaacgcagcaacaatggggcagctgcaaattatggttcaggatcagcctcatag

SEQ ID NO: 38196 - protein, 138 aa, Muscodor strobelii
  misc_feature: SGI Peptide ID NO. 573267
  misc_feature (2)..(138): NCBI GI: 46120518 Blast Desc: FG04906.1 [Gibberella zeae PH-1]
  misc_feature (2)..(122): NCBI GI: 171695064 Blast Desc: protein product [Podospora anserina] gi|224493117|sp|B2AA26.1|LMBD1_PODAN RecName: Full= lysosomal cobalamin transporter gi|170947774|emb|CAP59937.1| protein
  misc_feature (2)..(138): NCBI GI: 256735604 Blast Desc: [Nectria haematococca mpVI 77-13-4]
  misc_feature (5)..(137): NCBI GI: 224493174 Blast Desc: [Nectria haematococca mpVI 77-13-4]
  misc_feature (5)..(130): NCBI GI: 156040481 Blast Desc: SS1G_12257 [Sclerotinia sclerotiorum 1980] gi|224493119|sp|A7F2V9.1|LMBD1_SCLS1 RecName: Full= lysosomal cobalamin transporter gi|154696313|gb|EDN96051.1| SS1G_12257
  misc_feature (5)..(137): NCBI GI: 85111768 Blast Desc: NCU02100 [Neurospora crassa OR74A] gi|28925860|gb|EAA34858.1| conserved [Neurospora crassa OR74A]
  misc_feature (2)..(126): NCBI GI: 39974227 Blast Desc: MGG_00740 [Magnaporthe grisea 70-15] gi|224493114|sp|A4RE85.1|LMBD1_MAGGR RecName: Full= lysosomal cobalamin transporter gi|145018327|gb|EDK02606.1| MGG_00740
  misc_feature (6)..(136): NCBI GI: 169603231 Blast Desc: SNOG_04623 [Phaeosphaeria nodorum SN15] gi|121930652|sp|Q0UUE1.1|LMBD1_PHANO RecName: Full= lysosomal cobalamin transporter gi|111067263|gb|EAT88383.1| SNOG_04623
  misc_feature (5)..(125): NCBI GI: 154320782 Blast Desc: BC1G_01863 [Botryotinia fuckeliana B05.10] gi|224493112|sp|A6RN41.1|LMBD1_BOTFB RecName: Full= lysosomal cobalamin transporter gi|150853552|gb|EDN28744.1| BC1G_01863
  misc_feature (2)..(138): NCBI GI: 261361314 Blast Desc: conserved [Verticillium albo-atrum VaMs.102]
  misc_feature: Useful for introducing or modulating the production of volatile compounds
MPHHPDEQADCSNNPQEVKPCSEWVNSHSRAMQVCTPTVMSTFLNRITLNWPVFGAIDFWAQFAFLGVFLIVFLTALFRAPKLNIAEIDEEAEADEEESLLASTGRRFNATWEDLTGNVRGKRSNNGAAANYGSGSAS

SEQ ID NO: 38197 - DNA, 2669 bp, Muscodor strobelii; identical to SEQ ID NO: 38194
  misc_feature: SGI EST ID NO. CUFF.91582.0
  misc_feature: Variant of the nucleotide sequence at SEQ ID NO 38195

SEQ ID NO: 38198 - DNA, 1095 bp, Muscodor strobelii
  misc_feature: SGI cDNA ID NO. 573268
  misc_feature: Encodes the peptide sequence at SEQ ID NO 38199
atggaatcacatccaggcgccgagacagggctcttcgacccagagtgcccttattaccaggaagaacctcgtatccacgaagaccctcatgtgttgatgtttcgcctcatagaggacttttccgatggctcgacgttcattggcgactctttcggcgatggcgactggatagattgcacgaaccccaggccatgtggccagaagtgtttctgccaatcatcgagtatgtttgtggatgccaatgtcttccccttcaccgtgaaaaagacgccgacggacatggtgatatcatttcacagccctgaactaaggagcgacgtcatggatgctcttgctggggtctacatcggagtgatgcccttcgagaacggctggaatggcttcttgctgctcaagcatcgttcctacttaaccaagagactggctcggctgcgaagagtggcctctggttgccccgaatggaacttccgagtggcatcattctcgcttctagtcgctggtctcctgagtgatccttcaatctaccagagctatgggttcggatggctgtactgccaagattacctagaccttggcgatcgcgagtggttcaatgggcgcaagcagagaacggatcatatcaactcctctcttgaccaatcggtagattccgatatagagaacgatgataaactattggaccactaccctgtctcgaatgacgggctaagtctagctatgtcgacattttctggtgaaactgcacaaggttcgtctgagctacagagttcagagcatgttcatctcgaaccttcagccattggccaattcgtggattctctgatcgctaggttttgggcagatgattgttgtactcgtctacccaaaggctccatcaatcttatcactcatccgcaaaacccagattggagtcctttaccgctcagcactgtcattgcctctcagataacagcgatacagggtagggcagatcgggataaagcattgcgatatgccatcaaggctcacgacgtcacttccgtccagaagttgctgagtctcgacatacatttacccccacagaaggaagttgcgcctggcttcctggtcgactaa

SEQ ID NO: 38199 - protein, 364 aa, Muscodor strobelii
  misc_feature: SGI Peptide ID NO. 573268
MESHPGAETGLFDPECPYYQEEPRIHEDPHVLMFRLIEDFSDGSTFIGDSFGDGDWIDCTNPRPCGQKCFCQSSSMFVDANVFPFTVKKTPTDMVISFHSPELRSDVMDALAGVYIGVMPFENGWNGFLLLKHRSYLTKRLARLRRVASGCPEWNFRVASFSLLVAGLLSDPSIYQSYGFGWLYCQDYLDLGDREWFNGRKQRTDHINSSLDQSVDSDIENDDKLLDHYPVSNDGLSLAMSTFSGETAQGSSELQSSEHVHLEPSAIGQFVDSLIARFWADDCCTRLPKGSINLITHPQNPDWSPLPLSTVIASQITAIQGRADRDKALRYAIKAHDVTSVQKLLSLDIHLPPQKEVAPGFLVD

SEQ ID NO: 38200 - DNA, 218 bp, Muscodor strobelii
  misc_feature: SGI EST ID NO. CUFF.91604.0
  misc_feature: Variant of the nucleotide sequence at SEQ ID NO 38198
gcgcaagcagagaacggatcatatcaactcctctcttgaccaatcggtagattccgatatagagaacgatgataaactattggaccactaccctgtctcgaatgacgggctaagtctagctatgtcgacattttctggtgaaactgcacaaggttcgtctgagctacagagttcagagcatgttcatctcgaaccttcagccattggccaattcgtgg

SEQ ID NO: 38201 - DNA, 1161 bp, Muscodor strobelii
  misc_feature: SGI cDNA ID NO. 573270
  misc_feature: Encodes the peptide sequence at SEQ ID NO 38202
atgagtaacgtcggaagatacttctgcgtggctctgccatttattttgacggctgctgctgtcatcgctactcttatcgtcggcttgactggcgtgagcagcaacgacttgtacctctacaagatcgatatcggaaacctgtctatcgatgcttccgaactacagtacctaattaacaacgccaccaacatccttgacggcaaggctagcgacaacattatttcatctttcgagaacgctaccaacgatctcggtgacgatatctcggatactgctgacaaggtcgttggcaacaacaaccgccgctcgcctgtccccatcgaatggcacgaccccagcctcattgacggcagtggtgactccaagtctggcgatgctcctgtcgacactgacctcaaggccaccgacaactccaacgtcaatgcggctaacatcaccgctaaggatctcggtctcgccaactactaccaattcaatctctggagcttctgctccgctgattcctcttctggcaagaagaactgcaccaaggccgaatttgattacgctagcaagcacttcaacctgaactgggtctacaacttgagcgccgatatcagcagtgagatcaaggtgcccaccgctctcaatgatggcttgaatgtgtacaagactgttgtcaagtggaacgaggtcgtcttcatcgtcggcatcatcgctcttgccgctgagcttctggttggtctgttctccgcctgctcgcgcatcgtctcctgcattgcctacctcatctccggcattgccaccctcgccgctatcgcgaacgccattctgctgacggttaccggcgccatcatcgtcggcatcgcccaggccggccacaagtacggtgccaggtccagcctcggctctcccttcctcgtcatcctctggctcggtgtcgccttcgccatcgccgccggtctcttctggctgttctccgtctgctgctgcaagcccgagcaccgcccctctcgccgcaaccgccacagcgacggcgagaagctcctcggcaacaatggcacttacgctcctctcggctcccctcagcacaacgctgctggtatgggctacggtggtccccagcgtggcggtgcccgctccgatctggcttacgagccttactcccactctcgcgtctaa

SEQ ID NO: 38202 - protein, 386 aa, Muscodor strobelii
  misc_feature: SGI Peptide ID NO. 573270
  misc_feature (1)..(385): NCBI GI: 39975407 Blast Desc: MGG_00150 [Magnaporthe grisea 70-15] gi|145018999|gb|EDK03278.1| MGG_00150 [Magnaporthe grisea 70-15]
  misc_feature (4)..(383): NCBI GI: 256734737 Blast Desc: NECHADRAFT_98939 [Nectria haematococca mpVI 77-13-4]
  misc_feature (4)..(383): NCBI GI: 46107932 Blast Desc: FG00849.1 [Gibberella zeae PH-1]
  misc_feature (1)..(386): NCBI GI: 116180824 Blast Desc: CHGG_01040 [Chaetomium globosum CBS 148.51] gi|88185337|gb|EAQ92805.1| CHGG_01040 [Chaetomium globosum CBS 148.51]
  misc_feature (134)..(383): NCBI GI: 156060803 Blast Desc: SS1G_02544 [Sclerotinia sclerotiorum 1980] gi|154699948|gb|EDN99686.1| SS1G_02544 [Sclerotinia sclerotiorum 1980]
  misc_feature (141)..(383): NCBI GI: 154322204 Blast Desc: BC1G_01249 [Botryotinia fuckeliana B05.10] gi|150850496|gb|EDN25689.1| BC1G_01249 [Botryotinia fuckeliana B05.10]
  misc_feature (4)..(386): NCBI GI: 85116356 Blast Desc: NCU07491 [Neurospora crassa OR74A] gi|28926839|gb|EAA35802.1| [Neurospora crassa OR74A]
  misc_feature (1)..(386): NCBI GI: 171695978 Blast Desc: protein product [Podospora anserina] gi|170948231|emb|CAP60395.1| protein product [Podospora anserina]
  misc_feature (201)..(385): NCBI GI: 261358813 Blast Desc: integral membrane protein [Verticillium albo-atrum VaMs.102]
  misc_feature (1)..(383): NCBI GI: 119468569 Blast Desc: integral membrane protein [Neosartorya fischeri NRRL 181] gi|119406017|gb|EAW15968.1| integral membrane protein [Neosartorya fischeri NRRL 181]
MSNVGRYFCVALPFILTAAAVIATLIVGLTGVSSNDLYLYKIDIGNLSIDASELQYLINNATNILDGKASDNIISSFENATNDLGDDISDTADKVVGNNNRRSPVPIEWHDPSLIDGSGDSKSGDAPVDTDLKATDNSNVNAANITAKDLGLANYYQFNLWSFCSADSSSGKKNCTKAEFDYASKHFNLNWVYNLSADISSEIKVPTALNDGLNVYKTVVKWNEVVFIVGIIALAAELLVGLFSACSRIVSCIAYLISGIATLAAIANAILLTVTGAIIVGIAQAGHKYGARSSLGSPFLVILWLGVAFAIAAGLFWLFSVCCCKPEHRPSRRNRHSDGEKLLGNNGTYAPLGSPQHNAAGMGYGGPQRGGARSDLAYEPYSHSRV

SEQ ID NO: 38203 - DNA, 1599 bp, Muscodor strobelii
  misc_feature: SGI cDNA ID NO. 573271
  misc_feature: Encodes the peptide sequence at SEQ ID NO 38204
atgggcaaccagaactcgaaagaaggtggaggcggcggcggaggctccaaagcctctggcggtccgaccgagaacctccagtcgtacccctcctttaacaaggccgacaccaaggattcgacacgctccttcaaggcgctgaggtccaagatccccggaggcgggaagaccgacagcccgcgaaactcggcaatcctgtccaatggcgattccgctactaacgacaagtcggatgcggcgtcggtgcgatcaggccgaagcggtagatctggtgtgtcgaagcccggccgtaacgatatcgcctcgccgacttcaccagggtctcggccatccatggatgcgttttccccgatcgatcaaccaccgccatcccccatacagtctgcctccatgaaggcggacaagcacggcgatatcagtgctgcgcaagcctccggagaggttgaccatgtatcagaccaaccgccgtctggaaccgccaacccgaacccccaactgcagcagcagcctggatcgtcgatcctggtgaggaaggagaaccagatcaaccccatacagaaggatccgaatgcagatgaccagtctccgactggcgttgctatgggtgatatcaacgacattgacttggatgacttcatcaaacgtctgcttgacgctgcctacgctggtaaggtaaccaagagcgtctgcttgaagaacgccgaaatcgtagccatatgcgctagagctcgcgagtgtttcctatcccaacccgcgttacttgagctcgatgccccagtcaagatcgtcggtgacgtccatgggcagtacaccgacttgatccgaatgttcgagatgtgcggattcccaccctcgtccaacttcctcttcctgggcgactacgttgatcgtggcaagcaatcgctcgagacgatcctgctactattatgttacaagttgaagtatcccgagaacttcttcttactgcgcggtaatcacgagtgtgccaatgtcacgcgagtctacggcttctacgatgaatgcaagcgaaggtgcaatgtcaaaatctggaagacatttatcgattgcttcaacacccttcccattgctgctatcgtagcaggtaagatcttctgtgtgcacggtggactatcgccagccctcagccacatggacgatatccgcaatattgcccgccctactgatgtacctgactatggactgctgaatgaccttctctggtctgaccccgccgatatggaagcagactgggaggccaacgaacggggcgtgagttattgctttggcaaaaaggttattaccgatttcctcgcaactcacgatttcgatcttgtttgtcgcgcccacatggtggttgaagacggctacgaattctttaatgaccgagttctggttactgttttcagcgcaccaaattactgtggcgaatttgataactggggtgccgtaatgtctgtctcttccgagctgctctgcagctttgagttgcttaagccgcttgactcctctgcgctcaagagccatatcaagaagggcaggaacaaacgtaataacatgttgaacagtccccctgcgagcgtgtatccccagagcgtgtag

SEQ ID NO: 38204 - protein, 532 aa, Muscodor strobelii
  misc_feature: SGI Peptide ID NO. 573271
  misc_feature (258)..(453): Pfam Id: PF00149 Pfam Desc: Calcineurin-like phosphoesterase
  misc_feature (1)..(532): NCBI GI: 85116346 Blast Desc: serine/threonine-protein phosphatase PP-Z [Neurospora crassa OR74A] gi|28926837|gb|EAA35800.1| serine/threonine-protein phosphatase PP-Z [Neurospora crassa OR74A]
  misc_feature (1)..(532): NCBI GI: 4193367 Blast Desc: protein phosphatase-Z-like serine/threonine protein phosphatase [Neurospora crassa] gi|4193369|gb|AAD09996.1| protein phosphatase-Z-like serine/threonine protein phosphatase crassa]
  misc_feature (20)..(532): NCBI GI: 46107938 Blast Desc: FG00852.1 [Gibberella zeae PH-1]
  misc_feature (1)..(529): NCBI GI: 256735443 Blast Desc: [Nectria haematococca mpVI 77-13-4]
  misc_feature (23)..(532): NCBI GI: 39975409 Blast Desc: conserved [Magnaporthe grisea 70-15] gi|145019001|gb|EDK03280.1| conserved [Magnaporthe grisea 70-15]
  misc_feature (1)..(532): NCBI GI: 171695976 Blast Desc: protein product [Podospora anserina] gi|170948230|emb|CAP60394.1| protein product [Podospora anserina]
  misc_feature (1)..(532): NCBI GI: 116180828 Blast Desc: CHGG_01042 [Chaetomium globosum CBS 148.51] gi|88185339|gb|EAQ92807.1| CHGG_01042 [Chaetomium globosum CBS 148.51]
  misc_feature (12)..(531): NCBI GI: 121710346 Blast Desc: serine/threonine protein phosphatase, [Aspergillus clavatus NRRL 1] gi|119400939|gb|EAW11363.1| serine/threonine protein phosphatase, [Aspergillus clavatus NRRL 1]
  misc_feature (1)..(529): NCBI GI: 226290765 Blast Desc: serine/threonine-protein phosphatase PP1 [Paracoccidioides brasiliensis Pb18]
  misc_feature (1)..(531): NCBI GI: 240104860 Blast Desc: serine/threonine protein phosphatase PP-Z, [Coccidioides posadasii C735 delta SOWgp]
  misc_feature (26)..(532): SWISSPROT Homolog: EC 3.1.3.16 Phosphoprotein phosphatase
MGNQNSKEGGGGGGGSKASGGPTENLQSYPSFNKADTKDSTRSFKALRSKIPGGGKTDSPRNSAILSNGDSATNDKSDAASVRSGRSGRSGVSKPGRNDIASPTSPGSRPSMDAFSPIDQPPPSPIQSASMKADKHGDISAAQASGEVDHVSDQPPSGTANPNPQLQQQPGSSILVRKENQINPIQKDPNADDQSPTGVAMGDINDIDLDDFIKRLLDAAYAGKVTKSVCLKNAEIVAICARARECFLSQPALLELDAPVKIVGDVHGQYTDLIRMFEMCGFPPSSNFLFLGDYVDRGKQSLETILLLLCYKLKYPENFFLLRGNHECANVTRVYGFYDECKRRCNVKIWKTFIDCFNTLPIAAIVAGKIFCVHGGLSPALSHMDDIRNIARPTDVPDYGLLNDLLWSDPADMEADWEANERGVSYCFGKKVITDFLATHDFDLVCRAHMVVEDGYEFFNDRVLVTVFSAPNYCGEFDNWGAVMSVSSELLCSFELLKPLDSSALKSHIKKGRNKRNNMLNSPPASVYPQSV

SEQ ID NO: 38205 - DNA, 4234 bp, Muscodor strobelii
  misc_feature: SGI EST ID NO. CUFF.91906.1
  misc_feature: Variant of the nucleotide sequence at SEQ ID NO 38203
tcctgttatcactctcaccttccgatgcagtatcctctctgacgtcccgttagttcactaacatcatcgtcatctatcccgcagctctgcctacctaattcacgagtcaacggagtcacacatctctttccgtggccccttgccatccctcagcagcattactttatctcggtgtcttccccagacgcccccgggccctgaacctggctgccaattagctgtcgcagcccaacgccgagcccaacgctgtgtgtgtctcacccgcagtgtctcatctcacattccacagatcccccaaagccttgttctcctccatcagcctcccacagcttgacgcagacacccgctgcccagcacttccaagaaatcaagcatcctgtgtggttgcagtcacattggtcagcagcactactcgcagcccaaccctgctgcacccggtcggttccctgcccatcctccgcctccctgcctcgtgcttgtgaaacgtcgagtgatagctccctgggagtcttggacgcagacacaacagcccgcagaggacattgtccggagtgacagtggccactgacaccgtctggctgtcaccgacgatcccaccgttcgtcacataccgtcatcgcgcctgccttgtctgtcactgcctgtcatcgcctctgccattgtgcctgccattattactgttggagtaaatgcacttttcccgcccgcctaatgctaattaacatctaccgataaacatcgacctgtagaacacccagcacatactgcctaagcacctgacgcgtagccttgtgcactagtctcaggcggcagctgcaatcggccaaagcttcttctcctgcgatctccgaatttttcactcgtcgtcctggacggcttcgacttggcgccgcgccttggtcgtcccaacagctgcgtgcccagcactgcccagcgctgcccagagtccagagctcctctcgcatcggtcctttcgctgattctgtgcacaccatcgtaaggtatgaacttttgtgcttcggttaacccagatcgtcggtttcccttctcgaggtagttcctataagcacgtggtgtcccgtcccggtcgtatcctctcctgcgagttgcccgagttgccccgtcatcctgactaagaagcacgcttcgctcggctgtatccaaacagaacgccatcgatagaccagagcaaaccttctccccgcactctctcaacattccctagcccagtgtttgtcgtcatcttatcttggtatctttaattcatatgtcgacaaagctgagctaggttcgcccaagtctttttgttcttcaggtgtccaccgcattagtgtgcatgtctcgtgtagaagcagcccgatcctcctctttgcctcggattcaatgcgcagcagctacaaacaaagatcaaagtgactaacccgtaatcccatcagacacgcgatcttctacctgccatcaaacagtgactttgtgctttgtcaaccacgccgttccgagggatacctccgatatccccgccgaccgtcccgagcacgaggaccatcatcccgcgagtcccgctgctccatccagctatcccacccttaaagccggtctggcttcctgactcatcgacacggcattcaaaacggctcctcgaacgtacctcattgtcttcctcgtgccactcttccgccctccctaacactcagtcttctgtacaaaaatagtatcaataccgcacatcttgcctacgactcaaagagggtgggcgtctgggccgttgtttccttggctggactttgtacgagtacgtaaagctgggcaacctcccgaacgccatcctacatagacatccgccatgggcaaccagaactcgaaagaaggtggaggcggcggcggaggctccaaagcctctggcggtccgaccgagaacctccagtcgtacccctcctttaacaaggccgacaccaaggattcgacacgctccttcaaggcgctgaggtccaagatccccggaggcgggaagaccgacagcccgcgaaactcggcaatcctgtccaatggcgattccgctactaacgacaagtcggatgcggcgtcggtgcgatcaggccgaagcggtagatctggtgtgtcgaagcccggccgtaacgatatcgcctcgccgacttcaccagggtctcggccatccatggatgcgttttccccgatcgatcaaccaccgccatcccccatacagtctgcctccatgaaggcggacaagcacggcgatatcagtgctgcgcaagcctccggagaggttgaccatgtatcagaccaaccgccgtctggaaccgccaacccgaacccccaactgcagcagcagcctggatcgtcgatcctggtgaggaaggagaaccagatcaaccccatacagaaggatccgaatgcagatgaccagtctccgactggcgttgctatgggtgatatcaacgacattgacttggatgacttcatcaaacgtctgcttgacgctgcctacgctggtaaggtaaccaagagcgtctgcttgaagaacgccgaaatcgtagccatatgcgctagagctcgcgagtgtttcctatcccaacccgcgttacttgagctcgatgccccagtcaagatcgtcggtgacgtccatgggcagtacaccgacttgatccgaatgttcgagatgtgcggattcccaccctcgtccaacttcctcttcctgggcgactacgttgatcgtggcaagcaatcgctcgagacgatcctgctactattatgttacaagttgaagtatcccgagaacttcttcttactgcgcggtaatcacgagtgtgccaatgtcacgcgagtctacggcttctacgatgaatgcaagcgaaggtgcaatgtcaaaatctggaagacatttatcgattgcttcaacacccttcccattgctgctatcgtagcaggtaagatcttctgtgtgcacggtggactatcgccagccctcagccacatggacgatatccgcaatattgcccgccctactgatgtacctgactatggactgctgaatgaccttctctggtctgaccccgccgatatggaagcagactgggaggccaacgaacggggcgtgagttattgctttggcaaaaaggttattaccgatttcctcgcaactcacgatttcgatcttgtttgtcgcgcccacatggtggttgaagacggctacgaattctttaatgaccgagttctggttactgttttcagcgcaccaaattactgtggcgaatttgataactggggtgccgtaatgtctgtctcttccgagctgctctgcagctttgagttgcttaagccgcttgactcctctgcgctcaagagccatatcaagaagggcaggaacaaacgtaataacatgttgaacagtccccctgcgagcgtgtatccccagagcgtgtaggaagagtctccagaggagcacgcgagcccagcatcctgtctcggcgtgtttccagcgatgggaacccagaaaaaccacggcgccgattacacaagggcaagactgtgaagattacgttctcagatcatcaactgtatagtgctctggagagtctctccagaacgagaaaaggcataatggcgacaaaaagagcagtcgagaaacattatgaagccgtacagcatgtaccagcctcggcttggttaattgttcctagcgaacagccggtttggactgcgatgatgtaatagtcattgcagagccaggacaacagaccggaaacgggatctgttggactgaagagggccggccagttggacgcgaaaaattggaagagatacgttgatggagggttgtccagcttcagtccggctgtgaaggaaaagacgggcggcgtttgcagatggattacgggtcttctattgtacattaacacgggcctcggtcacacgctggcattcgatgatgggactggagtcagcttgatcatgatattggccttaacgtacaagtattctacattggagctatcttacagttgctgactcaatcgaaaagggaggtgttggccgaatcttcgatgccaatcgtgacaagttgtacatcactttgcccaagacgacagttttgaatcatgggaatcatgcgcatgatttcgacagatgggcgtaattttcattctggaattcagtgattcgaatgcgcacgcattccgaataaggaaaagacactatgactccatgattgggattc

SEQ ID NO: 38206 - DNA, 1071 bp, Muscodor strobelii
  misc_feature: SGI cDNA ID NO. 573272
  misc_feature: Encodes the peptide sequence at SEQ ID NO 38207
atggccgaggtgacggaaaacaagatctacgtcgaagtttctgaagcccggaatttcgtcgagaatgtcctcatagggaatgacgtcctacctgagaatgcatcaatcatcgccaaatgcctcgcggcggccgatttgcggggtgtcgacacacacggcatgaaccgcatcccgtcttacatgacacgcatccgacaaggcgtgcttgaccctacagcaactcccgtagtgaaagagatcacgcccgtcgtcgcgcaggtcgatgcacagaacggcttcggcttcctcgctgcctcggccgggatggataaggcgatcgagatggcccgtcaattcggcatcggaatggtgagcgtgaagcactcgaatcatttcggcatggcggcttggatcgtgcaacgggctatcgacgcgaatatgatgagtctcgtattcacgaactcgagtccggcattgccgccttatggtagcaaggagaagctcattggcacatcgccgatggcgtgtggggctccgggtgggaaggagaagccgttcatacttgatatggcgccttccgttgctgcacgtggaaagatctataaggctaaaagacggggcgagaagatccctcttgactgggcgttggatagcgaaggtaggccgacggacgaccccgatgaggcgcttaaggggctattgcagcctatggggggccctaagggatctggtattgccattatgatggatgtcttttctggtgtcttgtcaggctctgcatttgctggtcacgtaacgggcccatatgatccgagcaaaccatctgatgttggccacttcctagtagctatcaaaccggatctgttcatgagcttggatgagttccgggagcgtatggactacttgtaccagcgcattgttggatctgagaaggcagccggagtggatcgaatctatttcccaggtgagctggaacaattacaagaggagacgaggttggagaatggtattcctcttgtgcaggccgaagtagatgcgctcaatgaagaggcaaaacgggtaggaaagccgcctttggtagtcaagagttag

SEQ ID NO: 38207 - protein, 356 aa, Muscodor strobelii
  misc_feature: SGI Peptide ID NO. 573272
  misc_feature (9)..(343): Pfam Id: PF02615 Pfam Desc: Malate/L-lactate dehydrogenase
  misc_feature (3)..(355): NCBI GI: 121716328 Blast Desc: malate/L-lactate dehydrogenase, [Aspergillus clavatus NRRL 1] gi|119403930|gb|EAW14347.1| malate/L-lactate dehydrogenase, [Aspergillus clavatus NRRL 1]
  misc_feature (8)..(354): NCBI GI: 71002066 Blast Desc: malate/L-lactate dehydrogenase [Aspergillus fumigatus Af293] gi|66853352|gb|EAL93676.1| malate/L-lactate dehydrogenase, [Aspergillus fumigatus Af293] gi|159129771|gb|EDP54885.1| A1163]
  misc_feature (8)..(354): NCBI GI: 119481623 Blast Desc: malate/L-lactate dehydrogenase, [Neosartorya fischeri NRRL 181] gi|119408994|gb|EAW18943.1| malate/L-lactate dehydrogenase, [Neosartorya fischeri NRRL 181]
  misc_feature (8)..(354): NCBI GI: 256726556 Blast Desc: [Nectria haematococca mpVI 77-13-4]
  misc_feature (3)..(348): NCBI GI: 46124275 Blast Desc: FG06515.1 [Gibberella zeae PH-1]
  misc_feature (1)..(356): NCBI GI: 189193153 Blast Desc: malate dehydrogenase [Pyrenophora tritici-repentis Pt-1C-BFP] gi|187978479|gb|EDU45105.1| malate dehydrogenase [Pyrenophora tritici-repentis Pt-1C-BFP]
  misc_feature (6)..(354): NCBI GI: 238497033 Blast Desc: malate/L-lactate dehydrogenase, [Aspergillus flavus NRRL3357] gi|220694632|gb|EED50976.1| malate/L-lactate dehydrogenase, [Aspergillus flavus NRRL3357]
  misc_feature (10)..(348): NCBI GI: 169598342 Blast Desc: SNOG_01972 [Phaeosphaeria nodorum SN15] gi|111069064|gb|EAT90184.1| SNOG_01972 [Phaeosphaeria nodorum SN15]
  misc_feature (1)..(348): NCBI GI: 242823941 Blast Desc: malate/L-lactate dehydrogenase, [Talaromyces stipitatus ATCC 10500] gi|218713082|gb|EED12507.1| malate/L-lactate dehydrogenase, [Talaromyces stipitatus ATCC
  misc_feature (1)..(352): NCBI GI: 212531097 Blast Desc: malate/L-lactate dehydrogenase, [Penicillium marneffei ATCC 18224] gi|210071069|gb|EEA25158.1| malate/L-lactate dehydrogenase, [Penicillium marneffei ATCC 18224]
  misc_feature (4)..(354): SWISSPROT Homolog: EC 1.1.1.37 Malate dehydrogenase
MAEVTENKIYVEVSEARNFVENVLIGNDVLPENASIIAKCLAAADLRGVDTHGMNRIPSYMTRIRQGVLDPTATPVVKEITPVVAQVDAQNGFGFLAASAGMDKAIEMARQFGIGMVSVKHSNHFGMAAWIVQRAIDANMMSLVFTNSSPALPPYGSKEKLIGTSPMACGAPGGKEKPFILDMAPSVAARGKIYKAKRRGEKIPLDWALDSEGRPTDDPDEALKGLLQPMGGPKGSGIAIMMDVFSGVLSGSAFAGHVTGPYDPSKPSDVGHFLVAIKPDLFMSLDEFRERMDYLYQRIVGSEKAAGVDRIYFPGELEQLQEETRLENGIPLVQAEVDALNEEAKRVGKPPLVVKS

SEQ ID NO: 38208 - DNA, 2080 bp, Muscodor strobelii
  misc_feature: SGI EST ID NO. CUFF.91621.0
  misc_feature: Variant of the nucleotide sequence at SEQ ID NO 38206
aactcaatcaatgaccattcgccccttggtcggtgtttctattccatatgagacctgtagagatgctagaataccgtactcacttccagcccgtgatggcattcaattccagggtaagcactgcaacaaacggcggcagcggatgagatgaagccgatatgtacggggagcaacagccatccaaacaggtcatcgacagaataaaacatacgctcacttcccttattagtctttacatattggtagtattgctctttacgtggcaccgacttcgaaagatcatcgtgggcataggtaggttgaaattgaatgatacatggggatagtcgattattccgaactgcgatatagaatcgaccgattcttatacgtcgtgctattcgatacatttatatccttcattcagattcccgactctcaaatgcctcaaggtatgccagagtgtacactgttgcgctggttggtcgcctctactagttttctatcagtctcttagtcccttatgataccagacacggacggattccggcccgcgatctacacacatcggacataggccgaatggagtacaaatgccatcggccatggaacgatacattgaacacattgttctttgttatataaacaatagtattcttctccaaacagtgaacacacttaatgagtagcatagctcatcagagatcacaattgatagttatcactttccaattggatagtgaagtgacctgtcccctcttggcccctattctccaccatggccgaggtgacggaaaacaagatctacgtcgaagtttctgaagcccggaatttcgtcgagaatgtcctcatagggaatgacgtcctacctgagaatgcatcaatcatcgccaaatgcctcgcggcggccgatttgcggggtgtcgacacacacggcatgaaccgcatcccgtcttacatgacacgcatccgacaaggcgtgcttgaccctacagcaactcccgtagtgaaagagatcacgcccgtcgtcgcgcaggtcgatgcacagaacggcttcggcttcctcgctgcctcggccgggatggataaggcgatcgagatggcccgtcaattcggcatcggaatggtgagcgtgaagcactcgaatcatttcggcatggcggcttggatcgtgcaacgggctatcgacgcgaatatgatgagtctcgtattcacgaactcgagtccggcattgccgccttatggtagcaaggagaagctcattggcacatcgccgatggcgtgtggggctccgggtgggaaggagaagccgttcatacttgatatggcgccttccgttgctgcacgtggaaagatctataaggctaaaagacggggcgagaagatccctcttgactgggcgttggatagcgaaggtaggccgacggacgaccccgatgaggcgcttaaggggctattgcagcctatggggggccctaagggatctggtattgccattatgatggatgtcttttctggtgtcttgtcaggctctgcatttgctggtcacgtaacgggcccatatgatccgagcaaaccatctgatgttggccacttcctagtagctatcaaaccggatctgttcatgagcttggatgagttccgggagcgtatggactacttgtaccagcgcattgttggatctgagaaggcagccggagtggatcgaatctatttcccaggtgagctggaacaattacaagaggagacgaggttggagaatggtattcctcttgtgcaggccgaagtagatgcgctcaatgaagaggcaaaacgggtaggaaagccgcctttggtagtcaagagttagtaaacgaataccgagagaggtgtaatgccaaccccgggtacttacttgtgtaccgtcattcttgcccttcaatagcgaaaggatgggtttaatgttcgaatagatcgaggtcttggacaaagtatagtcaagtgcctaattatctgatcatggtccaaagatcaatcggattgaactcagctgaagtttaggtcacacatgaagcctatcttcagatcgaggattacatactagcacatatctagaaaaaag

SEQ ID NO: 38209 - DNA, 975 bp, Muscodor strobelii
  misc_feature: SGI cDNA ID NO. 573273
  misc_feature: Encodes the peptide sequence at SEQ ID NO 38210
atggttccagacaagaagatcatcgtcgtcattggtgctacaggcaaccagggtggcggagtggctcgtacatttctttcgttgccaaactggcacgtccgatgtgtgactcgtaagcctgactcggacaaggcaaggctcctaactagccttggagctgaggttgtaaaagccgatctctcagaccctgttactttgtctccgactctcgctggtgcgcatgccatctttcttaacacggacttctgggaggtatggagacccatgatggcaagcgggaccgatccggtcgtctgcagtcagacggcatttgatcgcgaagtcaccaacggcaagaatctcgtcgatgccgcggaaaaggtcgagaccctggagcgatttgtgtactctgctctcccgtccctccgagaaatcaaccccgacaagacttcccgcagtttccaccctgagagcaaagcgactatcgtcaagtacatcaaggaagagaaacagaagctcgcgaagaagttctctcttttctacgccggggcatacatggataacatgctactcagcccgcagttcaatccgaaggtcggcaagcacgtcatggcgtcgccgtgcccaccaacgaccaagctgaacgttctcgatccgcacacggcgactggtccgttcgtgcgttgcctggtggaagatgaagagccgggtgtcaggctcctcgcgttcaatgaagatagctacatgagtttgcaagacttcgccaatgtctggtctaaggtcactggcaaggaagccatgtacatgcagctggacgcggatactatgcacaagaccctaagtgtgccatatgagcttctagatgctctgaccaacacccctgatacggggtatgacgttctagagggagcgattagatcacacgagctcaggaataagccgaagacccaaagctgggcggactggctacgcgagaaggagtcgaaatccgtttga

SEQ ID NO: 38210 - protein, 324 aa, Muscodor strobelii
  misc_feature: SGI Peptide ID NO. 573273
  misc_feature (8)..(263): Pfam Id: PF05368 Pfam Desc: NmrA-like family
  misc_feature (8)..(84): Pfam Id: PF05368 Pfam Desc: NmrA-like family
  misc_feature (6)..(324): NCBI GI: 242774486 Blast Desc: conserved [Talaromyces stipitatus ATCC 10500] gi|218722069|gb|EED21487.1| conserved [Talaromyces stipitatus ATCC 10500]
  misc_feature (6)..(324): NCBI GI: 46111949 Blast Desc: FG02856.1 [Gibberella zeae PH-1]
  misc_feature (1)..(320): NCBI GI: 75859146 Blast Desc: AN9531.2 [Aspergillus nidulans FGSC A4] gi|40747575|gb|EAA66731.1| AN9531.2 [Aspergillus nidulans FGSC A4] gi|259486457|tpe|CBF84309.1| TPA: conserved [Aspergillus FGSC
  misc_feature (6)..(320): NCBI GI: 256723861 Blast Desc: NECHADRAFT_78487 [Nectria haematococca mpVI 77-13-4]
  misc_feature (6)..(324): NCBI GI: 238488769 Blast Desc: hscarg dehydrogenase, [Aspergillus flavus NRRL3357] gi|220698010|gb|EED54350.1| hscarg dehydrogenase, [Aspergillus flavus NRRL3357]
  misc_feature (6)..(324): NCBI GI: 169762948 Blast Desc: [Aspergillus oryzae RIB40] gi|83770402|dbj|BAE60535.1| protein product [Aspergillus oryzae]
  misc_feature (6)..(324): NCBI GI: 115388665 Blast Desc: conserved [Aspergillus terreus NIH2624] gi|114195922|gb|EAU37622.1| conserved [Aspergillus terreus NIH2624]
  misc_feature (1)..(316): NCBI GI: 70982021 Blast Desc: conserved [Aspergillus fumigatus Af293] gi|66844162|gb|EAL84501.1| conserved [Aspergillus fumigatus Af293]
  misc_feature (1)..(316): NCBI GI: 159122230 Blast Desc: conserved [Aspergillus fumigatus A1163]
  misc_feature (1)..(316): NCBI GI: 119487204 Blast Desc: NmrA-like family protein [Neosartorya fischeri NRRL 181] gi|119410614|gb|EAW20560.1| NmrA-like family protein [Neosartorya fischeri NRRL 181]
MVPDKKIIVVIGATGNQGGGVARTFLSLPNWHVRCVTRKPDSDKARLLTSLGAEVVKADLSDPVTLSPTLAGAHAIFLNTDFWEVWRPMMASGTDPVVCSQTAFDREVTNGKNLVDAAEKVETLERFVYSALPSLREINPDKTSRSFHPESKATIVKYIKEEKQKLAKKFSLFYAGAYMDNMLLSPQFNPKVGKHVMASPCPPTTKLNVLDPHTATGPFVRCLVEDEEPGVRLLAFNEDSYMSLQDFANVWSKVTGKEAMYMQLDADTMHKTLSVPYELLDALTNTPDTGYDVLEGAIRSHELRNKPKTQSWADWLREKESKSV

SEQ ID NO: 38211 - DNA, 352 bp, Muscodor strobelii
  misc_feature: SGI EST ID NO. CUFF.91630.0
  misc_feature: Variant of the nucleotide sequence at SEQ ID NO 38209
aggtcgagaccctggagcgatttgtgtactctgctctcccgtccctccgagaaatcaaccccgacaagacttcccgcagtttccaccctgagagcaaagcgactatcgtcaagtacatcaaggaagagaaacagaagctcgcgaagaagttctctcttttctacgccggggcatacatggataacatgctactcagcccgcagttcaatccgaaggtcggcaagcacgtcatggcgtcgccgtgcccaccaacgaccaagctgaacgttctcgatccgcacacggcgactggtccgttcgtgcgttgcctggtggaagatgaagagccgggtgtcaggctcctcgcgttcaa

SEQ ID NO: 38212 - DNA, 1383 bp, Muscodor strobelii
  misc_feature: SGI cDNA ID NO. 573274
  misc_feature: Encodes the peptide sequence at SEQ ID NO 38213
atgttaataccgcttcgaataccaatacaacagtacggcgataccgatgatggattgaagggtcgatggcatgccgtgtggcggcgcgagaccaacgactcaccaaatggacctcccagcacgcttattatcattgtcgtagtggttgctgttgtattcttcatcagtgccgccgcctgcatattcaccaagcgacgaagcaaaacacgatcgaaaggtcgcaccgccgcaggtaatctcgaaccgttaagtagtggaacgacatccactgcaaacaatagcagacgcttgaacacttcaagtacgactgaaaacaatcgcaacagcactgctaccgtcgatcggaatacatcggttcgatcgattatgaccttgccgaagtacaattttcaagtaaatgaaggcgaacaagtattaggtcgtgagggcgatcgcgatggtctcgatgtcattgtagatcatcccacagacgagcagcatgaggctctccgggacgaagagatggaggcaatgtaccagatccgacttacgagaagacaacaaaatgccgaacgggaagagagacgacgattaacatctgaggcaagagcgcgaggcgatgtcctagcattagaggaattgcgtgcccaaagacgcgctcaaacagagaataatgatgccgcgttaaatgaactccgcgagacacagaccgaagtccggtcacgacgtcaacgcgctgtatcgagcgtaagttatggcgacctaggcgttgcgagacacgatggctcccgccttcgcgcaaacagtacggagagtgaacgtgtcgggttattatcagatgccgcgagtatcgctcagtcgacgcgatccccgtccgcgcaatcgaatcgccgggtctcagacgtggggagcttagcagcatcgtcgtatcaccgctcaccatctgcacaatcgcataacaggatgcggagtgagagctcagttatgagtctcgatgagaacggcgacatagagccagtatcaggggccacgacaccgcgattaggcagctttcatacgcgtgcgggctcgagccccgaaattgtgacagaggcggatttaggcgacgatatgccgccacctgattacgaggatgtgagtcttgacgatgcgcggtcaggcgccacgacaccaatgatgattcatggcccaccgccggattacgaacactcggatcgaaggacgagtgagagcgatagcggtgatttgggaagtccgagcgacagcgacagtcagcattcatcgaggcggtcgtcgagaggtgtgggaggagttccacaattgcccagtctgaggattgggaatctaccgcagattgttattgagccgtccagttctgctcgacctagacagcaggaccggtga

SEQ ID NO: 38213 - protein, 460 aa, Muscodor strobelii
  misc_feature: SGI Peptide ID NO. 573274
  misc_feature (108)..(456): NCBI GI: 261355355 Blast Desc: conserved [Verticillium albo-atrum VaMs.102]
  misc_feature (74)..(460): NCBI GI: 256730634 Blast Desc: NECHADRAFT_30113 [Nectria haematococca mpVI 77-13-4]
  misc_feature (111)..(460): NCBI GI: 46109044 Blast Desc: FG01404.1 [Gibberella zeae PH-1]
  misc_feature (86)..(458): NCBI GI: 145614518 Blast Desc: MGG_04656 [Magnaporthe grisea 70-15] gi|145021426|gb|EDK05555.1| MGG_04656 [Magnaporthe grisea 70-15]
  misc_feature (101)..(451): NCBI GI: 154322230 Blast Desc: BC1G_01262 [Botryotinia fuckeliana B05.10] gi|150850509|gb|EDN25702.1| BC1G_01262 [Botryotinia fuckeliana B05.10]
  misc_feature (76)..(451): NCBI GI: 156060785 Blast Desc: SS1G_02535 [Sclerotinia sclerotiorum 1980] gi|154699939|gb|EDN99677.1| SS1G_02535 [Sclerotinia sclerotiorum 1980]
  misc_feature (108)..(455): NCBI GI: 171695852 Blast Desc: protein product [Podospora anserina] gi|170948168|emb|CAP60332.1| protein product [Podospora anserina]
  misc_feature (113)..(454): NCBI GI: 85119344 Blast Desc: NCU02945 [Neurospora crassa OR74A] gi|28927438|gb|EAA36391.1| [Neurospora crassa OR74A]
  misc_feature (35)..(385): NCBI GI: 116181434 Blast Desc: CHGG_01345 [Chaetomium globosum CBS 148.51] gi|88185642|gb|EAQ93110.1| CHGG_01345 [Chaetomium globosum CBS 148.51]
  misc_feature (89)..(303): NCBI GI: 169594742 Blast Desc: SNOG_00099 [Phaeosphaeria nodorum SN15] gi|111070474|gb|EAT91594.1| SNOG_00099 [Phaeosphaeria nodorum SN15]
MLIPLRIPIQQYGDTDDGLKGRWHAVWRRETNDSPNGPPSTLIIIVVVVAVVFFISAAACIFTKRRSKTRSKGRTAAGNLEPLSSGTTSTANNSRRLNTSSTTENNRNSTATVDRNTSVRSIMTLPKYNFQVNEGEQVLGREGDRDGLDVIVDHPTDEQHEALRDEEMEAMYQIRLTRRQQNAEREERRRLTSEARARGDVLALEELRAQRRAQTENNDAALNELRETQTEVRSRRQRAVSSVSYGDLGVARHDGSRLRANSTESERVGLLSDAASIAQSTRSPSAQSNRRVSDVGSLAASSYHRSPSAQSHNRMRSESSVMSLDENGDIEPVSGATTPRLGSFHTRAGSSPEIVTEADLGDDMPPPDYEDVSLDDARSGATTPMMIHGPPPDYEHSDRRTSESDSGDLGSPSDSDSQHSSRRSSRGVGGVPQLPSLRIGNLPQIVIEPSSSARPRQQDR

SEQ ID NO: 38214 - DNA, 2999 bp, Muscodor strobelii
  misc_feature: SGI EST ID NO. CUFF.91649.0
  misc_feature: Variant of the nucleotide sequence at SEQ ID NO 38212
atcgcttttgcctttaatgctacgctgctctagctgcagcagaggccgcgcgtgtggctttccctctctctagcccgccgctctctcggctgcatgtttctcacttttccgaatctcgtattcttgagttcctcaacttgtcgtcttcctgtctctgtagaacgtgaatgctgcgataggaattgagatacccacctccctggcccgcatactcatacccaaaagtgattatttctccgtacctaattgcaaggtcctaccataatatcttacgctggcagcgacgataagcagtgtacagaaaacaaattcagcccgcggattggcctggattgtctcacaaatcccctgagctgaatagcctgtgtgtgggagcgagcgcgacggctcgtgagttttgacatccgccgcatcaaccacccccatcaccaggcataccgagtatcccccactcgcattgaaacggcaccaaactctagtcaaagccgcgcgccgctcgaccatcagcgactgcgaccgcgactgcaaacaattaacggcgacacgacactcacgactctgtattattagcggcggcttttgcatctggtgcgatattcctgtgccttggacgcaggtccaattggcataccaggtcgttcagtttaattacaatcattcagcttgcttcagctctctgcatcaactgctagacaattaaagtgctgcttgcgaacggccgtccgttgtctagtcactcgttacatctattaacttcttccaaagcatattcacaatgttaataccgcttcgaataccaatacaacagtacggcgataccgatgatggattgaagggtcgatggcatgccgtgtggcggcgcgagaccaacgactcaccaaatggacctcccagcacgcttattatcattgtcgtagtggttgctgttgtattcttcatcagtgccgccgcctgcatattcaccaagcgacgaagcaaaacacgatcgaaaggtcgcaccgccgcaggtaatctcgaaccgttaagtagtggaacgacatccactgcaaacaatagcagacgcttgaacacttcaagtacgactgaaaacaatcgcaacagcactgctaccgtcgatcggaatacatcggttcgatcgattatgaccttgccgaagtacaattttcaagtaaatgaaggcgaacaagtattaggtcgtgagggcgatcgcgatggtctcgatgtcattgtagatcatcccacagacgagcagcatgaggctctccgggacgaagagatggaggcaatgtaccagatccgacttacgagaagacaacaaaatgccgaacgggaagagagacgacgattaacatctgaggcaagagcgcgaggcgatgtcctagcattagaggaattgcgtgcccaaagacgcgctcaaacagagaataatgatgccgcgttaaatgaactccgcgagacacagaccgaagtccggtcacgacgtcaacgcgctgtatcgagcgtaagttatggcgacctaggcgttgcgagacacgatggctcccgccttcgcgcaaacagtacggagagtgaacgtgtcgggttattatcagatgccgcgagtatcgctcagtcgacgcgatccccgtccgcgcaatcgaatcgccgggtctcagacgtggggagcttagcagcatcgtcgtatcaccgctcaccatctgcacaatcgcataacaggatgcggagtgagagctcagttatgagtctcgatgagaacggcgacatagagccagtatcaggggccacgacaccgcgattaggcagctttcatacgcgtgcgggctcgagccccgaaattgtgacagaggcggatttaggcgacgatatgccgccacctgattacgaggatgtgagtcttgacgatgcgcggtcaggcgccacgacaccaatgatgattcatggcccaccgccggattacgaacactcggatcgaaggacgagtgagagcgatagcggtgatttgggaagtccgagcgacagcgacagtcagcattcatcgaggcggtcgtcgagaggtgtgggaggagttccacaattgcccagtctgaggattgggaatctaccgcagattgttattgagccgtccagttctgctcgacctagacagcaggaccggtgatgtggctcatgagaaatggcacccatttcagagacacagacataactatgttttgcttgcggcaaagtatgagaatgtctcaccgaaggactgtcgcaagaacaatcgaatccgagacatcaaaacttgatagattgagatctatgaaacgtagattctagggaacccaaataaagctcctcagagcctacatgacgaatcatcgccaaacatctaacgattaattatggaacaagcgagcaacagagtaatacttcacaaatttttggacaccacacacattccatagcgcttgacatgcagctctgtaacatcacaagatatcattttcgggaatgggaaatgtcactagcataacaagcatggcacgagtaacaggacaggcctttttggtctcgaaatacgagactcgtttttctaggcgataagtagggttcctcgcgcagagtctattgtaagggccctcgagatctgacgaaaacggtttcgagaggagaggagaagcaagatggtgctaaagaacctgcattcgatagggagatggatgtaatatcacatgaaaagagcgacgtgaagaatgagatatgcatagctttgggcttgggaacactgagatggatgaacgttggatgagaaacgtgggctctcgcgattgaagggagttctgtaggaggaatatagatatctatctatttgaatctagcttctttgatgctgaacgtaacatgagttgatcatctatccaggtgaatggtttgcgaaacgtacgtatcggtacataattgtgtgtagagagtggaaatacctgcgggaagttggctagccaccccatgaacatgca

SEQ ID NO: 38215 - DNA, 1308 bp, Muscodor strobelii
  misc_feature: SGI cDNA ID NO. 573275
  misc_feature: Encodes the peptide sequence at SEQ ID NO 38216
atggcggttcgtccaggtgaggagaacgttgccactctttttggagatgtccattacttttacggaccacccgatgccaaacctccacatcaccgttttgacaagggatcatatgtctatctcttcgaaaacgcaaatgatcgtcgggcgcgcattgagatagcgaatcagcctgggaccgatgaccaagatgcctttgacggattcctagacagaacacaagtgcgctactcatatcgtcaacagtgtcttgtgaccatcactgttgaaggcgctgtagggccaccgatcgacccaagccagtggcatcttcctacgtatgatccgcgaaacgaaaacaagtatcactacaagctacattcggtcgaaatatacttctggacacaagacgatgccctacaatttgtcaatggcgtgagacgagtcttgcctcctcagcaagttgaggtggctgacgaacctgccccgccatctcactcccatgctcactcacaagatatccatccgctagtacaaaagcttgagaaggccgccatatcgggctcaaacccgcagcaagcagatgctccttcatttgctccgccgccaactacaggatcaagcggtcagaatgactcgcctcagagctttgccccgatggcatacaatccggctgccccaccagctgcggagcaatataggcacagagagaaaacaccaccaccagaagatgacgggaatcatcccttagttgcagcgatggctcgtgatcaagcagggccattctcacctggatatggacaaacgaccttctctgctcctcctggaacggccggtctccctcctccaacatacggaggtctgacaagcccaggtctaccgacgccaggcatagcaagtcccggctttccaccgtcacagtatgcgcatctaccgcgctcagtgacaatgccggctaccgggttagcttcacccggtctaacgagcccgtacggcgccaattttcccggcacgccgggcttcgctcctccaccaacttcacaaacccaacaacatactccccatcctgtgcaaagcccaggcctcccacctccacctcccggtggctactcacaatacaactaccaaaatacgcctcagcaggcgagcatggactataacattcatcagcaagtgtaccggccaacagaacaggagcacagcttggcggccaaatataacggatacaagcccaaacccgaaggtcagagtaaactgggggagaatgcacagaggctcgagaagggtgtatctggaatgctgaagaagtttgagaagaagtttgggtag

SEQ ID NO: 38216 - protein, 435 aa, Muscodor strobelii
  misc_feature: SGI Peptide ID NO. 573275
  misc_feature (1)..(435): NCBI GI: 39945346 Blast Desc: MGG_04655 [Magnaporthe grisea 70-15] gi|145021427|gb|EDK05556.1| MGG_04655 [Magnaporthe grisea 70-15]
  misc_feature (14)..(435): NCBI GI: 171695862 Blast Desc: protein product [Podospora anserina] gi|170948173|emb|CAP60337.1| protein product [Podospora anserina]
  misc_feature (1)..(435): NCBI GI: 256730633 Blast Desc: NECHADRAFT_30275 [Nectria haematococca mpVI 77-13-4]
  misc_feature (1)..(435): NCBI GI: 46109046 Blast Desc: FG01405.1 [Gibberella zeae PH-1]
  misc_feature (1)..(435): NCBI GI: 116181442 Blast Desc: CHGG_01349 [Chaetomium globosum CBS 148.51] gi|88185646|gb|EAQ93114.1| CHGG_01349 [Chaetomium globosum CBS 148.51]
  misc_feature (1)..(434): NCBI GI: 85119364 Blast Desc: NCU02950 [Neurospora crassa OR74A] gi|28927443|gb|EAA36396.1| [Neurospora crassa OR74A] gi|38566942|emb|CAE76244.1| [Neurospora crassa]
  misc_feature (1)..(342): NCBI GI: 154321912 Blast Desc: BC1G_01103 [Botryotinia fuckeliana B05.10] gi|150850350|gb|EDN25543.1| BC1G_01103 [Botryotinia fuckeliana B05.10]
  misc_feature (1)..(342): NCBI GI: 156061021 Blast Desc: SS1G_02653 [Sclerotinia sclerotiorum 1980] gi|154700057|gb|EDN99795.1| SS1G_02653 [Sclerotinia sclerotiorum 1980]
  misc_feature (8)..(434): NCBI GI: 169594744 Blast Desc: SNOG_00100 [Phaeosphaeria nodorum SN15] gi|160700928|gb|EAT91595.2| SNOG_00100 [Phaeosphaeria nodorum SN15]
  misc_feature (6)..(434): NCBI GI: 189201924 Blast Desc: conserved [Pyrenophora tritici-repentis Pt-1C-BFP] gi|187984397|gb|EDU49885.1| conserved [Pyrenophora tritici-repentis Pt-1C-BFP]
MAVRPGEENVATLFGDVHYFYGPPDAKPPHHRFDKGSYVYLFENANDRRARIEIANQPGTDDQDAFDGFLDRTQVRYSYRQQCLVTITVEGAVGPPIDPSQWHLPTYDPRNENKYHYKLHSVEIYFWTQDDALQFVNGVRRVLPPQQVEVADEPAPPSHSHAHSQDIHPLVQKLEKAAISGSNPQQADAPSFAPPPTTGSSGQNDSPQSFAPMAYNPAAPPAAEQYRHREKTPPPEDDGNHPLVAAMARDQAGPFSPGYGQTTFSAPPGTAGLPPPTYGGLTSPGLPTPGIASPGFPPSQYAHLPRSVTMPATGLASPGLTSPYGANFPGTPGFAPPPTSQTQQHTPHPVQSPGLPPPPPGGYSQYNYQNTPQQASMDYNIHQQVYRPTEQEHSLAAKYNGYKPKPEGQSKLGENAQRLEKGVSGMLKKFEKKFG

SEQ ID NO: 38217 - DNA, 1606 bp, Muscodor strobelii
  misc_feature: SGI EST ID NO. CUFF.91895.0
  misc_feature: Variant of the nucleotide sequence at SEQ ID NO 38215
agctggctcaccaagttctcgtgtcgcattgcatattgaagtttgcggtcgaccgtgcttgtattctaattttgctattgaaacattttgtacccgattcctgtcatcaataggtgtgaaaatagcgcccatttctatattgggccttccaagatcttttgcgacgagatggcggttcgtccaggtgaggagaacgttgccactctttttggagatgtccattacttttacggaccacccgatgccaaacctccacatcaccgttttgacaagggatcatatgtctatctcttcgaaaacgcaaatgatcgtcgggcgcgcattgagatagcgaatcagcctgggaccgatgaccaagatgcctttgacggattcctagacagaacacaagtgcgctactcatatcgtcaacagtgtcttgtgaccatcactgttgaaggcgctgtagggccaccgatcgacccaagccagtggcatcttcctacgtatgatccgcgaaacgaaaacaagtatcactacaagctacattcggtcgaaatatacttctggacacaagacgatgccctacaatttgtcaatggcgtgagacgagtcttgcctcctcagcaagttgaggtggctgacgaacctgccccgccatctcactcccatgctcactcacaagatatccatccgctagtacaaaagcttgagaaggccgccatatcgggctcaaacccgcagcaagcagatgctccttcatttgctccgccgccaactacaggatcaagcggtcagaatgactcgcctcagagctttgccccgatggcatacaatccggctgccccaccagctgcggagcaatataggcacagagagaaaacaccaccaccagaagatgacgggaatcatcccttagttgcagcgatggctcgtgatcaagcagggccattctcacctggatatggacaaacgaccttctctgctcctcctggaacggccggtctccctcctccaacatacggaggtctgacaagcccaggtctaccgacgccaggcatagcaagtcccggctttccaccgtcacagtatgcgcatctaccgcgctcagtgacaatgccggctaccgggttagcttcacccggtctaacgagcccgtacggcgccaattttcccggcacgccgggcttcgctcctccaccaacttcacaaacccaacaacatactccccatcctgtgcaaagcccaggcctcccacctccacctcccggtggctactcacaatacaactaccaaaatacgcctcagcaggcgagcatggactataacattcatcagcaagtgtaccggccaacagaacaggagcacagcttggcggccaaatataacggatacaagcccaaacccgaaggtcagagtaaactgggggagaatgcacagaggctcgagaagggtgtatctggaatgctgaagaagtttgagaagaagtttgggtagaatcatatctgtatgttcgaatatgctcataatgacaacaaatgacatcgatatgatatctcggtatcgtgaagtaggtacgaattcttacatagtacgcgttaaaggtagcaatgatgtcccatactca

SEQ ID NO: 38218 - DNA, 489 bp, Muscodor strobelii
  misc_feature: SGI cDNA ID NO. 573276
  misc_feature: Reduced expression when VOC is produced
  misc_feature: Encodes the peptide sequence at SEQ ID NO 38219
atgtcgatgctcaatgtctgccacatggtctcgcacctacaaaatgcgtccaaagccaagctgggcttaacatccgtcaaacacacaaaatataacctatctatcgctttggctcttcaccgcgcaggattcctctccttcgtcacacggggcgggcctcagccaccggatccggctacaatcgcgactttccaacccgaacctctgaccaccgccaatgctgcgacacaacgtctgtggctgggcttaaagtacaacgagaacaggcctgtgctcggatctgcgagttccatctcaacgcctggtcgatacatcactgcaaacctgcctgcgcttgagagacttgtgagagggttcgatgcaagtcatcaaaagggtttagatctgggagagtgcatattcctgggcacggatagaggtaccttagaggccagagaagccgtcgcaaggaaacttgggggcacactgttgtgtcgtgtcgggccttaa

SEQ ID NO: 38219 - protein, 162 aa, Muscodor strobelii
  misc_feature: SGI Peptide ID NO. 573276
  misc_feature (1)..(160): NCBI GI: 145614520 Blast Desc: MGG_11377 [Magnaporthe grisea 70-15] gi|145021428|gb|EDK05557.1| MGG_11377 [Magnaporthe grisea 70-15]
  misc_feature (1)..(160): NCBI GI: 164427604 Blast Desc: NCU02951 [Neurospora crassa OR74A] gi|157071812|gb|EAA36397.2| NCU02951 [Neurospora crassa OR74A]
  misc_feature (1)..(160): NCBI GI: 171695860 Blast Desc: protein product [Podospora anserina] gi|170948172|emb|CAP60336.1| protein product [Podospora anserina]
  misc_feature (2)..(160): NCBI GI: 256730639 Blast Desc: [Nectria haematococca mpVI 77-13-4]
  misc_feature (2)..(153): NCBI GI: 46109024 Blast Desc: FG01394.1 [Gibberella zeae PH-1]
  misc_feature (1)..(139): NCBI GI: 38566943 Blast Desc: conserved [Neurospora crassa]
  misc_feature (1)..(160): NCBI GI: 116181444 Blast Desc: CHGG_01350 [Chaetomium globosum CBS 148.51] gi|88185647|gb|EAQ93115.1| CHGG_01350 [Chaetomium globosum CBS 148.51]
  misc_feature (1)..(160): NCBI GI: 154321914 Blast Desc: BC1G_01104 [Botryotinia fuckeliana B05.10] gi|150850351|gb|EDN25544.1| BC1G_01104 [Botryotinia fuckeliana B05.10]
  misc_feature (1)..(160): NCBI GI: 70991561 Blast Desc: 40S ribosomal protein S8 [Aspergillus fumigatus Af293] gi|66848262|gb|EAL88591.1| 40S ribosomal protein S8 [Aspergillus fumigatus Af293] gi|159124188|gb|EDP49306.1| 40S ribosomal S8
  misc_feature (1)..(160): NCBI GI: 119468332 Blast Desc: 40S ribosomal protein S8 [Neosartorya fischeri NRRL 181] gi|119406007|gb|EAW15958.1| 40S ribosomal protein S8 [Neosartorya fischeri NRRL 181]
  misc_feature: Useful for introducing or modulating the production of volatile compounds
MSMLNVCHMVSHLQNASKAKLGLTSVKHTKYNLSIALALHRAGFLSFVTRGGPQPPDPATIATFQPEPLTTANAATQRLWLGLKYNENRPVLGSASSISTPGRYITANLPALERLVRGFDASHQKGLDLGECIFLGTDRGTLEAREAVARKLGGTLLCRVGP

SEQ ID NO: 38220 - DNA, 1274 bp, Muscodor strobelii
  misc_feature: SGI EST ID NO. CUFF.91651.0
  misc_feature: Variant of the nucleotide sequence at SEQ ID NO 38218
gattttcaaaggcgcatcagaatcagcacgacaacgtcaacgagcaatctagctcacgggcggatctatcacgagcattgccagcgcgaccccgactccctttgtcactttgactagttcaaaactcatcaaaacaccacactcggcgcccgttgatacctgttcacactctgacgcgactacaatttctcctcgactcgacgacagcagcaggccaccagcctcataccgcccattgagggctcgctcatctacaccgaagagacagtctcgcgcaggctcatttctctcctcataaggcgccaaaatgtcgatgctcaatgtctgccacatggtctcgcacctacaaaatgcgtccaaagccaagctgggcttaacatccgtcaaacacacaaaatataacctatctatcgctttggctcttcaccgcgcaggattcctctccttcgtcacacggggcgggcctcagccaccggatccggctacaatcgcgactttccaacccgaacctctgaccaccgccaatgctgcgacacaacgtctgtggctgggcttaaagtacaacgagaacaggcctgtgctcggatctgcgagttccatctcaacgcctggtcgatacatcactgcaaacctgcctgcgcttgagagacttgtgagagggttcgatgcaagtcatcaaaagggtttagatctgggagagtgcatattcctgggcacggatagaggtaccttagaggccagagaagccgtcgcaaggaaacttgggggcacactgttgtgtcgtgtcgggccttaaagatgatgcagtcaatcagagtggaatgacaaagcgactcgtgggagagatatgaagggccggtgttcgagtcgtgcataaatagaacggctctgcgattgctctatcggcggaggcgcgaccgtcgcctcgacgctgccggtgcactggttctgcgctatagaggagcaatcgttgtcgtcctccccagcaaagtgtatatatatgtgtgtgtggacatcattttagcggctgcattccagcccgaggcagagatacctgtctctgacttggccaattgtataatagtaagaaaaattgtacaagctacgggacacggcaagaaaggaagaatcagttgcatgtccattatcattcaacccttggtaatcttttcctcaagagagcaaatttaaagtgttcatacacgggtaggcacttccaatgttgcgtttgtggtgaacttgaaggcgccatacaggtatctgatgaagcccca

SEQ ID NO: 38221 - DNA, 2100 bp, Muscodor strobelii
  misc_feature: SGI cDNA ID NO. 573277
  misc_feature: Elevated expression when VOC is produced
  misc_feature: Encodes the peptide sequence at SEQ ID NO 38222
atggatgggcccgacggaaacgggatcgatcttccggtcttcgatagaggtggaccgccgcctgcttatgcgacgagccagcgagcagacaatgataatgcctctcgccctccaagctttacaacaactgtccacaacccaaaagatgtcatcgttaggtcgcgatggcctcttttagccgtactggtttacgttagtctggcccttttttcctgggtcatcactctgatagtgacgcggagaccgctcggcattagctcttacggtgcgtctatcgagcaatataaaagttattactcgcatactatcaaggacatttacgtgcatagcgaggccgtctataaagccgcgcgcggtgtccaggctgtcgtaagcatcctcactaatattttgaccaccactatctgttgccgggccgtaattatctacatccagaggaccaatgccataacacgaagcgaagtcttcgcgttgtcggacgaaagacggttgtggtcgggcgtcaacttgagaatacctgcgaactggagatggatgttgttgtacgccgttgtattggtgctcgtcggaagtgccattccgccgttacaaggtctgttcctatcgacaaaggcgatgaagatgccaacgcatccaagaacagtggcgacggtacccgacttgatcacacaattcccatatgacaggggtggtcatggcctaccagacgacgaagggctcacaacgctcctgatgagaaaccgattggcttccacaaggtctacgactatccagcctctactttggcagaggaatagaacgtgtgatgcgcaatctggttatgaatattatgatttttgccaatctggcattggctctctaagtcttgttaacgtgtcagccctcgaggattcattttacagtccagtcgcgccatccatcacgacaggtatgctccgtcagttcgccacaaggattaactcgacagcccaccggcaaactatcgaggcgagcgcgtttcctgaaaactgtgctgaactgccggacagcttgtacattaatcgccagaacagttcgatagagttggacagtaaaccatggagttgggggcttgtcgtgtgcatgcctggtaaccaggcggcgtccccgtggacagatacagcgagacgccaagatttcactgaggagctttatttgcgcatcgatctcaacccgaccattagaacccagtatatcgatccgggaacacactacataaagattacagtcgacacaagtgctggatacttcgaattgccaaatttcatgaacaatgacgttgcaggacctctactagtagacggccctgaggactgcggacggctttgcaaaaaccagctccccggttcctcaagtggacgctggggttggtctaccgatgggattgaaaacactcacacgagcgacccacgccgaggggactctgggcgcaatattccgccaccggcggattgggacgacaataaggatgcctctatatcgaatcagtggaacaagggcccattgctgctcacgaccctggccctctttggcaacgggtcgttcattgatacgcgccaggtgctaagcttgtatcagcgtgatctgtatttcgaccagaactcctcatcggattctgacctcggaagtgattttccccggagaaactattgccaggacatcgcccccttcacgttcctgttacgtgatgcaggagggaataatctctgggatgctctcctcgacccctgcgtcaacgtcgagttctcaacggctgagaccatccaggttgatactattctgagctatctatggcagttcgtcgacgcgacgcttgatggtccagagagggtccagaacgcttttaccgccgctgcgttcctggctgccgaggtgtggatgtcccatccagcgacgtctcaatggttgactgtctactctgatcttggctccgacaccgacatccgtgtccctgtcatctcttttgctggcgagatcatcatctcagtttttcttgggctgtatattattgggatcagtgctgttgcgctgtattgtacagggacttttcgttattataatggtagtttagtattatattga

SEQ ID NO: 38222 - protein, 699 aa, Muscodor strobelii
  misc_feature: SGI Peptide ID NO. 573277
  misc_feature (20)..(685): NCBI GI: 70983151 Blast Desc: conserved [Aspergillus fumigatus Af293] gi|66844728|gb|EAL85065.1| conserved [Aspergillus fumigatus Af293]
  misc_feature (20)..(685): NCBI GI: 119483642 Blast Desc: NFIA_094470 [Neosartorya fischeri NRRL 181] gi|119409880|gb|EAW19827.1| conserved [Neosartorya fischeri NRRL 181]
  misc_feature (50)..(669): NCBI GI: 255942106 Blast Desc: Pc16g15290 [Penicillium chrysogenum Wisconsin 54-1255] gi|211586445|emb|CAP94199.1| Pc16g15290 [Penicillium chrysogenum Wisconsin 54-1255]
  misc_feature (50)..(670): NCBI GI: 255943603 Blast Desc: Pc20g00050 [Penicillium chrysogenum Wisconsin 54-1255] gi|211587304|emb|CAP85334.1| Pc20g00050 [Penicillium chrysogenum Wisconsin 54-1255]
  misc_feature (47)..(458): NCBI GI: 238495104 Blast Desc: AFLA_060440 [Aspergillus flavus NRRL3357] gi|220695438|gb|EED51781.1| AFLA_060440 [Aspergillus flavus NRRL3357]
  misc_feature (20)..(452): NCBI GI: 159123988 Blast Desc: conserved [Aspergillus fumigatus A1163]
  misc_feature (58)..(691): NCBI GI: 212539628 Blast Desc: conserved [Penicillium marneffei ATCC 18224] gi|210067268|gb|EEA21360.1| conserved [Penicillium marneffei ATCC 18224]
  misc_feature (19)..(685): NCBI GI: 145239193 Blast Desc: An08g01250 [Aspergillus niger] gi|134076747|emb|CAK39806.1| protein product [Aspergillus niger]
  misc_feature (61)..(684): NCBI GI: 145240903 Blast Desc: An08g09900 [Aspergillus niger] gi|134077622|emb|CAK96766.1| protein product [Aspergillus niger]
  misc_feature (116)..(685): NCBI GI: 242815076 Blast Desc: TSTA_104750 [Talaromyces stipitatus ATCC 10500] gi|218714838|gb|EED14261.1| TSTA_104750 [Talaromyces stipitatus ATCC 10500]
  misc_feature: Useful for introducing or modulating the production of volatile compounds
MDGPDGNGIDLPVFDRGGPPPAYATSQRADNDNASRPPSFTTTVHNPKDVIVRSRWPLLAVLVYVSLALFSWVITLIVTRRPLGISSYGASIEQYKSYYSHTIKDIYVHSEAVYKAARGVQAVVSILTNILTTTICCRAVIIYIQRTNAITRSEVFALSDERRLWSGVNLRIPANWRWMLLYAVVLVLVGSAIPPLQGLFLSTKAMKMPTHPRTVATVPDLITQFPYDRGGHGLPDDEGLTTLLMRNRLASTRSTTIQPLLWQRNRTCDAQSGYEYYDFCQSGIGSLSLVNVSALEDSFYSPVAPSITTGMLRQFATRINSTAHRQTIEASAFPENCAELPDSLYINRQNSSIELDSKPWSWGLVVCMPGNQAASPWTDTARRQDFTEELYLRIDLNPTIRTQYIDPGTHYIKITVDTSAGYFELPNFMNNDVAGPLLVDGPEDCGRLCKNQLPGSSSGRWGWSTDGIENTHTSDPRRGDSGRNIPPPADWDDNKDASISNQWNKGPLLLTTLALFGNGSFIDTRQVLSLYQRDLYFDQNSSSDSDLGSDFPRRNYCQDIAPFTFLLRDAGGNNLWDALLDPCVNVEFSTAETIQVDTILSYLWQFVDATLDGPERVQNAFTAAAFLAAEVWMSHPATSQWLTVYSDLGSDTDIRVPVISFAGEIIISVFLGLYIIGISAVALYCTGTFRYYNGSLVLY

SEQ ID NO: 38223 - DNA, 2525 bp, Muscodor strobelii
  misc_feature: SGI EST ID NO. CUFF.91664.0
  misc_feature: Variant of the nucleotide sequence at SEQ ID NO 38221
gctatctctaggttcttactctcttctaatcggcatgaggcgtcatgccgttagagatccactcaatctataggcgtgagccggattggtcttgaacaactacctattcggagtcggtgggtaggttgacggcaggccagaccgggcacgcgcacgttgggctattcatcctgtcttaatgctcatttgttattgtacggtgcttccgttctccgttgcgagacatcgcaacatctttactatttcatccacgccatgtcacattagcgaaaagacgatggtgattaaaaacccggacgtcccccccgcaccccgtgcatctgcggagggaaaaatggctcctattgttctacaggacattcccagaactccggctcggtcgtacgctaggcacctcgaagatggatgggcccgacggaaacgggatcgatcttccggtcttcgatagaggtggaccgccgcctgcttatgcgacgagccagcgagcagacaatgataatgcctctcgccctccaagctttacaacaactgtccacaacccaaaagatgtcatcgttaggtcgcgatggcctcttttagccgtactggtttacgttagtctggcccttttttcctgggtcatcactctgatagtgacgcggagaccgctcggcattagctcttacggtgcgtctatcgagcaatataaaagttattactcgcatactatcaaggacatttacgtgcatagcgaggccgtctataaagccgcgcgcggtgtccaggctgtcgtaagcatcctcactaatattttgaccaccactatctgttgccgggccgtaattatctacatccagaggaccaatgccataacacgaagcgaagtcttcgcgttgtcggacgaaagacggttgtggtcgggcgtcaacttgagaatacctgcgaactggagatggatgttgttgtacgccgttgtattggtgctcgtcggaagtgccattccgccgttacaaggtctgttcctatcgacaaaggcgatgaagatgccaacgcatccaagaacagtggcgacggtacccgacttgatcacacaattcccatatgacaggggtggtcatggcctaccagacgacgaagggctcacaacgctcctgatgagaaaccgattggcttccacaaggtctacgactatccagcctctactttggcagaggaatagaacgtgtgatgcgcaatctggttatgaatattatgatttttgccaatctggcattggctctctaagtcttgttaacgtgtcagccctcgaggattcattttacagtccagtcgcgccatccatcacgacaggtatgctccgtcagttcgccacaaggattaactcgacagcccaccggcaaactatcgaggcgagcgcgtttcctgaaaactgtgctgaactgccggacagcttgtacattaatcgccagaacagttcgatagagttggacagtaaaccatggagttgggggcttgtcgtgtgcatgcctggtaaccaggcggcgtccccgtggacagatacagcgagacgccaagatttcactgaggagctttatttgcgcatcgatctcaacccgaccattagaacccagtatatcgatccgggaacacactacataaagattacagtcgacacaagtgctggatacttcgaattgccaaatttcatgaacaatgacgttgcaggacctctactagtagacggccctgaggactgcggacggctttgcaaaaaccagctccccggttcctcaagtggacgctggggttggtctaccgatgggattgaaaacactcacacgagcgacccacgccgaggggactctgggcgcaatattccgccaccggcggattgggacgacaataaggatgcctctatatcgaatcagtggaacaagggcccattgctgctcacgaccctggccctctttggcaacgggtcgttcattgatacgcgccaggtgctaagcttgtatcagcgtgatctgtatttcgaccagaactcctcatcggattctgacctcggaagtgattttccccggagaaactattgccaggacatcgcccccttcacgttcctgttacgtgatgcaggagggaataatctctgggatgctctcctcgacccctgcgtcaacgtcgagttctcaacggctgagaccatccaggttgatactattctgagctatctatggcagttcgtcgacgcgacgcttgatggtccagagagggtccagaacgcttttaccgccgctgcgttcctggctgccgaggtgtggatgtcccatccagcgacgtctcaatggttgactgtctactctgatcttggctccgacaccgacatccgtgtccctgtcatctcttttgctggcgagatcatcatctcagtttttcttgggctgtatattattgggatcagtgctgttgcgctgtattgtacagggacttttcgttattataatggtagtttagtattatattgaccttatgaatactatgaatttggt

SEQ ID NO: 38224 - DNA, 990 bp, Muscodor strobelii
  misc_feature: SGI cDNA ID NO. 573278
  misc_feature: Reduced expression when VOC is produced
  misc_feature: Encodes the peptide sequence at SEQ ID NO 38225
atggcctcatcacgtgtcctaaggatcggtctcattcccggcgacggcatcggccgcgaagtgatcccggccggccgacgaattcttgaagccctcccctcctcactaggcctgaaattcgatttcaccgacctcgacgccggcttcgagacctttcagaagaccggcgcggccctcccagacaaaactggctactcctcgcccatcgtagcactgcgcaaaaaactcgacctcttcgccaacgttcgcccagtaaaatcagtccgcactgcgcaaaaaccaatcgacatggtcatagtccgggagaataccgaagacctctacgtgaaagaggagacaacccaaacctcggagaaatacggcggtatctatgctgaagccattaagcgcatttctggccgagcctcaacccgtatcgctactatagccggtgaaatcgcgcagcgccgcgctctggccgatgataaactgcacgctgtgcccactgttacaataacgcataaaagcaacgtcctgtcccaaactgatgggctattccgcacctccgcccgcgctgctctcgaaaaattcgatggggtcaaaatccaagagcagattgttgattcgatggtctataaactcttccgccaacccgaagactacgacgtcatcgtcgcgcccaacctgtacggcgacatcctctctgacggtgccgcagcattagtcggtagtcttggtctagtccccagcgcgaatgtaggcgatggtttcgcgatcggcgagccgtgtcatggctccgccccagatatcgagggccagggaatcgcaaaccccattgccacgctccggagcactgccttgatgctggagttccttggtgcgagggaggccgcacagcttatctacaaggctgttgatgcgaatctcgaagagggacatctactcagcccggatcttggtggaaaggcgaagacggaggaggttgttgttgatattcttaagcgattgtaa

SEQ ID NO: 38225 - protein, 329 aa, Muscodor strobelii
  misc_feature: SGI Peptide ID NO. 573278
  misc_feature (8)..(325): Pfam Id: PF00180 Pfam Desc: Isocitrate/isopropylmalate dehydrogenase
  misc_feature (67)..(325): Pfam Id: PF00180 Pfam Desc: Isocitrate/isopropylmalate dehydrogenase
  misc_feature (8)..(63): Pfam Id: PF00180 Pfam Desc: Isocitrate/isopropylmalate dehydrogenase
  misc_feature (3)..(329): NCBI GI: 46109020 Blast Desc: FG01392.1 [Gibberella zeae PH-1]
  misc_feature (1)..(329): NCBI GI: 119468338 Blast Desc: isocitrate dehydrogenase LysB [Neosartorya fischeri NRRL 181] gi|119406010|gb|EAW15961.1| isocitrate dehydrogenase LysB [Neosartorya fischeri NRRL 181]
  misc_feature (1)..(329): NCBI GI: 70991567 Blast Desc: isocitrate dehydrogenase LysB [Aspergillus fumigatus Af293] gi|66848265|gb|EAL88594.1| isocitrate dehydrogenase LysB [Aspergillus fumigatus Af293]
  misc_feature (3)..(329): NCBI GI: 85117930 Blast Desc: homoisocitrate dehydrogenase, mitochondrial precursor [Neurospora crassa OR74A] gi|28927149|gb|EAA36105.1| homoisocitrate dehydrogenase, mitochondrial precursor [Neurospora
  misc_feature (1)..(329): NCBI GI: 159124191 Blast Desc: isocitrate dehydrogenase LysB [Aspergillus fumigatus A1163]
  misc_feature (1)..(329): NCBI GI: 171695856 Blast Desc: protein product [Podospora anserina] gi|170948170|emb|CAP60334.1| protein product [Podospora anserina]
  misc_feature (1)..(329): NCBI GI: 119178369 Blast Desc: CIMG_08027 [Coccidioides immitis RS] gi|240104842|gb|EER23037.1| dehydrogenase, isocitrate/isopropylmalate family protein [Coccidioides posadasii
  misc_feature (1)..(329): NCBI GI: 67538072 Blast Desc: AN5206.2 [Aspergillus nidulans FGSC A4] gi|40743197|gb|EAA62387.1| AN5206.2 [Aspergillus nidulans FGSC A4] gi|50083229|gb|AAT70209.1| lysB [Emericella nidulans] TPA: ;
  misc_feature (1)..(329): NCBI GI: 115390729 Blast Desc: homoisocitrate dehydrogenase, mitochondrial precursor [Aspergillus terreus NIH2624] gi|114193793|gb|EAU35493.1| homoisocitrate dehydrogenase, mitochondrial precursor terreus
  misc_feature (2)..(329): NCBI GI: 145250547 Blast Desc: An15g02490 [Aspergillus niger] gi|134082308|emb|CAL00403.1| protein product [Aspergillus niger]
  misc_feature (2)..(329): SWISSPROT Homolog: EC 1.1.1.87 Homoisocitrate dehydrogenase
  misc_feature: Useful for introducing or modulating the production of volatile compounds
MASSRVLRIGLIPGDGIGREVIPAGRRILEALPSSLGLKFDFTDLDAGFETFQKTGAALPDKTGYSSPIVALRKKLDLFANVRPVKSVRTAQKPIDMVIVRENTEDLYVKEETTQTSEKYGGIYAEAIKRISGRASTRIATIAGEIAQRRALADDKLHAVPTVTITHKSNVLSQTDGLFRTSARAALEKFDGVKIQEQIVDSMVYKLFRQPEDYDVIVAPNLYGDILSDGAAALVGSLGLVPSANVGDGFAIGEPCHGSAPDIEGQGIANPIATLRSTALMLEFLGAREAAQLIYKAVDANLEEGHLLSPDLGGKAKTEEVVVDILKRL

SEQ ID NO: 38226 - DNA, 1312 bp, Muscodor strobelii
  misc_feature: SGI EST ID NO. CUFF.91668.0
  misc_feature: Variant of the nucleotide sequence at SEQ ID NO 38224
ttcgaacccaacaatttttcgtagtcattcgtcacagccgcgatagcttcaacagccgctgcaccaccacccaattgacctgaaaaaatggcctcatcacgtgtcctaaggatcggtctcattcccggcgacggcatcggccgcgaagtgatcccggccggccgacgaattcttgaagccctcccctcctcactaggcctgaaattcgatttcaccgacctcgacgccggcttcgagacctttcagaagaccggcgcggccctcccagacaaaactgtcgatatcctaaaaaaatgaatgcgacggagctctcttcggcgccgtatcttcgccaacaaccgcagtcaagggctactcctcgcccatcgtagcactgcgcaaaaaactcgacctcttcgccaacgttcgcccagtaaaatcagtccgcactgcgcaaaaaccaatcgacatggtcatagtccgggagaataccgaagacctctacgtgaaagaggagacaacccaaacctcggagaaatacggcggtatctatgctgaagccattaagcgcatttctggccgagcctcaacccgtatcgctactatagccggtgaaatcgcgcagcgccgcgctctggccgatgataaactgcacgctgtgcccactgttacaataacgcataaaagcaacgtcctgtcccaaactgatgggctattccgcacctccgcccgcgctgctctcgaaaaattcgatggggtcaaaatccaagagcagattgttgattcgatggtctataaactcttccgccaacccgaagactacgacgtcatcgtcgcgcccaacctgtacggcgacatcctctctgacggtgccgcagcattagtcggtagtcttggtctagtccccagcgcgaatgtaggcgatggtttcgcgatcggcgagccgtgtcatggctccgccccagatatcgagggccagggaatcgcaaaccccattgccacgctccggagcactgccttgatgctggagttccttggtgcgagggaggccgcacagcttatctacaaggctgttgatgcgaatctcgaagagggacatctactcagcccggatcttggtggaaaggcgaagacggaggaggttgttgttgatattcttaagcgattgtaaaagacatacgcatcgttttgggttacctagggacgttgaagagctagatggttctaagatgagatgaaaacttggtgcgattctcgtacgcgtgaaaatgtaaaagtagatagaacaaaattactaagaacgataccctctatttcaatttccatgtctcca

SEQ ID NO: 38227 - DNA, 1902 bp, Muscodor strobelii
  misc_feature: SGI cDNA ID NO. 573279
  misc_feature: Reduced expression when VOC is produced
  misc_feature: Encodes the peptide sequence at SEQ ID NO 38228
atgtcgggcgtcaggaaccttcgtgccatgttcgagcagaaaggcgacagcggcccgccagatgacagaggacgatctcctgggccggctgggtttgtctccccttcgccgtctgcttctccccgacctctatccaaagttcgaacttccttcgtagcagtcgagaaagacggtcgtataggtcttagaagagaaccgagcagagattctgcctctgcctcagtatcaagccggagactcagtgacgagaccagcaccaccacaccccagcccgtatccgagagaacagacatctttgccgacaatatggctaccaacgtttccgcattcaagacgaaccttgctcaccaggccatccctgagtcccccaagcaggacacgcctgccaagttctcgccagccaaattctcccccaagaaggaattcaagagcccaaccctggtccccaatccaaaccctgacaagattaccgatgaagaggagcctcataccaagatgttgactggcgatcccaccagttcgtcagccagccgagtcggcggtaccattttggatgaaggaatgagtgatgccctgagaggcacacccaagaagtcaacgacggacacaccatccaaagctgctaagctcgctcccaagacagctcccatcgcgacggccaagacagccagcaaggcacccaagtctcccatggcagctaaggcagcagcaccagccatcaaggagccagccaaagcttcgagcaccgcagcagtccccaatggcaatgctaaaaagggtaccactacaaagacactgacgtcaaagccatctgccatcaatctctcgcaagccaacaccggctttattaagcccaagccgaaatcacccactcgccctgtcaagctcccctcttctctcttggcccctactgcctcgtcatcccagaaattcggtagtggcaactctgcgcccccgcccgggcgctgtctcgaacctcaggcaacacacaaggcttctaatgctaatgtcggccggccgtcacgtccgagcctgggacctccacctaagccggcagcgaaggagaccaagaaggaaagcagccaggtagacgatagcttcttggctcgcatgatgcgtcctacggccagcagtgccagtaagacatctgacaaggctcctgtcactccacctcgcaaggccgctgctcctatcaagaagatcgagaccaaggacgtcgagaggaacgcgaagaaggttgctgccaagattcaggcttcatcctccaaggccgcaacggcgaaagatgccgtaaagcctctggccaaggagcagcccactgctaaagagatcgcgccagccgttgcacaggctgagactgccgaggcagctattgaaggagccaaattgtctactgaaacggctgaagctcctttggttgaagagattactatcgaggctgaacccactgcgcaggatatcgctgtgatagtcgcacaggaagaaacagccgaggccattgtcgagaccgcgaggacttctgtagtcaccgctgctctggagcccgaaattgaagatgccgctgcccctctagccactgagagctcacaagaacaggactctgttttggaagacgagtctgctcctgttgaagaggcgagtgataaaccatcaactcccgagcctactgcgccatcaccattagccagcgaagcagatgttaataccggtgaatctgccgagcccacagaacaagcaactgaactcccagaagaagttaatgatgtcagcttgcctgagacggatgcggagaagagtgcccaagcaccatctgtagatctggccgaacaatttgagcgccttaccgttgacggacccgccgatgaagatgacgcaacaccagcagtcacgtctggcctctag

SEQ ID NO: 38228 - protein, 633 aa, Muscodor strobelii
  misc_feature: SGI Peptide ID NO. 573279
  misc_feature (1)..(385): NCBI GI: 46109022 Blast Desc: FG01393.1 [Gibberella zeae PH-1]
  misc_feature (1)..(396): NCBI GI: 85119372 Blast Desc: NCU02952 [Neurospora crassa OR74A] gi|28927445|gb|EAA36398.1| [Neurospora crassa OR74A] gi|38566944|emb|CAE76246.1| [Neurospora crassa]
  misc_feature (10)..(443): NCBI GI: 145613522 Blast Desc: MGG_11185 [Magnaporthe grisea 70-15] gi|145020589|gb|EDK04718.1| MGG_11185 [Magnaporthe grisea 70-15]
  misc_feature (1)..(101): NCBI GI: 261355351 Blast Desc: [Verticillium albo-atrum VaMs.102]
  misc_feature (216)..(451): NCBI GI: 116181446 Blast Desc: CHGG_01351 [Chaetomium globosum CBS 148.51] gi|88185648|gb|EAQ93116.1| CHGG_01351 [Chaetomium globosum CBS 148.51]
  misc_feature (1)..(400): NCBI GI: 156060787 Blast Desc: [Sclerotinia sclerotiorum 1980] gi|154699940|gb|EDN99678.1| [Sclerotinia sclerotiorum 1980]
  misc_feature (269)..(396): NCBI GI: 171695858 Blast Desc: protein product [Podospora anserina] gi|170948171|emb|CAP60335.1| protein product [Podospora anserina]
  misc_feature (258)..(505): NCBI GI: 189202076 Blast Desc: conserved [Pyrenophora tritici-repentis Pt-1C-BFP] gi|187984473|gb|EDU49961.1| conserved [Pyrenophora tritici-repentis Pt-1C-BFP]
  misc_feature (269)..(395): NCBI GI: 256730862 Blast Desc: NECHADRAFT_21814 [Nectria haematococca mpVI 77-13-4]
  misc_feature (212)..(502): NCBI GI: 154322228 Blast Desc: BC1G_01261 [Botryotinia fuckeliana B05.10] gi|150850508|gb|EDN25701.1| BC1G_01261 [Botryotinia fuckeliana B05.10]
  misc_feature: Useful for introducing or modulating the production of volatile compounds
MSGVRNLRAMFEQKGDSGPPDDRGRSPGPAGFVSPSPSASPRPLSKVRTSFVAVEKDGRIGLRREPSRDSASASVSSRRLSDETSTTTPQPVSERTDIFADNMATNVSAFKTNLAHQAIPESPKQDTPAKFSPAKFSPKKEFKSPTLVPNPNPDKITDEEEPHTKMLTGDPTSSSASRVGGTILDEGMSDALRGTPKKSTTDTPSKAAKLAPKTAPIATAKTASKAPKSPMAAKAAAPAIKEPAKASSTAAVPNGNAKKGTTTKTLTSKPSAINLSQANTGFIKPKPKSPTRPVKLPSSLLAPTASSSQKFGSGNSAPPPGRCLEPQATHKASNANVGRPSRPSLGPPPKPAAKETKKESSQVDDSFLARMMRPTASSASKTSDKAPVTPPRKAAAPIKKIETKDVERNAKKVAAKIQASSSKAATAKDAVKPLAKEQPTAKEIAPAVAQAETAEAAIEGAKLSTETAEAPLVEEITIEAEPTAQDIAVIVAQEETAEAIVETARTSVVTAALEPEIEDAAAPLATESSQEQDSVLEDESAPVEEASDKPSTPEPTAPSPLASEADVNTGESAEPTEQATELPEEVNDVSLPETDAEKSAQAPSVDLAEQFERLTVDGPADEDDATPAVTSGL

SEQ ID NO: 38229 - DNA, 3356 bp, Muscodor strobelii
  misc_feature: SGI EST ID NO. CUFF.91891.1
  misc_feature: Variant of the nucleotide sequence at SEQ ID NO 38227
agaaggtccccctaatttcagacggaggaccctcaactctccaacggcgacggctgcgcgggagcatcccactactgtgcgaccagcgtcggcataatagtccatagtcccatctgaccagctgtcttcctgcatacagatcttgcttggcttcctaatacgacgtcgtttattacacgcatcgcatgttttactaaaataatatgcatctacactttttttaatttctaaacattcaacttctcctctctcgtgattgctattttctgtcgcgggcttgtgcgtgccgccttgtgtacttgactatactgtcagtctgtgcagcaaacttccgagaaagtcaataccggccagtttacccctggactagtggcaacagctcccatcggccgacatctgcgaacacccaccacccgacaaagccctcgggtctctcaccgccctcgtgtcaagcgcaatttgaacgcgagaaagggaaaaatcggaggcagggccagcagaagggcggctggtctggcgaacagtcattccattctgggtcagtgagcattcactgctcttctgattgactatcacaagcaagtaccgacgacggcgacatcgtacctgactgcactttcatttttgggcgaatagcgaatagtcactcgcaatcacctacacattcatacgatctcatacaaactgcaaaaccacaaatctccaatagcccaaatccacaaggacgacaacaccgacaacgtcgatctcgtgacacgactgccatcatgtcgggcgtcaggaaccttcgtgccatgttcgagcagaaaggcgacagcggcccgccagatgacagaggacgatctcctgggccggctgggtttgtctccccttcgccgtctgcttctccccgacctctatccaaagttcgaacttccttcgtagcagtcgagaaagacggtcgtataggtcttagaagagaaccgagcagagattctgcctctgcctcagtatcaagccggagactcagtgacgagaccagcaccaccacaccccagcccgtatccgagagaacagacatctttgccgacaatatggctaccaacgtttccgcattcaagacgaaccttgctcaccaggccatccctgagtcccccaagcaggacacgcctgccaagttctcgccagccaaattctcccccaagaaggaattcaagagcccaaccctggtccccaatccaaaccctgacaagattaccgatgaagaggagcctcataccaagatgttgactggcgatcccaccagttcgtcagccagccgagtcggcggtaccattttggatgaaggaatgagtgatgccctgagaggcacacccaagaagtcaacgacggacacaccatccaaagctgctaagctcgctcccaagacagctcccatcgcgacggccaagacagccagcaaggcacccaagtctcccatggcagctaaggcagcagcaccagccatcaaggagccagccaaagcttcgagcaccgcagcagtccccaatggcaatgctaaaaagggtaccactacaaagacactgacgtcaaagccatctgccatcaatctctcgcaagccaacaccggctttattaagcccaagccgaaatcacccactcgccctgtcaagctcccctcttctctcttggcccctactgcctcgtcatcccagaaattcggtagtggcaactctgcgcccccgcccgggcgctgtctcgaacctcaggcaacgtgcagaacctatcggtcaactcgacggcccatagatcacctagcaggaacagtgtttcgaccactgcatcaggaaccaagtctctcagacacaaggcttctaatgctaatgtcggccggccgtcacgtccgagcctgggacctccacctaagccggcagcgaaggagaccaagaaggaaagcagccaggtagacgatagcttcttggctcgcatgatgcgtcctacggccagcagtgccagtaagacatctgacaaggctcctgtcactccacctcgcaaggccgctgctcctatcaagaagatcgagaccaaggacgtcgagaggaacgcgaagaaggttgctgccaagattcaggcttcatcctccaaggccgcaacggcgaaagatgccgtaaagcctctggccaaggagcagcccactgctaaagagatcgcgccagccgttgcacaggctgagactgccgaggcagctattgaaggagccaaattgtctactgaaacggctgaagctcctttggttgaagagattactatcgaggctgaacccactgcgcaggatatcgctgtgatagtcgcacaggaagaaacagccgaggccattgtcgagaccgcgaggacttctgtagtcaccgctgctctggagcccgaaattgaagatgccgctgcccctctagccactgagagctcacaagaacaggactctgttttggaagacgagtctgctcctgttgaagaggcgagtgataaaccatcaactcccgagcctactgcgccatcaccattagccagcgaagcagatgttaataccggtgaatctgccgagcccacagaacaagcaactgaactcccagaagaagttaatgatgtcagcttgcctgagacggatgcggagaagagtgcccaagcaccatctgtagatctggccgaacaatttgagcgccttaccgttgacggacccgccgatgaagatgacgcaacaccagcagtcacgtctggcctctagactagcagatgcgtcgcccgtgttgctcacagaaggtcgtctcagccatacccggggcgcaaacttcgcaggagacttaaggccagcaacctgcgttttgcttctcacaactcttcttccgtcgcttgatggtcattacatatgatacccaatcccttagacatatttattgatttgtaaactccgctcacaggctggcttgtgctgtctgttgccttcactttccttgttgttctgggcctgagcatgcacaaaacacacatacttcttatgaggcttctggggtgtccgtggaagcctctattctgggttgttttattgtggtggcttgttgtaagagtacatggcgaggcgagagtttggggtgaagtcgataggggaactcaagggggcacactcagaactggccgatattgtctgcgttccgggcgattggtacgaagaggagtgaacttcgagggagaagttgttgtagtagcattagccgatgacagatggagataggcgtttgacgtgcaaaaattagcgagaatggataccatatcactttctacattgcttcgacgacgggtatcgtgcattagtatcctgaatggag

SEQ ID NO: 38230 - DNA, 987 bp, Muscodor strobelii
  misc_feature: SGI cDNA ID NO. 573281
  misc_feature: Elevated expression when VOC is produced
  misc_feature: Encodes the peptide sequence at SEQ ID NO 38231
atgctcgataagaaaattatagcagccgcggtgcactcggctccagtgtacatggacaaggttgctacactttccaaagttgttagcttgattgagcaagccgcagctggttcgattgagcttctggccttccccgaagtctttatccccggttatccttattttataaatgtatatcctccaaccactaccgctggcatagttgccctctatgcttcacagagtgttgtcgtgaccgaggacttagggagtgtgcaggccgcttgcgcgaagcacggacttacggttgtgcttggtgtctcggaacgcatgcgcgggggctacacgctcttcaactcggttgtcactatcgactccgatgggacgatcctcggggtgcaccgcaaactgcagccgacgttcgctgagcgcttcgtctgggcacaggggtccggacatacactcaggacttatgagacgaaagcaggctatcgtattggtgctctcgcgtgctgggagcacacacttaatggtgcgcgacaagcacttattgatcaggggcagcatgtacatgtcggttgctggccgtcactcgatgtgatcccggggtttgaagatgtggctagttctcaaattgaggcactgatgaaaacacatgctttgactgcgcaagcgtttgtcttgaacgcgtgtaactacgtcgacgaatcgtgcttgacctggctgcgcgacaatgtcggtccacaggaccagatgaaaataacggggggtggctggactgccataatacaccctttttgcaccatcctcgccggaccacactctggctgcgaggagcgcataataaaggcagtgcttgacctcggagcactcggaaatgtcaaggtctgggtggatggagacggacactataagcggccggaggtgctccgaacagaggttgataccacaccgaggtggcgagacgacggcgagatagtcgggccgataccgtacgagaagttttag

SEQ ID NO: 38231 - protein, 328 aa, Muscodor strobelii
  misc_feature: SGI Peptide ID NO. 573281
  misc_feature (7)..(189): Pfam Id: PF00795 Pfam Desc: Carbon-nitrogen hydrolase
  misc_feature (5)..(316): NCBI GI: 116203267 Blast Desc: CHGG_09518 [Chaetomium globosum CBS 148.51] gi|88178036|gb|EAQ85504.1| CHGG_09518 [Chaetomium globosum CBS 148.51]
  misc_feature (3)..(316): NCBI GI: 189211761 Blast Desc: nitrilase [Pyrenophora tritici-repentis Pt-1C-BFP] gi|187979408|gb|EDU46034.1| nitrilase [Pyrenophora tritici-repentis Pt-1C-BFP]
  misc_feature (3)..(316): NCBI GI: 171688744 Blast Desc: protein product [Podospora anserina] gi|170944334|emb|CAP70444.1| protein product [Podospora anserina]
  misc_feature (3)..(316): NCBI GI: 169614035 Blast Desc: SNOG_10152 [Phaeosphaeria nodorum SN15] gi|160707264|gb|EAT82487.2| SNOG_10152 [Phaeosphaeria nodorum SN15]
  misc_feature (9)..(321): NCBI GI: 40890237 Blast Desc: nitrilase [uncultured organism]
  misc_feature (2)..(320): NCBI GI: 156062742 Blast Desc: SS1G_01487 [Sclerotinia sclerotiorum 1980] gi|154696823|gb|EDN96561.1| SS1G_01487 [Sclerotinia sclerotiorum 1980]
  misc_feature (5)..(314): NCBI GI: 85081332 Blast Desc: NCU00437 [Neurospora crassa OR74A] gi|28917775|gb|EAA27465.1| NCU00437 [Neurospora crassa OR74A] gi|40882143|emb|CAF05970.1| related to nitrilase [Neurospora
  misc_feature (6)..(314): NCBI GI: 40890233 Blast Desc: nitrilase [uncultured organism]
  misc_feature (8)..(316): NCBI GI: 40890231 Blast Desc: nitrilase [uncultured organism]
  misc_feature (3)..(311): NCBI GI: 158421696 Blast Desc: amidohydrolase [Azorhizobium caulinodans ORS 571] gi|158328585|dbj|BAF86070.1| amidohydrolase [Azorhizobium caulinodans ORS 571]
  misc_feature (9)..(311): SWISSPROT Homolog: EC 3.5.5.7 Aliphatic nitrilase
  misc_feature: Useful for introducing or modulating the production of volatile compounds
MLDKKIIAAAVHSAPVYMDKVATLSKVVSLIEQAAAGSIELLAFPEVFIPGYPYFINVYPPTTTAGIVALYASQSVVVTEDLGSVQAACAKHGLTVVLGVSERMRGGYTLFNSVVTIDSDGTILGVHRKLQPTFAERFVWAQGSGHTLRTYETKAGYRIGALACWEHTLNGARQALIDQGQHVHVGCWPSLDVIPGFEDVASSQIEALMKTHALTAQAFVLNACNYVDESCLTWLRDNVGPQDQMKITGGGWTAIIHPFCTILAGPHSGCEERIIKAVLDLGALGNVKVWVDGDGHYKRPEVLRTEVDTTPRWRDDGEIVGPIPYEKF

SEQ ID NO: 38232 - DNA, 1377 bp, Muscodor strobelii
  misc_feature: SGI EST ID NO. CUFF.91673.0
  misc_feature: Variant of the nucleotide sequence at SEQ ID NO 38230
gcttggcgttgcttaccagtgacatatcaaggtgatctgggaggccacttatgacaaccccgcgcaccccatcttaccaacaaggactccgccacgaagagccagaaacactcaaacgagacgataccgacaacatgctcgataagaaaattatagcagccgcggtgcactcggctccagtgtacatggacaaggttgctacactttccaaagttgttagcttgattgagcaagccgcagctggttcgattgagcttctggccttccccgaagtctttatccccggttatccttattttataaatgtatatcctccaaccactaccgctggcatagttgccctctatgcttcacagagtgttgtcgtgaccgaggacttagggagtgtgcaggccgcttgcgcgaagcacggacttacggttgtgcttggtgtctcggaacgcatgcgcgggggctacacgctcttcaactcggttgtcactatcgactccgatgggacgatcctcggggtgcaccgcaaactgcagccgacgttcgctgagcgcttcgtctgggcacaggggtccggacatacactcaggacttatgagacgaaagcaggctatcgtattggtgctctcgcgtgctgggagcacacacttaatggtgcgcgacaagcacttattgatcaggggcagcatgtacatgtcggttgctggccgtcactcgatgtgatcccggggtttgaagatgtggctagttctcaaattgaggcactgatgaaaacacatgctttgactgcgcaagcgtttgtcttgaacgcgtgtaactacgtcgacgaatcgtgcttgacctggctgcgcgacaatgtcggtccacaggaccagatgaaaataacggggggtggctggactgccataatacaccctttttgcaccatcctcgccggaccacactctggctgcgaggagcgcataataaaggcagtgcttgacctcggagcactcggaaatgtcaaggtctgggtggatggagacggacactataagcggccggaggtgctccgaacagaggttgataccacaccgaggtggcgagacgacggcgagatagtcgggccgataccgtacgagaagttttaggagtattagactcgggatcgaagttagtgggaagggcgtatattcattcatgtgacatagtggcttataatcacatgataatactagaaattacctacgagcttcattttcacacttcaaaaaattggccaaaacgatctaagtagtatgaatattgaaatcatcgttattgttggccacaattctcctgctcgcgccatacgccgaatgacacatcgtggctcatacatgaagtaaaaaggtggcagcatttttg

SEQ ID NO: 38233 - DNA, 1995 bp, Muscodor strobelii
  misc_feature: SGI cDNA ID NO. 573282
  misc_feature: Encodes the peptide sequence at SEQ ID NO 38234
atgtctgagtcccgcaagctcagctcgctgctgttgatggcggggttcaatgtcgactgcctcgtgtcagccgactatttgcatctgtttccaggcatagtttccactgcactacaatatccaatgtattacatggactatgaggggaacgatcaccttgctggacgggtatccatcagagaggatcatttctacttcacagactttctgtggatcaacgaccatcgtgccctttacaagataatggtgttgcacagtgctcgagcggcacagcaaatcactgtaccaggtatcatcaccgcagcccagtccggagcactggaacttcgagattacctcgaactgagatcagagggccaagatctagccatgtcaagtgctctcgagatcgctctgtctttgagcgtcgccgatagcaacctaactgctattagaacgctcttggagctgggagtgaatattgataccccaaacttggagcgcgagtatcgaccacttatcgtagctgccagacaatcagacatagagctccaaggccttggtatcagtcatggagctgatgttacattcctcaatgattacttacatcgacgccgcccaagatggtcatccatcaagttccagtattttaggcaacaggggatactcatggagcttgacaacaattcattgatttcggcccttaaaagaaagcccatcgataaaaatttcattgatataatgctccaaaggggtctgccaaacgacacgaagtttgacggtgttaacctaatccaatttgcaatccgtcagcactgccctgtcgacgccatcaaacttcttcactctcgcggtgtggaaatacactcgcgtccggatccggtatctggcaataccatgctccacgatgccgtcggccgcatcgctacgaatcagtctcacgcttatacaaaagatctcgtcggatatctccaccagaacggcgcgggctgcggtagcgatgtagagcgtggtgggcctacgattctggaacaactagctcgcagtattagcatgaaacagtggcctatggatctgttctgcttactctttgaccgcggtgctatcgtaggagagcccagcgtgaggttttgggaagcatcccaaccgcttatgtactccttagtcaactgccgccaggcatcagatgatctcatcctgcaggtaatcgaaaaaggtgcagactgccataaacgcgggaacgtggcatatacgcctttgcaaaatgcgatcttggagggccgctacatcatcgcgcaccaacttcttttgcgaggcgccgatataaacgccccggcaggagaagatggctgcacagctcttcaagctgcttgcaacccggcgcaaggcgaaatctcgcttggtttcgttcaggaattgctggatcgcggcgcatacgtaaacgcgcctacgggtacgcgatatctccaaggcggccagacagcactacaatgtgcaattgagtctggatctatgagtgttttctgtctgctcttggacgccggtgcggatgtcaatgccacaagcactttcgactacccatcctcagcggggtttctaccgacgagcttggatgccgctgcttattatggaaggcttgatatggtcgatatactcctgaagaagagcgccgtgagtgggaaacaagacgagacgtcctatgacggcgcagtagagattgccgagggtgagggatactacgcagttggaaagatgcttagggacaggcactcggaatatatcaaggaggcagagaaagcagcttttggcgatggcagagtattggtggtggatcaaccgactcacaatcggctcctgacttcacgtcttgagaattctgaccccgggatgactgtcgacttcgcggttgccaaggatagtagtaccgtcgcgcatgatgatgagactgcggatgcaggtcctgcgcttttagccgctctcgaccaagagttctccatcactcattgtgcgcagtga

SEQ ID NO: 38234 - protein, 664 aa, Muscodor strobelii
  misc_feature: SGI Peptide ID NO. 573282
  misc_feature (484)..(516): Pfam Id: PF00023 Pfam Desc: Ankyrin repeat
  misc_feature (144)..(565): NCBI GI: 238843722 Blast Desc: ankyrin repeat protein [Microsporum canis CBS 113480]
  misc_feature (222)..(582): NCBI GI: 116201879 Blast Desc: CHGG_08824 [Chaetomium globosum CBS 148.51] gi|88177342|gb|EAQ84810.1| CHGG_08824 [Chaetomium globosum CBS 148.51]
  misc_feature (384)..(592): NCBI GI: 242827177 Blast Desc: multiple ankyrin repeats single kh domain protein, [Talaromyces stipitatus ATCC 10500] gi|218712034|gb|EED11462.1| multiple ankyrin repeats single kh domain protein, [Talaromyces
  misc_feature (222)..(585): NCBI GI: 242760147 Blast Desc: Pfs, NACHT and Ankyrin domain protein [Talaromyces stipitatus ATCC 10500] gi|218723125|gb|EED22542.1| Pfs, NACHT and Ankyrin domain protein [Talaromyces stipitatus ATCC 10500]
  misc_feature (101)..(550): NCBI GI: 189502738 Blast Desc: Aasi_1435 [Candidatus Amoebophilus asiaticus 5a2] gi|189498179|gb|ACE06726.1| Aasi_1435 [Candidatus Amoebophilus asiaticus 5a2]
  misc_feature (385)..(582): NCBI GI: 116199953 Blast Desc: CHGG_08132 [Chaetomium globosum CBS 148.51] gi|88179411|gb|EAQ86879.1| CHGG_08132 [Chaetomium globosum CBS 148.51]
  misc_feature (351)..(582): NCBI GI: 116203745 Blast Desc: CHGG_09756 [Chaetomium globosum CBS 148.51] gi|88175884|gb|EAQ83352.1| CHGG_09756 [Chaetomium globosum CBS 148.51]
  misc_feature (131)..(550): NCBI GI: 242816359 Blast Desc: multiple ankyrin repeats single kh domain protein, [Talaromyces stipitatus ATCC 10500] gi|218715100|gb|EED14523.1| multiple ankyrin repeats single kh domain protein, [Talaromyces
  misc_feature (97)..(550): NCBI GI: 189502738 Blast Desc: Aasi_1435 [Candidatus Amoebophilus asiaticus 5a2] gi|189498179|gb|ACE06726.1| Aasi_1435 [Candidatus Amoebophilus asiaticus 5a2]
  misc_feature (384)..(550): NCBI GI: 242816359 Blast Desc: multiple ankyrin repeats single kh domain protein, [Talaromyces stipitatus ATCC 10500] gi|218715100|gb|EED14523.1| multiple ankyrin repeats single kh domain protein, [Talaromyces
MSESRKLSSLLLMAGFNVDCLVSADYLHLFPGIVSTALQYPMYYMDYEGNDHLAGRVSIREDHFYFTDFLWINDHRALYKIMVLHSARAAQQITVPGIITAAQSGALELRDYLELRSEGQDLAMSSALEIALSLSVADSNLTAIRTLLELGVNIDTPNLEREYRPLIVAARQSDIELQGLGISHGADVTFLNDYLHRRRPRWSSIKFQYFRQQGILMELDNNSLISALKRKPIDKNFIDIMLQRGLPNDTKFDGVNLIQFAIRQHCPVDAIKLLHSRGVEIHSRPDPVSGNTMLHDAVGRIATNQSHAYTKDLVGYLHQNGAGCGSDVERGGPTILEQLARSISMKQWPMDLFCLLFDRGAIVGEPSVRFWEASQPLMYSLVNCRQASDDLILQVIEKGADCHKRGNVAYTPLQNAILEGRYIIAHQLLLRGADINAPAGEDGCTALQAACNPAQGEISLGFVQELLDRGAYVNAPTGTRYLQGGQTALQCAIESGSMSVFCLLLDAGADVNATSTFDYPSSAGFLPTSLDAAAYYGRLDMVDILLKKSAVSGKQDETSYDGAVEIAEGEGYYAVGKMLRDRHSEYIKEAEKAAFGDGRVLVVDQPTHNRLLTSRLENSDPGMTVDFAVAKDSSTVAHDDETADAGPALLAALDQEFSITHCAQ

SEQ ID NO: 38235 - DNA, 1500 bp, Muscodor strobelii
  misc_feature: SGI EST ID NO. CUFF.91682.0
  misc_feature: Variant of the nucleotide sequence at SEQ ID NO 38233
cacatattgaagattggatcaaaactgaagtccacatcaagaagcgggagagggagggtaaggagacagaagtctttatcgcaggagttaagaagcctcgaaggcagatcgcggagatattgaggaagaataggaatacgcaccggctgagagcccagtatagtagaggtgaatagtctccttttcacttttctcgctttgcagattctctgaggtttgatgaaagtcgaaacgaaatgcgccgacgtttggcagaagcaactcctgagcttccggtgtaccttcgattgaggactcctccgccagaaaacaaacctgccgtccagtactccatggcccattcgcaatcatcagttacaatttggaaaaggctcttctccgatccgaagtcttccgctcggatgtgggttaatgttccgaccagtcaattgtggactttagttgcacctaaagttgggtttccgtccttcagctcccaaagtcagcaacgcctccttgagagtgacctaagacatgccaaccaaaaagacggtatcgtgccagtgatcaaaacatctttagaccttgtgaagtggatcatgcatttatgcaccttgatagctaatggctatcattcgctaagtttgataaacaccggcgagatcacaagcggtatctccttgattacggacgatcgaaacctcactgcattgaaggtattcttcgggctgaattctccagccgttcaagcgacatgggaaggactagttgatttctcgcttcgcgtcaaccgaacagcatacttgcctaacataccgggtcggcttccctctaacgaccatagccaagtcgattggaaatcgttcagaattctagtcgagattggcctagaagttcatggaggcgctttggtcaaaaaaagcatcaaacatgtatctgttggcgctgtgactgctggctctgaacagatgggatctctcacatcaaggctgttgacaagaaataatcttcaaccgctcccgctcgctcttctcaacgtattactcttcaacgccgcatgtcagcttgacgatcagatggtgataacactgattgatgctggaatctcttttgtaaactttgatctgcttagaacccaacccacgaatcgtaacgcaactgcaactttcgatcgaagctggacgccaactaaaaggcttaggtttcgaaagccctggactatgtctgagtcccgcaagctcagctcgctgctgttgatggcggggttcaatgtcgactgcctcgtgtcagccgactatttgcatctgtttccaggcatagtttccactgcactacaatatccaatgtattacatggactatgaggggaacgatcaccttgctggacgggtatccatcagagaggatcatttctacttcacagactttctgtggatcaacgaccatcgtgccctttacaagataatggtgttgcacagtgctcgagcggcacagcaaatcactgtaccaggtatcatcaccg

SEQ ID NO: 38236 - DNA, 3864 bp, Muscodor strobelii
  misc_feature: SGI cDNA ID NO. 573283
  misc_feature: Encodes the peptide sequence at SEQ ID NO 38237
atgatgtactcgcgacatacagtattgagcagttatggcctcaggaagagacctactgatgtcaccgagactccagggtatgatctatcgaagcgtcggaggacggacgatcgccaagagcacgatgagtcttctgacacagattctttacatgcggtgcggcttgatcatggccgttatacagtaggatggatctgcgcactacatatcgagatggctgctgcaatagcaatgctcgacaccgtacatgaaactttaccgcaagaccctacggacagtaacgcatacgctttggggagcatctgcaatcataatgttgtaatcgccagcctaccatcggctgggtacggaacgaacaatgctgcgaccgttgcgagcaatatgtcccgcagctttccggcaattcgtgtacggctgatggttggtattggtggcggcatccctcggcaaaatgaaacatctgtcagactgggcgatattgttgtgagcaatagtgtggtgcaattcgatctaggcaaggtcctctctaccggaagatttcatcgaaccggcgtcccacgacgacctccttttgcgttgatgacggcagtcagcaggttacgcgcggagcacgaggctcgtccgagcagaatcccattgttcctaacggagatgcatgctcggaatcgcaagatgagtaaatattcacatcctggactgaatcaggatagactcttcgagagcagttacgaacacgagggagatatcagtagttgcaagcaatgcgatatgtccaagttggttacggactggccgctacgggagagcatggatccggtaattcattacggggatattgcgtcaggtaaccaagtcatgaagaacggaattgagagagaccggttagcccaaaccctgggcgtcaagtgttttgagatggaggctgcagggctaatggacaatttcccatgtctggtcatccgtggcatttccgactattcggactcccacaaaaacaaaaattggcagcaatatgctgctgcttcagcggcagcttacgccaaagagttgctacatgttataccgggagatggttctcgattctctctaaagaattcagaaagggacgccaagattctgcgccgacaagaactctttgagtcgttaaaattcgaagagcttcgtcgtcgtgaagataacataagcaaagcgtatggacacacatgcgggtggctccttgagcatcctgattatcaaatgtggcaagacccgaaaatggtaccggagcatcacggatttctctggataaatggaaagccaggtgcgggaaagtcaacactcatgaaattcctgtacaataaggcaaccaagtcgcggctacctaattcctctaccatcgtgtttttttttaacgcccgaggatctgatttggagaaaacgtcggtaggcatgtaccgttctttgctgttccaactcttaagtagcttcaaagatctacaggaagttctagatgactatgagaacgatcttggacgccagcatgagtcttccgactggtctgtcgaagttcttcaaggactcttttcgaaagctgcattgcgattagggtcgcgtcgtgtcacctgttttattgatgcactcgacgagtgtgcagaaaccgatgttcaatcgatgatatactacttcgagcaccttgggcaaacggcaaccgagaaggatgttcgtctcttaatctgcttttctagtcgtcattatccctacatcagcatcctctacggtcagagattagtgctcgaaagccagactgggcacgaagaagatctccagcactatgtacaagaagcttttcgaaggtttggaacagatgagctggtggaagaaatgcagaatgaggtattgagaaaagcggcaggtattttcatgtgggttgtgcttgttgtagagattcttagcaaagagtttcaacatgggcgacttttcgcgatgaaaaggcgactcgaagaaatacctgacagactaagtgacctattcagagatattctaactcgagacagcgacaatatggacgatcttttattgtgcatacaatggatactcttctccaagcgacctttgaagtgcgacgagtattatttcgcactcagctcgggattgacatctgatttagatgaatttagcagatggcataaaagcgacacttctatccacgctattcgccgatatgtgtcaagctcctccaagggactcgccgaagtcacgaggacacggggtggtatagtgcaattcattcatgaatcggtacgagacttccttataaaagacaatggcttacgcgagttgtggccggaggttggcgaaaatttccaggactacagtcaagaaagactcaaatactgctgctattcatatatgaagcgctacatatcaacccactcatcactgaagctcactctcgcacaagagtctactgtagcagagacgaagaggcgaatcaagaaaacatctagaggatacccgtttcttgagtatgcagtcaacaatgtgcttttccatgccgatgctgcagcagatggtattccgcagcaacagttccttgcagaattttccgttgcgcactggatcgatcttctcaaccttcaccagatgtaccgcaaacgacgctatacagattctgcaaacctcatttacctgctagcagaaaaggactaccccaacttaatatggatattgcggatggaaggtcatcgcatcgatgttgaagaggaacgccatagctatccattcttcgcagcgttgtataataaaaaccaacgcgcaatgaaagctctactaaaacgaagtgagcatgactcaaccgcaagtgctgcctgcgcccttcttcgttacggcaaagctgttattgctgaggaaggtcagacgccgcttcattggagcctcgcgaataagcagtcgtccattgctgctcttctcatccaagctgagaggcgggcactgcaagatctccggggtcgatctgcgctgtccttaagctcgcttagtactatgtcgccagacctactccaagatttgattgaaatgactgagaagatccacatcgataattggccaatcgcgacaaaagttttgctattggcggcgactaaagggtatgacagcgtcgctcgatcgttgcttgataaaggcctcagtacagaaacgacgaacgtagcgaaccaaacgcccctcatcctagcagcgcagaacggccacaatgtggtcatacagatattgctcgagagaaatgccgacatcgagaaaagggacagcaagagaatgactccgcttgcctatgcagtatcgcgtgggcagtacgaaacaatgcaactgctcatcgacaaaggtgcagatacttgtgccctatgtggtacagatggtcgaacagtgctgtctctagcgaccaatacaaataacttcgctcttgttcatgggctccttgacaagggtctcgatatcgaagcccaggacaaagctggcaagaatgccctgctgtgggcaattcggagaggcaatgaagaaatgatcaagctgcttcttcaggttggtgctgatcctaactgtcatacggtgcagacaccgctggcggcggcagttagtatacgctcagccgacattgcccggatcttcctcagctacggagcaaatgtggaaggtcgaggtgctctcggacaaacagcactcatggcggcagcaaaacgaggttggaccgacatgatgcaattgttattagataatggctgtaatgtcaacgcccaagatgaccgaggtcggacggccatcacctgggcaaaaagggaaaggcgctggaaggctgttgcctttttactcgataatggagccaaaagttag

SEQ ID NO: 38237 - protein, 1287 aa, Muscodor strobelii
  misc_feature: SGI Peptide ID NO. 573283
  misc_feature (1227)..(1259): Pfam Id: PF00023 Pfam Desc: Ankyrin repeat
  misc_feature (1163)..(1195): Pfam Id: PF00023 Pfam Desc: Ankyrin repeat
  misc_feature (1063)..(1095): Pfam Id: PF00023 Pfam Desc: Ankyrin repeat
  misc_feature (1096)..(1128): Pfam Id: PF00023 Pfam Desc: Ankyrin repeat
  misc_feature (1130)..(1162): Pfam Id: PF00023 Pfam Desc: Ankyrin repeat
  misc_feature (20)..(1194): NCBI GI: 119473587 Blast Desc: Pfs, NACHT and Ankyrin domain protein [Neosartorya fischeri NRRL 181] gi|119406822|gb|EAW16772.1| Pfs, NACHT and Ankyrin domain protein [Neosartorya fischeri NRRL 181]
  misc_feature (57)..(1220): NCBI GI: 115433911 Blast Desc: conserved [Aspergillus terreus NIH2624] gi|114189944|gb|EAU31644.1| conserved [Aspergillus terreus NIH2624]
  misc_feature (23)..(1265): NCBI GI: 171689444 Blast Desc: protein product [Podospora anserina] gi|170944684|emb|CAP70795.1| protein product [Podospora anserina]
  misc_feature (126)..(1285): NCBI GI: 70990006 Blast Desc: Pfs, NACHT and Ankyrin domain protein [Aspergillus fumigatus Af293] gi|66847484|gb|EAL87814.1| Pfs, NACHT and Ankyrin domain protein [Aspergillus fumigatus Af293]
  misc_feature (31)..(1284): NCBI GI: 145254107 Blast Desc: An18g00540 [Aspergillus niger] gi|134084101|emb|CAK43130.1| protein product [Aspergillus niger]
  misc_feature (57)..(985): NCBI GI: 115390334 Blast Desc: conserved [Aspergillus terreus NIH2624] gi|114195068|gb|EAU36768.1| conserved [Aspergillus terreus NIH2624]
  misc_feature (55)..(1123): NCBI GI: 212545444 Blast Desc: Pfs, NACHT and Ankyrin domain protein [Penicillium marneffei ATCC 18224] gi|210065845|gb|EEA19939.1| Pfs, NACHT and Ankyrin domain protein [Penicillium marneffei ATCC 18224]
  misc_feature (60)..(1247): NCBI GI: 238496907 Blast Desc: Pfs, NACHT and Ankyrin domain protein [Aspergillus flavus NRRL3357] gi|220694569|gb|EED50913.1| Pfs, NACHT and Ankyrin domain protein [Aspergillus flavus NRRL3357]
  misc_feature (72)..(1121): NCBI GI: 46116276 Blast Desc: FG03980.1 [Gibberella zeae PH-1]
  misc_feature (60)..(1220): NCBI GI: 169774533 Blast Desc: [Aspergillus oryzae RIB40] gi|83769597|dbj|BAE59732.1| protein product [Aspergillus oryzae]
MMYSRHTVLSSYGLRKRPTDVTETPGYDLSKRRRTDDRQEHDESSDTDSLHAVRLDHGRYTVGWICALHIEMAAAIAMLDTVHETLPQDPTDSNAYALGSICNHNVVIASLPSAGYGTNNAATVASNMSRSFPAIRVRLMVGIGGGIPRQNETSVRLGDIVVSNSVVQFDLGKVLSTGRFHRTGVPRRPPFALMTAVSRLRAEHEARPSRIPLFLTEMHARNRKMSKYSHPGLNQDRLFESSYEHEGDISSCKQCDMSKLVTDWPLRESMDPVIHYGDIASGNQVMKNGIERDRLAQTLGVKCFEMEAAGLMDNFPCLVIRGISDYSDSHKNKNWQQYAAASAAAYAKELLHVIPGDGSRFSLKNSERDAKILRRQELFESLKFEELRRREDNISKAYGHTCGWLLEHPDYQMWQDPKMVPEHHGFLWINGKPGAGKSTLMKFLYNKATKSRLPNSSTIVFFFNARGSDLEKTSVGMYRSLLFQLLSSFKDLQEVLDDYENDLGRQHESSDWSVEVLQGLFSKAALRLGSRRVTCFIDALDECAETDVQSMIYYFEHLGQTATEKDVRLLICFSSRHYPYISILYGQRLVLESQTGHEEDLQHYVQEAFRRFGTDELVEEMQNEVLRKAAGIFMWVVLVVEILSKEFQHGRLFAMKRRLEEIPDRLSDLFRDILTRDSDNMDDLLLCIQWILFSKRPLKCDEYYFALSSGLTSDLDEFSRWHKSDTSIHAIRRYVSSSSKGLAEVTRTRGGIVQFIHESVRDFLIKDNGLRELWPEVGENFQDYSQERLKYCCYSYMKRYISTHSSLKLTLAQESTVAETKRRIKKTSRGYPFLEYAVNNVLFHADAAADGIPQQQFLAEFSVAHWIDLLNLHQMYRKRRYTDSANLIYLLAEKDYPNLIWILRMEGHRIDVEEERHSYPFFAALYNKNQRAMKALLKRSEHDSTASAACALLRYGKAVIAEEGQTPLHWSLANKQSSIAALLIQAERRALQDLRGRSALSLSSLSTMSPDLLQDLIEMTEKIHIDNWPIATKVLLLAATKGYDSVARSLLDKGLSTETTNVANQTPLILAAQNGHNVVIQILLERNADIEKRDSKRMTPLAYAVSRGQYETMQLLIDKGADTCALCGTDGRTVLSLATNTNNFALVHGLLDKGLDIEAQDKAGKNALLWAIRRGNEEMIKLLLQVGADPNCHTVQTPLAAAVSIRSADIARIFLSYGANVEGRGALGQTALMAAAKRGWTDMMQLLLDNGCNVNAQDDRGRTAITWAKRERRWKAVAFLLDNGAKS

SEQ ID NO: 38238 - DNA, 3188 bp, Muscodor strobelii
  misc_feature: SGI EST ID NO. CUFF.91689.0
  misc_feature: Variant of the nucleotide sequence at SEQ ID NO 38236
aatccttcgaaagcgacgttccccatgctcgaatgcagggcttccctcggcgcttgcaaaagggaggcgcagcgaatgtcaagtttcgacggatccctctcattgggcggcctcttggtcaataatgcaatgcggattatccttgcacccctcttcagctcgccattccacgaccatcttctcaatcatttgatcatttcacagtgatttgagatcactatgatcgtcgatttcttattggaacgtgttacaatgggatagcactaatgatgtactcgcgacatacagtattgagcagttatggcctcaggaagagacctactgatgtcaccgagactccagggtatgatctatcgaagcgtcggaggacggacgatcgccaagagcacgatgagtcttctgacacagattctttacatgcggtgcggcttgatcatggccgttatacagtaggatggatctgcgcactacatatcgagatggctgctgcaatagcaatgctcgacaccgtacatgaaactttaccgcaagaccctacggacagtaacgcatacgctttggggagcatctgcaatcataatgttgtaatcgccagcctaccatcggctgggtacggaacgaacaatgctgcgaccgttgcgagcaatatgtcccgcagctttccggcaattcgtgtacggctgatggttggtattggtggcggcatccctcggcaaaatgaaacatctgtcagactgggcgatattgttgtgagcaatagtgtggtgcaattcgatctaggcaaggtcctctctaccggaagatttcatcgaaccggcgtcccacgacgacctccttttgcgttgatgacggcagtcagcaggttacgcgcggagcacgaggctcgtccgagcagaatcccattgttcctaacggagatgcatgctcggaatcgcaagatgagtaaatattcacatcctggactgaatcaggatagactcttcgagagcagttacgaacacgagggagatatcagtagttgcaagcaatgcgatatgtccaagttggttacggactggccgctacgggagagcatggatccggtaattcattacggggatattgcgtcaggtaaccaagtcatgaagaacggaattgagagagaccggttagcccaaaccctgggcgtcaagtgttttgagatggaggctgcagggctaatggacaatttcccatgtctggtcatccgtggcatttccgactattcggactcccacaaaaacaaaaattggcagcaatatgctgctgcttcagcggcagcttacgccaaagagttgctacatgttataccgggagatggttctcgattctctctaaagaattcagaaagggacgccaagattctgcgccgacaagaactctttgagtcgttaaaattcgaagagcttcgtcgtcgtgaagataacataagcaaagcgtatggacacacatgcgggtggctccttgagcatcctgattatcaaatgtggcaagacccgaaaatggtaccggagcatcacggatttctctggataaatggaaagccaggtgcgggaaagtcaacactcatgaaattcctgtacaataaggcaaccaagtcgcggctacctaattcctctaccatcgtgtttttttttaacgcccgaggatctgatttggagaaaacgtcggtaggcatgtaccgttctttgctgttccaactcttaagtagcttcaaagatctacaggaagttctagatgactatgagaacgatcttggacgccagcatgagtcttccgactggtctgtcgaagttcttcaaggactcttttcgaaagctgcattgcgattagggtcgcgtcgtgtcacctgttttattgatgcactcgacgagtgtgcagaaaccgatgttcaatcgatgatatactacttcgagcaccttgggcaaacggcaaccgagaaggatgttcgtctcttaatctgcttttctagtcgtcattatccctacatcagcatcctctacggtcagagattagtgctcgaaagccagactgggcacgaagaagatctccagcactatgtacaagaagcttttcgaaggtttggaacagatgagctggtggaagaaatgcagaatgaggtattgagaaaagcggcaggtattttcatgtgggttgtgcttgttgtagagattcttagcaaagagtttcaacatgggcgacttttcgcgatgaaaaggcgactcgaagaaatacctgacagactaagtgacctattcagagatattctaactcgagacagcgacaatatggacgatcttttattgtgcatacaatggatactcttctccaagcgacctttgaagtgcgacgagtattatttcgcactcagctcgggattgacatctgatttagatgaatttagcagatggcataaaagcgacacttctatccacgctattcgccgatatgtgtcaagctcctccaagggactcgccgaagtcacgaggacacggggtggtatagtgcaattcattcatgaatcggtacgagacttccttataaaagacaatggcttacgcgagttgtggccggaggttggcgaaaatttccaggactacagtcaagaaagactcaaatactgctgctattcatatatgaagcgctacatatcaacccactcatcactgaagctcactctcgcacaagagtctactgtagcagagacgaagaggcgaatcaagaaaacatctagaggatacccgtttcttgagtatgcagtcaacaatgtgcttttccatgccgatgctgcagcagatggtattccgcagcaacagttccttgcagaattttccgttgcgcactggatcgatcttctcaaccttcaccagatgtaccgcaaacgacgctatacagattctgcaaacctcatttacctgctagcagaaaaggactaccccaacttaatatggatattgcggatggaaggtcatcgcatcgatgttgaagaggaacgccatagctatccattcttcgcagcgttgtataataaaaaccaacgcgcaatgaaagctctactaaaacgaagtgagcatgactcaaccgcaagtgctgcctgcgcccttcttcgttacggcaaagctgttattgctgaggaaggtcagacgccgcttcattggagcctcgcgaat

SEQ ID NO: 38239 - DNA, 1350 bp, Muscodor strobelii
  misc_feature: SGI cDNA ID NO. 573284
  misc_feature: Elevated expression when VOC is produced
  misc_feature: Encodes the peptide sequence at SEQ ID NO 38240
atgactaatctctcaatgcttcttgaccgacaagtaaacgccctgaaccttcttttacaggctctccaatgtcaaacatgggctcagcaaaacaacttcatcgctaagtcgaaaagccagtctattctaaaactcgcggaagactgctcttcttcccttgttggtcttgaggatacgggcagcatcatgacagaatcaacggaaaacaccatgactcgattcgactcatctccaacgccggccgatgaacaagtcaaagggaactcagaagtcatcaaagtcttactcctttcgccatccggaagcgggaagacgactcttttgaaatccatgcaagaatatacagttgcagagaagagtacatacgaccagtggcaggctcgagacctggtctggagcaatgtattaggctccgtgaataaagtactagaggcaatggaaagactctcaatcatgccagagaaccagtctgcattcgacgatgcgcataaaattctatggagcgatggcgaagacccgttcataagcggcttgaacttgccgcgcatcaaaaaagaagcccaggtacttcgggaactttggtctgatacaggatttcagatggctatcaagcgaagcagcgaataccactttcacgataatacagtccactatatcactcagattcacgaaatagcggaacaattattcacttcctgcgcgccccgggtcacggatgtattgcgggcaagagtccgaactacgggaatccacgaagtgtttgtcagctacaaggactgtaagtttcgtgtcaacgatgtgggaggagaaaggagtgagcgcaaaaaatggagtcacgtttttgcagatcactcaaccgtgattttccccgtcgacgtaactgcctacggaaggagtctcaccgaggcggacgccgaccgcatgagtgagcacttcatcttatttgaaggcatagcgaacatggatttgttcacgaagtcacatttcatcgtgccctttaccaaaatggatcttctcgaaggacatatggagaaaaatgacgtgaattcctgtcatccactcacctggcacattcccaagacgtggtttcctattcggaattctggagaatatatagaggctctaaagagcagctttcaaagcttgatgagagaccccgaacgccggcagagaatccagttcatttgcgtcgatttggtagatgtcgaagagcaaaatgcggcagtagatatactcgaactgatacgaacactcaacaagcaagattcgagcaagctggatggactgcccgagcctttatcattgatagctgaagagacagatgacacaacttatgtcgcacagagatag

SEQ ID NO: 38240 - protein, 449 aa, Muscodor strobelii
  misc_feature: SGI Peptide ID NO. 573284
  misc_feature (63)..(414): Pfam Id: PF00503 Pfam Desc: G-protein alpha subunit
  misc_feature (187)..(281): Pfam Id: PF00503 Pfam Desc: G-protein alpha subunit
  misc_feature (86)..(353): NCBI GI: 213512426 Blast Desc: Guanine nucleotide-binding protein Gk subunit alpha [Salmo salar] gi|209155428|gb|ACI33946.1| Guanine nucleotide-binding protein Gk subunit alpha [Salmo salar]
  misc_feature (60)..(353): NCBI GI: 268563070 Blast Desc: C. briggsae CBR-GPA-16 protein [Caenorhabditis briggsae] gi|74906766|sp|Q60XS3.3|GPA16_CAEBR RecName: Full=Guanine nucleotide-binding protein alpha-16 subunit gpa-16
  misc_feature (60)..(353): NCBI GI: 17510719 Blast Desc: G Protein, Alpha subunit family member (gpa-16) [Caenorhabditis elegans] gi|21263695|sp|Q9N2V6.3|GPA16_CAEEL RecName: Full=Guanine nucleotide-binding protein alpha-16 subunit
  misc_feature (92)..(353): NCBI GI: 55729594 Blast Desc: [Pongo abelii]
  misc_feature (92)..(353): NCBI GI: 45382315 Blast Desc: guanine nucleotide binding protein (G protein), alpha inhibiting activity polypeptide 1 [Gallus gallus] gi|1730226|sp|P50146.2|GNAI1_CHICK RecName: Full=Guanine protein
  misc_feature (92)..(353): NCBI GI: 169786808 Blast Desc: G protein alpha i1 [Oncorhynchus mykiss]
  misc_feature (92)..(353): NCBI GI: 1730225 Blast Desc: GNAI1_CAVPO RecName: Full=Guanine nucleotide-binding protein G(i), alpha-1 subunit; AltName: Full=Adenylate cyclase-inhibiting G alpha protein gi|2160416|dbj|BAA04764.1| Gi1
  misc_feature (92)..(353): NCBI GI: 225733962 Blast Desc: GNAI1_CAVPO RecName: Full=Guanine nucleotide-binding protein G(i), alpha-1 subunit; AltName: Full=Adenylate cyclase-inhibiting G alpha protein gi|2160416|dbj|BAA04764.1| Gi1
  misc_feature (92)..(353): NCBI GI: 148671281 Blast Desc: guanine nucleotide binding protein, alpha inhibiting 1 [Mus musculus]
  misc_feature (92)..(353): NCBI GI: 27805887 Blast Desc: guanine nucleotide-binding protein G(i), alpha-1 subunit [Bos taurus] gi|33946324|ref|NP_002060.4| guanine nucleotide binding protein (G protein), alpha inhibiting activity
  misc_feature: Useful for introducing or modulating the production of volatile compounds
MTNLSMLLDRQVNALNLLLQALQCQTWAQQNNFIAKSKSQSILKLAEDCSSSLVGLEDTGSIMTESTENTMTRFDSSPTPADEQVKGNSEVIKVLLLSPSGSGKTTLLKSMQEYTVAEKSTYDQWQARDLVWSNVLGSVNKVLEAMERLSIMPENQSAFDDAHKILWSDGEDPFISGLNLPRIKKEAQVLRELWSDTGFQMAIKRSSEYHFHDNTVHYITQIHEIAEQLFTSCAPRVTDVLRARVRTTGIHEVFVSYKDCKFRVNDVGGERSERKKWSHVFADHSTVIFPVDVTAYGRSLTEADADRMSEHFILFEGIANMDLFTKSHFIVPFTKMDLLEGHMEKNDVNSCHPLTWHIPKTWFPIRNSGEYIEALKSSFQSLMRDPERRQRIQFICVDLVDVEEQNAAVDILELIRTLNKQDSSKLDGLPEPLSLIAEETDDTTYVAQR

SEQ ID NO: 38241 - DNA, 2918 bp, Muscodor strobelii
  misc_feature: SGI EST ID NO. CUFF.91692.0
  misc_feature: Variant of the nucleotide sequence at SEQ ID NO 38239
cgcgagagagcgagatgcccatatgtgctgctccgcccataaatgcaaggtatcatactttcccgacagccttgttcccaaatacattttctcactaagctcgtcattcttttaacgactgactctccatgcatttcttctcgttaattcgaaagacatggaccccctcacaattgttcaagttaacgggacagttgtttcccttggcgatgccgtgttaagatgtatcacacagctgagctcgttgaaggcacagtttcacgatgcgctgatcattgttacctctatgattggccagcttcatttagtgaaagctgcgcaagatcagttgtcgctcatagctatgccccattgttctaatgacgaaggcaggcatctacaacttgcttgccaaattgggggcgcactggatagctttaatccagtcataatggcattggaacggcagctgtgtacctacaattcggctagtgacagtaagatgacaatcattaacagattggggtttctcaaagacgatgcagatatgactaatctctcaatgcttcttgaccgacaagtaaacgccctgaaccttcttttacaggctctccaatgtcaaacatgggctcagcaaaacaacttcatcgctaagtcgaaaagccagtctattctaaaactcgcggaagactgctcttcttcccttgttggtcttgaggatacgggcagcatcatgacagaatcaacggaaaacaccatgactcgattcgagttcgatgatgttctatgcaaaacattgctctatcgcgtagcagagaagacccatttacgactcgcaatacgaagcagaaaatttaggaaatcaggggtctcgcatagctccggttcaattcgacttccaagggcgcaatcttctacgcaggcaacggcatctgtaactagaagcatacaggtagacgtttatgatcctcaaagtctaaggtcagaatcaccaacactcggagaatcaaaaagctcatctccaacgccggccgatgaacaagtcaaagggaactcagaagtcatcaaagtcttactcctttcgccatccggaagcgggaagacgactcttttgaaatccatgcaagaatatacagttgcagagaagagtacatacgaccagtggcaggctcgagacctggtctggagcaatgtattaggctccgtgaataaagtactagaggcaatggaaagactctcaatcatgccagagaaccagtctgcattcgacgatgcgcataaaattctatggagcgatggcgaagacccgttcataagcggcttgaacttgccgcgcatcaaaaaagaagcccaggtacttcgggaactttggtctgatacaggatttcagatggctatcaagcgaagcagcgaataccactttcacgataatacagtccactatatcactcagattcacgaaatagcggaacaattattcacttcctgcgcgccccgggtcacggatgtattgcgggcaagagtccgaactacgggaatccacgaagtgtttgtcagctacaaggactgtaagtttcgtgtcaacgatgtgggaggagaaaggagtgagcgcaaaaaatggagtcacgtttttgcagatcactcaaccgtgattttccccgtcgacgtaactgcctacggaaggagtctcaccgaggcggacgccgaccgcatgagtgagcacttcatcttatttgaaggcatagcgaacatggatttgttcacgaagtcacatttcatcgtgccctttaccaaaatggatcttctcgaaggacatatggagaaaaatgacgtgaattcctgtcatccactcacctggcacattcccaagacgtggtttcctattcggaattctggagaatatatagaggctctaaagagcagctttcaaagcttgatgagagaccccgaacgccggcagagaatccagttcatttgcgtcgatttggtagatgtcgaagagcaaaatgcggcagtagatatactcgaactgatacgaacactcaacaagcaagattcgagcaagctggatggactgcccgagcctttatcattgatagctgaagagacagatgacacaacttatgtcgcacagagatagtattcctatcaattggctgtccattgactcctcagcgaatgtcgtctagcgagccgttgcaacgcccacactggttttcgctagactgcgcgacttcgcaacttgtcatgtaaatggatggaacatattccaacacactgcgtagtgtcacgtatctggagtgtcaacgtggggaaatttgtgttcctttgtgtttgagtcgggagcagctagtataatcatagagtgtcagggaggggcacagaatatcctctagacggcttgtgggctctgttacatcgctgtgagtattagcgaacgcgaccatgacatcgcgttagtccgtctaacattgacatctacattacagcgaatacaagcaatggcatagatcccgcccgtttattatgaccttcatgcagaccgatgttctctgctactgacttcagggacttgcgcttagcctatgtggacggctgaaaaactagctgcaggtggattgccaaaggaattgagcagttgcgacgatgctatgtctgaggaacacgacgagactctgtaaatatcagatctaaatctgcgcaacactttctttgaaagtaatgctttttattcatttgttctaataggccttttgctaaaagtcatcaccactacggactttgaagagaagcaacactaactttgctaccccttgttttgaacgtcgcttgtgatgcgctttcattgcacctggtcgcgacgatgtctacggggtcactctgcccggagcagtagaatatagggaagcaggttcatcgaggaagccatccaaccctac

SEQ ID NO: 38242 - DNA, 945 bp, Muscodor strobelii
  misc_feature: SGI cDNA ID NO. 573285
  misc_feature: Elevated expression when VOC is produced
  misc_feature: Encodes the peptide sequence at SEQ ID NO 38243
atgacaaccggatacgacatcatcatcatcggcggcggtccaggtggactgagtgctgcctcatctatcgttcgccaagaccacaagaccctcctcctagactctggtaaataccggaatatgaagagtaagatgcacacccttgcctcttgggaccacaaggaccccgaggagttccgggctgcggcgcgcgctgactttgaccgctacggttctgtgactgtcgagtttgcagaggcggagaccgtgaagcagcaggacgaccatttcgtggtgtcgggcgatggcaagacgtggattgggaaaaagatcattctggccactggtgtggaagacgtttttcccgatatccaggggtatggggaatgctggatcagcggcatctttcactgtttgtattgtcatggatgggaagaaaagggaatcagcacagcaggtatgctagccgagggcgacacgggtgccgttatcaccgcactgcacttcgcgcgtcaagccctacggatggcggacagcgtcaccctctacaccaacggcaacaagaagctcgcggaagagctcgaggtggctcttaaggcggcgccggcgccaatgatcgtcaacggccagaagatcacgaaactggtcaaggccccggagcgatcacaagtcacggttgaactcgaggacggcaccagcatcaccgaaggtttcattgcgcacaaacccaagacgaagcttcgcggtgatcttgcccagcagctgggtctagagatcacgccaatgaacactatcaaagtctttccaccgttcaaccagactagcttggaaggcgtctttgcagcgggcgactgctccagtcctatgatgacgctcacgcaggctctggcaacgggtacgtgtgtcggtggaggtgcgcccctgcagattcaagcagagacgtaccatcagaaagctatcttctag

SEQ ID NO: 38243 - protein, 314 aa, Muscodor strobelii
  misc_feature: SGI Peptide ID NO. 573285
  misc_feature (6)..(282): Pfam Id: PF07992 Pfam Desc: Pyridine nucleotide-disulphide oxidoreductase
  misc_feature (3)..(306): NCBI GI: 238490638 Blast Desc: thioredoxin reductase GliT-like, [Aspergillus flavus NRRL3357] gi|220696969|gb|EED53310.1| thioredoxin reductase GliT-like, [Aspergillus flavus NRRL3357]
  misc_feature (6)..(307): NCBI GI: 119470772 Blast Desc: pyridine nucleotide-disulphide oxidoreductase, [Neosartorya fischeri NRRL 181] gi|119406243|gb|EAW16194.1| pyridine nucleotide-disulphide oxidoreductase, [Neosartorya NRRL
  misc_feature (6)..(306): NCBI GI: 70992029 Blast Desc: thioredoxin reductase GliT [Aspergillus fumigatus Af293] gi|56609349|gb|AAW03299.1| GliT [Aspergillus fumigatus] gi|66848496|gb|EAL88825.1| thioredoxin reductase GliT fumigatus
  misc_feature (5)..(306): NCBI GI: 115397443 Blast Desc: ATEG_05135 [Aspergillus terreus NIH2624] gi|114192504|gb|EAU34204.1| ATEG_05135 [Aspergillus terreus NIH2624]
  misc_feature (5)..(310): NCBI GI: 238497546 Blast Desc: conserved [Aspergillus flavus NRRL3357] gi|220693282|gb|EED49627.1| conserved [Aspergillus flavus NRRL3357]
  misc_feature (5)..(306): NCBI GI: 39972893 Blast Desc: MGG_07741 [Magnaporthe grisea 70-15] gi|145012508|gb|EDJ97162.1| MGG_07741 [Magnaporthe grisea 70-15]
  misc_feature (3)..(306): NCBI GI: 242805748 Blast Desc: thioredoxin reductase GliT [Talaromyces stipitatus ATCC 10500] gi|218715221|gb|EED14643.1| thioredoxin reductase GliT [Talaromyces stipitatus ATCC 10500]
  misc_feature (1)..(314): NCBI GI: 238500882 Blast Desc: conserved [Aspergillus flavus NRRL3357] gi|220691912|gb|EED48259.1| conserved [Aspergillus flavus NRRL3357]
  misc_feature (5)..(308): NCBI GI: 121709618 Blast Desc: pyridine nucleotide-disulphide oxidoreductase, [Aspergillus clavatus NRRL 1] gi|119400619|gb|EAW11044.1| pyridine nucleotide-disulphide oxidoreductase, [Aspergillus NRRL
  misc_feature (1)..(314): NCBI GI: 157382479 Blast Desc: thioredoxin reductase [Hypocrea virens]
  misc_feature: Useful for introducing or modulating the production of volatile compounds
MTTGYDIIIIGGGPGGLSAASSIVRQDHKTLLLDSGKYRNMKSKMHTLASWDHKDPEEFRAAARADFDRYGSVTVEFAEAETVKQQDDHFVVSGDGKTWIGKKIILATGVEDVFPDIQGYGECWISGIFHCLYCHGWEEKGISTAGMLAEGDTGAVITALHFARQALRMADSVTLYTNGNKKLAEELEVALKAAPAPMIVNGQKITKLVKAPERSQVTVELEDGTSITEGFIAHKPKTKLRGDLAQQLGLEITPMNTIKVFPPFNQTSLEGVFAAGDCSSPMMTLTQALATGTCVGGGAPLQIQAETYHQKAIF

SEQ ID NO: 38244 - DNA, 1989 bp, Muscodor strobelii
  misc_feature: SGI EST ID NO. CUFF.91701.0
  misc_feature: Variant of the nucleotide sequence at SEQ ID NO 38242
gtcacatcgcgcctgacagttgagaatgttggtttcgcgcagagtggggcatgccgaaaacacgcgcaattcgtacccttcggtactggtatctacggattcttggcactcacatcgttgcctaaaccacgaacagcttgaggctacttgcaagtcagaaatctgtgatcctggcccccaatcgcctccttacagtgctacactgctataatgctacccagcggctatccggtatccgcctagtgcagcgagtaagggacaaggcaatctgctaaggaacgtataaagaccggtcactgagaggccaacgaaagcttcgataaatcgtcgccatcgcatcatcactcaattttgcaaggtctatactcacgtaccgatagttgatttcggagaacatcatcatcgtccacatagtttatcaacgactcacgcgcaatatgacaaccggatacgacatcatcatcatcggcggcggtccaggtggactgagtgctgcctcatctatcgttcgccaagaccacaagaccctcctcctagactctggtaaataccggaatatgaagagtaagatgcacacccttgcctcttgggaccacaaggaccccgaggagttccgggctgcggcgcgcgctgactttgaccgctacggttctgtgactgtcgagtttgcagaggcggagaccgtgaagcagcaggacgaccatttcgtggtgtcgggcgatggcaagacgtggattgggaaaaagatcattctggccactggtgtggaagacgtttttcccgatatccaggggtatggggaatgctggatcagcggcatctttcactgtttgtattgtcatggatgggaagaaaagggaatcagcacagcaggtatgctagccgagggcgacacgggtgccgttatcaccgcactgcacttcgcgcgtcaagccctacggatggcggacagcgtcaccctctacaccaacggcaacaagaagctcgcggaagagctcgaggtggctcttaaggcggcgccggcgccaatgatcgtcaacggccagaagatcacgaaactggtcaaggccccggagcgatcacaagtcacggttgaactcgaggacggcaccagcatcaccgaaggtttcattgcgcacaaacccaagacgaagcttcgcggtgatcttgcccagcagctgggtctagagatcacgccaatgaacactatcaaagtctttccaccgttcaaccagactagcttggaaggcgtctttgcagcgggcgactgctccagtcctatgatgacgctcacgcaggctctggcaacgggtacgtgtgtcggtggaggtgcgcccctgcagattcaagcagagacgtaccatcagaaagctatcttctagaattgttcagggaactacccagacagcttggctttgctgtttgagtcagaagggcaacattatttcagcgcaatacaaaaacgtaatgctcgcaagccctttttattgatcatctgctataatatcttcaactgaatcttgaacatgaacttgcagttactcaagctccggtcccttttgttttacgatctaacttggtggccaacgctgcgaactcttagcacgcactcttgcgagcattactgcctttagaacggatggttcacaacagtctcttcgctggccgtactcttttgttagatgggccctgaaaataacgtggtgtaattccattagcgcgttcttcaagccgacttgcatcaaccgctcaatgccaacttgatgaaatccgatcttgtaagagaagtggatatcctcttcggtgttgataccacagctcgatataccaagacccaatggcgtactgctgtgtacaaaaatgaatgtcagtggttgaaagacgtagagagtagcaggatggaagaacggtagtctcagccaagggctcatcagtgtagtatatggcatagagtatacgaatcaaagacagcacgtccgacaattaagc

SEQ ID NO: 38245 - DNA, 699 bp, Muscodor strobelii
  misc_feature: SGI cDNA ID NO. 573286
  misc_feature: Elevated expression when VOC is produced
  misc_feature: Encodes the peptide sequence at SEQ ID NO 38246
acatcacggaatatcaacctcgtcacccagaaaccctacttgccggatgggacggtgcatgtcgcatactacagaggcgtctcgggtgtcgccgcgacgggcgtgaaggggctggtcttctggtttttattcgtgaaggaggacgtggccgccagcaccccaaactgtccgagatattccgaagcagatgcagaggtgacaatggagcgattcggccacctgacgcttggccagggctacacctttcgcgatctttggaacagcagggtcaaggccgcaatgttccccatggaagagggagtggtgaggggatcgtggaacaatggggggagggttgtacttatgggtgattctacatcaaaggctacggtcagccctgggctcggggccaacactcatgtcgaaggtgtttgtcatcttgtgaatgagatggtagccctttttaaagactctccatcgcctcgcggaaatgaaattactgacatgtttaaaatatacgaagaaaagcatcggccacgtgcgacgcgtattgttacgatctctggcctcgtcacccgatacgaggcgatggagacatggtggatgaggctgcttctccccgtaatgggctggcttcctacaggtctggtgtcgtctctcctcgcgaagtattttgcggctgggcctctatttaacttcctgcccgagcctaatacatga

SEQ ID NO: 38246 - protein, 232 aa, Muscodor strobelii
  misc_feature: SGI Peptide ID NO. 573286
  misc_feature (1)..(183): NCBI GI: 154324026 Blast Desc: BC1G_00412 [Botryotinia fuckeliana B05.10] gi|150842641|gb|EDN17834.1| BC1G_00412 [Botryotinia fuckeliana B05.10]
  misc_feature (12)..(228): NCBI GI: 119483958 Blast Desc: FAD binding domain protein [Neosartorya fischeri NRRL 181] gi|119410038|gb|EAW19985.1| FAD binding domain protein [Neosartorya fischeri NRRL 181]
  misc_feature (12)..(230): NCBI GI: 115436930 Blast Desc: [Aspergillus terreus NIH2624] gi|114188496|gb|EAU30196.1| [Aspergillus terreus NIH2624]
  misc_feature (13)..(230): NCBI GI: 212545611 Blast Desc: FAD-dependent monooxygenase, [Penicillium marneffei ATCC 18224] gi|210064479|gb|EEA18574.1| FAD-dependent monooxygenase, [Penicillium marneffei ATCC 18224]
  misc_feature (12)..(228): NCBI GI: 146324709 Blast Desc: FAD-dependent monooxygenase [Aspergillus fumigatus Af293] gi|129555457|gb|EBA27209.1| FAD-dependent monooxygenase, [Aspergillus fumigatus Af293] gi|159123852|gb|EDP48971.1| A1163]
  misc_feature (28)..(193): NCBI GI: 121710708 Blast Desc: FAD binding domain protein [Aspergillus clavatus NRRL 1] gi|119401120|gb|EAW11544.1| FAD binding domain protein [Aspergillus clavatus NRRL 1]
  misc_feature (5)..(230): NCBI GI: 242783852 Blast Desc: FAD-dependent monooxygenase, [Talaromyces stipitatus ATCC 10500] gi|218720416|gb|EED19835.1| FAD-dependent monooxygenase, [Talaromyces stipitatus ATCC 10500]
  misc_feature (47)..(228): NCBI GI: 258575331 Blast Desc: [Uncinocarpus reesii 1704] gi|237902113|gb|EEP76514.1| [Uncinocarpus reesii 1704]
  misc_feature (34)..(231): NCBI GI: 255950832 Blast Desc: Pc22g22890 [Penicillium chrysogenum Wisconsin 54-1255] gi|211593200|emb|CAP99577.1| Pc22g22890 [Penicillium chrysogenum Wisconsin 54-1255]
  misc_feature (22)..(231): NCBI GI: 49409615 Blast Desc: monooxygenase [Aspergillus flavus]
  misc_feature: Useful for introducing or modulating the production of volatile compounds
TSRNINLVTQKPYLPDGTVHVAYYRGVSGVAATGVKGLVFWFLFVKEDVAASTPNCPRYSEADAEVTMERFGHLTLGQGYTFRDLWNSRVKAAMFPMEEGVVRGSWNNGGRVVLMGDSTSKATVSPGLGANTHVEGVCHLVNEMVALFKDSPSPRGNEITDMFKIYEEKHRPRATRIVTISGLVTRYEAMETWWMRLLLPVMGWLPTGLVSSLLAKYFAAGPLFNFLPEPNT

SEQ ID NO: 38247 - DNA, 1123 bp, Muscodor strobelii
  misc_feature: SGI EST ID NO. CUFF.91727.0
  misc_feature: Variant of the nucleotide sequence at SEQ ID NO 38245
cacatcacggaatatcaacctcgtcacccagaaaccctacttgccggatgggacggtgcatgtcgcatactacagaggcgtctcgggtgtcgccgcgacgggcgtgaaggggctggtcttctggtttttattcgtgaaggaggacgtggccgccagcaccccaaactgtccgagatattccgaagcagatgcagaggtgacaatggagcgattcggccacctgacgcttggccagggctacacctttcgcgatctttggaacagcagggtcaaggccgcaatgttccccatggaagagggagtggtgaggggatcgtggaacaatggggggagggttgtacttatgggtgattctacatcaaaggctacggtcagccctgggctcggggccaacactcatgtcgaaggtgtttgtcatcttgtgaatgagatggtagccctttttaaagactctccatcgcctcgcggaaatgaaattactgacatgtttaaaatatacgaagaaaagcatcggccacgtgcgacgcgtattgttacgatctctggcctcgtcacccgatacgaggcgatggagacatggtggatgaggctgcttctccccgtaatgggctggcttcctacaggtctggtgtcgtctctcctcgcgaagtattttgcggctgggcctctatttaacttcctgcccgagcctaatacatgagaccaatagtgattctcaataggtctcaaggcccatagttcctcttgctatcgcgggaatcaactccccttcttatttacggaaatgggccatggcacacaatcccagtatattctggatttgtatcggtgagcgttgccaacattgaaatccctggtcacgcccatcagctggtccgcaagcaggtagacaggcagatctgtagaagggctcaaagagagctgtgggctgtcaatgaagtccatggggaagcctcaatcaatacagtccaccatgtcctaatagagcaacgatattttttataaacagttagattctgaaaatgtcctggcagagttcttcgtataacatagcgtctatagtaacttcggaactggtggtaaatatgaaactgaatgatggaaactatatactatttctcga

SEQ ID NO: 38248 - DNA, 1251 bp, Muscodor strobelii
  misc_feature: SGI cDNA ID NO. 573287
  misc_feature: Encodes the peptide sequence at SEQ ID NO 38249
atgtcgacgaccacaaaagacaacgatggcggtagtatacgctgcaaactgtgcaataagccgataaggagtgaaagtgcttacaaacgtcatgtcaactactgccgccgcacattgtccaagcccaagaaacgcaagcgctcttgtaagagctgtcacatcgctaaatccaagtgttcctttgaattaccatgtactcgctgtgtttcgaagagcctgttctgcgagtatgagaagctgccagcatcaacaccaggcaatgaatcgtgcaaccgacctcaagatacggccgtgtcagcgggctcggaaggtagcgcaggcatcagcgcagatgaatgcatggtcgaggggccattattgtcggagtggtacactcctactatacagccaccgcggacagcaacggaacttcgcgaagacgttacccaacaagctagcatgaagatattactcgaagtcatgcaagggctcccggcaatgatgagtagcatagagatatttccctttttctttcacggaccgagcatggagtacgccttaccagagcctgttatcaaatgcatgcaaatatcacagctatttctgcaccacaacgcgagctcacatgaccaagcgatgtatctgtcacttctgaacgtagagatagcacgcctcgttcacatagatccgaacgcgtccaaagccgagctcatcgtagggcttcaagtacttcagatctacgccactctgaccgcgatagacagcgatgcgtctcggacgaaccaagcccccgagatcccagatgaatactctttctatataatggcttataaccatcagctgttcatgtctgacaactatagtgctttcgatatcgattacatcggccatgacaacgagacgtgggaagaattcatatacgcagaaacacaacgaagggcagcattattctggtttctacaaagtcgagtcctaaacttcaaccggggattcatgtgccctccggtgatggggtatcgcggtctggcacttccctcaccaaaggctctctgggctgcaacaacaaggaaggaatgggaagctgcgcacgcacgaatacgcacacaagggggacggcacggaccatacgggatgagcatgcgcacgctcggagatctcatcgacgcgcaatcagcaccgccggactcgtattactacgagcagagacggcaatggcttgcgaatgcagggcaagatggagtcctcctcttgatcggagcgagcatgatctga

SEQ ID NO: 38249 - protein, 416 aa, Muscodor strobelii
  misc_feature: SGI Peptide ID NO. 573287
  misc_feature (47)..(84): Pfam Id: PF00172 Pfam Desc: Fungal Zn(2)-Cys(6) binuclear cluster domain
  misc_feature (47)..(79): Pfam Id: PF00172 Pfam Desc: Fungal Zn(2)-Cys(6) binuclear cluster domain
  misc_feature (150)..(416): NCBI GI: 242783875 Blast Desc: conserved [Talaromyces stipitatus ATCC 10500] gi|218720421|gb|EED19840.1| conserved [Talaromyces stipitatus ATCC 10500]
  misc_feature (150)..(416): NCBI GI: 212545625 Blast Desc: conserved [Penicillium marneffei ATCC 18224] gi|210064486|gb|EEA18581.1| conserved [Penicillium marneffei ATCC 18224]
  misc_feature (45)..(358): NCBI GI: 119487381 Blast Desc: C6 finger domain protein, [Neosartorya fischeri NRRL 181] gi|119410640|gb|EAW20586.1| C6 finger domain protein, [Neosartorya fischeri NRRL 181]
  misc_feature (22)..(358): NCBI GI: 159122254 Blast Desc: C6 finger domain protein, [Aspergillus fumigatus A1163]
  misc_feature (26)..(358): NCBI GI: 70981977 Blast Desc: C6 finger domain protein [Aspergillus fumigatus Af293] gi|66844140|gb|EAL84479.1| C6 finger domain protein, [Aspergillus fumigatus Af293]
  misc_feature (143)..(415): NCBI GI: 212527562 Blast Desc: C6 finger domain protein, [Penicillium marneffei ATCC 18224] gi|210073336|gb|EEA27423.1| C6 finger domain protein, [Penicillium marneffei ATCC 18224]
  misc_feature (15)..(117): NCBI GI: 242784100 Blast Desc: TSTA_031440 [Talaromyces stipitatus ATCC 10500] gi|218720466|gb|EED19885.1| TSTA_031440 [Talaromyces stipitatus ATCC 10500]
  misc_feature (8)..(352): NCBI GI: 212541819 Blast Desc: conserved [Penicillium marneffei ATCC 18224] gi|210065971|gb|EEA20064.1| conserved [Penicillium marneffei ATCC 18224]
  misc_feature (144)..(353): NCBI GI: 46115252 Blast Desc: FG03468.1 [Gibberella zeae PH-1]
  misc_feature (7)..(78): NCBI GI: 242789241 Blast Desc: conserved [Talaromyces stipitatus ATCC 10500] gi|218717909|gb|EED17329.1| conserved [Talaromyces stipitatus ATCC 10500]
MSTTTKDNDGGSIRCKLCNKPIRSESAYKRHVNYCRRTLSKPKKRKRSCKSCHIAKSKCSFELPCTRCVSKSLFCEYEKLPASTPGNESCNRPQDTAVSAGSEGSAGISADECMVEGPLLSEWYTPTIQPPRTATELREDVTQQASMKILLEVMQGLPAMMSSIEIFPFFFHGPSMEYALPEPVIKCMQISQLFLHHNASSHDQAMYLSLLNVEIARLVHIDPNASKAELIVGLQVLQIYATLTAIDSDASRTNQAPEIPDEYSFYIMAYNHQLFMSDNYSAFDIDYIGHDNETWEEFIYAETQRRAALFWFLQSRVLNFNRGFMCPPVMGYRGLALPSPKALWAATTRKEWEAAHARIRTQGGRHGPYGMSMRTLGDLIDAQSAPPDSYYYEQRRQWLANAGQDGVLLLIGASMI

SEQ ID NO: 38250 - DNA, 1318 bp, Muscodor strobelii
  misc_feature: SGI EST ID NO. CUFF.91731.0
  misc_feature: Variant of the nucleotide sequence at SEQ ID NO 38248
cagcaacggaacttcgcgaagacgttacccaacaagctagcatgaagatattactcgaagtcatgcaagggctcccggcaatgatgagtagcatagagatatttccctttttctttcacggaccgagcatggagtacgccttaccagagcctgttatcaaatgcatgcaaatatcacagctatttctgcaccacaacgcgagctcacatgaccaagcgatgtatctgtcacttctgaacgtagagatagcacgcctcgttcacatagatccgaacgcgtccaaagccgagctcatcgtagggcttcaagtacttcagatctacgccactctgaccgcgatagacagcgatgcgtctcggacgaaccaagcccccgagatcccagatgaatactctttctatataatggcttataaccatcagctgttcatgtctgacaactatagtgctttcgatatcgattacatcggccatgacaacgagacgtgggaagaattcatatacgcagaaacacaacgaagggcagcattattctggtttctacaaagtcgagtcctaaacttcaaccggggattcatgtgccctccggtgatggggtatcgcggtctggcacttccctcaccaaaggctctctgggctgcaacaacaaggaaggaatgggaagctgcgcacgcacgaatacgcacacaagggggacggcacggaccatacgggatgagcatgcgcacgctcggagatctcatcgacgcgcaatcagcaccgccggactcgtattactacgagcagagacggcaatggcttgcgaatgcagggcaagatggagtcctcctcttgatcggagcgagcatgatctgacctggcttacatttatcctctaagtcatgtactgccagactgtgctatacccacttagtaggctgagtatacattgggaacagctcatttaccatcgctacctcattcacaagcaggctatgtatgagtatattcacgcactctacctgttctgtctgttccagattctaattaccagacacgacgcactggcgttttattaacgccgtatagatctagaaaatttaaagcccgccgaatagtttccattgttctaactttgatttaaaaattcggggtgtcatgtttggaaacttagattcgatggctgaatcaggcatctatcatcacttagatcagatagacaaagataccacaggttataaaataccatattctggtatgaccgaaatcaccgccagacggacaaaaccttgaagcaactctttcttatggttcccttgcaatagttcgtgctacgccgc

SEQ ID NO: 38251 - DNA, 1635 bp, Muscodor strobelii
  misc_feature: SGI cDNA ID NO. 573288
  misc_feature: Elevated expression when VOC is produced
  misc_feature: Encodes the peptide sequence at SEQ ID NO 38252
ggtcgtcgacttttaacattttcagatcattcttataatgccgaaaaggcatatcaatgtgctgtgactgctatacagcttgttcccttacttattcttcgagcattggaaaacaccgacaagcagtatcttttgacacaagtttccggtcttgcttcggacgctgccgctgtgactctaacagccggaaaagggagcttcgcagcaattgagatgctagagactggtcggggtatcctaacaagcactgtttatgatttgcgtgctgatatttcagctcttaagaagcaccatccgcagcttgcggaacgtttcgttcacctacgtgacaagttggacatcacagttcctagtcacaatttactgacattgtcggaaaattcggctgcaatcactcagaacatagctaacgagcgccgtgaagcgaatacccagcttgacgccttgaacaaggatattcgcgaccaacctggttttgagcggttcctgttaagtccatcagaagacgagatgcggagggcggcagctgacggtcctattattataattaacattagtttacatcgctgcgatgcttttctaatcttatcgtctcatattcaagctatatgtctaccactttcgagaaaagatcttcaagatcgggattgtcagtctcttgaaacactcgcttggctgtgggatgcggttgtctgcccggttctgaatgctctcgattttaacgagacaccgctggacggagtctggccgcgtgtctggtggattcctaccggacctctcgtgcggtttcctctccacgcagctggtaactatctggatggcgggtcagatactgctcttgacagagttatctcatcatatagcacttctgttaaggcgatcatatacggtcgtcaacgacggaatgatccagcactgatagcagaccgccaagtgactctcattgccatggaagaaacaccagggctatcgccacttcaattcgcaggtgaggagatcactggggtacaaaggatttgtgaatctctgcacctccaatctgtacggccaagattatacaagaacgaagtcttatcttctcttggaaaaagctggatattccactttgctggtcacggaggcgtagatcgtacaagcccgctgcatagtcggctgcttcttcgtgactgggctggagaccccttgactgtacagagcctgttagaaacgaacgtcgggacttcatcgccttttcttgcttacctatcggcgtgtgggactggcgagaacggaaatgaggatcttgctgacgaaggcatccacctgactgcagcgtgccaaattgcaggtttccggcacgtgctcggtacactatgggctgtgaatgacaaagtatgcgtcgatatggctgagggtatatatggagtcttacgagatgtcgcgcttagcagcgacgagatcagtgacgggacagtcagccgcgcattgcatcatgttatgcgaaagttgcgagaacgatgggtgaagaacatcaaaaaggataaaggcgagagagtacagaagatgcgcagcgtagaaagagatggggaattgctggatatcagggaggggactggggtgccggcctggattccttatgtacattacgggctctga

SEQ ID NO: 38252 - protein, 544 aa, Muscodor strobelii
  misc_feature: SGI Peptide ID NO. 573288
  misc_feature (13)..(544): NCBI GI: 67541931 Blast Desc: AN7129.2 [Aspergillus nidulans FGSC A4] gi|40741941|gb|EAA61131.1| AN7129.2 [Aspergillus nidulans FGSC A4] gi|259483542|tpe|CBF79016.1| TPA: conserved [Aspergillus FGSC
  misc_feature (15)..(543): NCBI GI: 256721670 Blast Desc: NECHADRAFT_44795 [Nectria haematococca mpVI 77-13-4]
  misc_feature (16)..(544): NCBI GI: 67516399 Blast Desc: AN0481.2 [Aspergillus nidulans FGSC A4] gi|40747424|gb|EAA66580.1| AN0481.2 [Aspergillus nidulans FGSC A4] gi|259489269|tpe|CBF89401.1| TPA: conserved [Aspergillus FGSC
  misc_feature (15)..(544): NCBI GI: 67516515 Blast Desc: AN0539.2 [Aspergillus nidulans FGSC A4] gi|40747482|gb|EAA66638.1| AN0539.2 [Aspergillus nidulans FGSC A4] gi|259489203|tpe|CBF89281.1| TPA: conserved [Aspergillus FGSC
  misc_feature (24)..(544): NCBI GI: 119474523 Blast Desc: NFIA_006040 [Neosartorya fischeri NRRL 181] gi|119407290|gb|EAW17240.1| conserved [Neosartorya fischeri NRRL 181]
  misc_feature (15)..(544): NCBI GI: 46116056 Blast Desc: FG03870.1 [Gibberella zeae PH-1]
  misc_feature (23)..(543): NCBI GI: 46120502 Blast Desc: FG04898.1 [Gibberella zeae PH-1]
  misc_feature (16)..(544): NCBI GI: 256728430 Blast Desc: NECHADRAFT_87858 [Nectria haematococca mpVI 77-13-4]
  misc_feature (15)..(544): NCBI GI: 256725534 Blast Desc: NECHADRAFT_98227 [Nectria haematococca mpVI 77-13-4]
  misc_feature (11)..(543): NCBI GI: 145244038 Blast Desc: An11g05420 [Aspergillus niger] gi|134079215|emb|CAL00389.1| protein product [Aspergillus niger]
  misc_feature: Useful for introducing or modulating the production of volatile compounds
GRRLLTFSDHSYNAEKAYQCAVTAIQLVPLLILRALENTDKQYLLTQVSGLASDAAAVTLTAGKGSFAAIEMLETGRGILTSTVYDLRADISALKKHHPQLAERFVHLRDKLDITVPSHNLLTLSENSAAITQNIANERREANTQLDALNKDIRDQPGFERFLLSPSEDEMRRAAADGPIIIINISLHRCDAFLILSSHIQAICLPLSRKDLQDRDCQSLETLAWLWDAVVCPVLNALDFNETPLDGVWPRVWWIPTGPLVRFPLHAAGNYLDGGSDTALDRVISSYSTSVKAIIYGRQRRNDPALIADRQVTLIAMEETPGLSPLQFAGEEITGVQRICESLHLQSVRPRLYKNEVLSSLGKSWIFHFAGHGGVDRTSPLHSRLLLRDWAGDPLTVQSLLETNVGTSSPFLAYLSACGTGENGNEDLADEGIHLTAACQIAGFRHVLGTLWAVNDKVCVDMAEGIYGVLRDVALSSDEISDGTVSRALHHVMRKLRERWVKNIKKDKGERVQKMRSVERDGELLDIREGTGVPAWIPYVHYGL

SEQ ID NO: 38253 - DNA, 1803 bp, Muscodor strobelii
  misc_feature: SGI EST ID NO. CUFF.91745.0
  misc_feature: Variant of the nucleotide sequence at SEQ ID NO 38251
gtttttcaccgctttgcatcttgacgtctgtcctactaatgaccgtatcacagctggtcgtcgacttttaacattttcagatcattcttataatgccgaaaaggcatatcaatgtgctgtgactgctatacagcttgttcccttacttattcttcgagcattggaaaacaccgacaagcagtatcttttgacacaagtttccggtcttgcttcggacgctgccgctgtgactctaacagccggaaaagggagcttcgcagcaattgagatgctagagactggtcggggtatcctaacaagcactgtttatgatttgcgtgctgatatttcagctcttaagaagcaccatccgcagcttgcggaacgtttcgttcacctacgtgacaagttggacatcacagttcctagtcacaatttactgacattgtcggaaaattcggctgcaatcactcagaacatagctaacgagcgccgtgaagcgaatacccagcttgacgccttgaacaaggatattcgcgaccaacctggttttgagcggttcctgttaagtccatcagaagacgagatgcggagggcggcagctgacggtcctattattataattaacattagtttacatcgctgcgatgcttttctaatcttatcgtctcatattcaagctatatgtctaccactttcgagaaaagatcttcaagatcgggattgtcagtctcttgaaacactcgcttggctgtgggatgcggttgtctgcccggttctgaatgctctcgattttaacgagacaccgctggacggagtctggccgcgtgtctggtggattcctaccggacctctcgtgcggtttcctctccacgcagctggtaactatctggatggcgggtcagatactgctcttgacagagttatctcatcatatagcacttctgttaaggcgatcatatacggtcgtcaacgacggaatgatccagcactgatagcagaccgccaagtgactctcattgccatggaagaaacaccagggctatcgccacttcaattcgcaggtgaggagatcactggggtacaaaggatttgtgaatctctgcacctccaatctgtacggccaagattatacaagaacgaagtcttatcttctcttggaaaaagctggatattccactttgctggtcacggaggcgtagatcgtacaagcccgctgcatagtcggctgcttcttcgtgactgggctggagaccccttgactgtacagagcctgttagaaacgaacgtcgggacttcatcgccttttcttgcttacctatcggcgtgtgggactggcgagaacggaaatgaggatcttgctgacgaaggcatccacctgactgcagcgtgccaaattgcaggtttccggcacgtgctcggtacactatgggctgtgaatgacaaagtatgcgtcgatatggctgagggtatatatggagtcttacgagatgtcgcgcttagcagcgacgagatcagtgacgggacagtcagccgcgcattgcatcatgttatgcgaaagttgcgagaacgatgggtgaagaacatcaaaaaggataaaggcgagagagtacagaagatgcgcagcgtagaaagagatggggaattgctggatatcagggaggggactggggtgccggcctggattccttatgtacattacgggctctgatcaatcttttgctactcatgacacgacctattgagaatagaacgaacgtacgtctctctttttgtctttctttaactcgccctacttcaccgtgtttcgaaaatttaatccac

SEQ ID NO: 38254 - DNA, 3981 bp, Muscodor strobelii
  misc_feature: SGI cDNA ID NO. 573289
  misc_feature: Encodes the peptide sequence at SEQ ID NO 38255
atggcgtccaacgaatgggagcgacacaaggccctcatcatcaacctctaccttattgagagaactccgctcaaggagatagtctctcacatgaaagacaaccatgggttcgatagacggaaatgccattacgagtaccagttcaagaagtggaacatcaggaagaatgctgagagagaagtttggcattggatcatccatgaagccgataaaagaggcggaaggccgtttgaggccaccttgttcgacatgcctctgtctgaaaagaaggttcgtaagcagatacaaagataccggacaattccgaccgcggaggagttcgggagacgactacccagcccaaagctaccggatggagtgatcgttcgtatccgaacacctgagcctattgaagtgaggatacattggcccatttgtctcccttggtttctgttcaaggatcgaatcatgcccacgttacaccatcccagcgctttcatgcagcactttcttgtcgccatcgagtctgttgatgtcaagccagtaggcattagaaacagcacaatcgattcactatacataatatcgaggaatccattaagattctacgacacgatagggagtcttgcagcagcgattccgtataacgactcagaatctgaaaagaacgccacacgaaaagggaaaacagaccatactttccggatagtgagcgaattgctcaaggttatattctatcggctttcgaacaaactggaggatatccgaaacgaaagggccttggaactacacgataagcttatcctcaacctattcgagtcgattgcccatagtaatccacaaatgttatcgagcctaatttcgcatgcatgtgcgtctacaaaagcgattaaagaggctgtgtacggatgtgcaattcgtcagagacattatgctatcgtcgagcgtcttcttgagtcaagcgtagaccctgatcaacctgtacggattattggctccttcaaatgcaaaacagggcgaggtctcatcgaaatgaaattttcaactgcgggtatgcccacattcaatgggctacaagaagcagcacgcacgtgtgatctggatctcgcgtcgattctactgcgctatgattcagggggcaagcagtctagatcacaatggccctgggatggtttatctgccctcgtcaatgcagcatatttcggcaaaaatgatgaaaacgccagcgctaccattcggtttgttcgaatgcttatcgatcacgacacagaattcaagcggcaaagttgggtttgcccctattgtgatcgtgtccggatatcgtcgccgcttactttgtcggtaatgcgacgcaactacaacctaacaaaagccttcgtcaataacggaatgcactcgaatttattagtctaccatgccccacaatgttcatgtgttcgccatggatgggaacagaacgagcctctcgcgaaactcggcagtacccctggcccgttacatgctgccattctttcggacaatgaccagctcgttgagcttctcatacagccccttctctcagatctcacaggtatctcccaatccatactgaggtcacttttcatattttcttgcttgagtggcaatacatttgttgcgcggaaactcaacgctctcaagatagatctcaattatggatggaacttggatttcacacctctagctgcaacagcctggaataccgataccgatattgctgaaatgctgcttaatacaggggcatgtggaggccctacaatagacagcggggttctgagggttgcaacccctacccctatgcatgtcgcagcgtatcacggaaacacaaagcttatacaagaactcattcggataggcgcaagttgcaatgtcctcctatgtgaaaggaggggcgatcgctattttcgcggctttcttttcgacaagattgtacccaaccagctgtcaagtccactacaactcgccctattggccaaacatgtagattctgcaaacgccctcctaccgtcatcacgacttcatggcggggagttgacgctgagttacatcattgaagatggtcatctctcttcctctctcatatcccgaggtgcagaaaccgttggtcacgatatctatgacaccagcgttctacatgcggctgcagatgcatgcagtgaaccggcaattcaagcttacttctcctctggtggtgcttatacatcatcagctttattgagggcattctgcaatgaattccagtcccaaaactattccattatgcaactcatactggcccatcgccccagtttggttatcgatgatctcgaagcgatatgcatgatcgcccttattctagcgtctgagtgggatcacttccgtctgttcttagacaatgggctcatcccagccgcaaccagactcagacacgagtgtaagctcatgcgttacatgggacctgttcttaataacttccatcctcgtgtaaattggacgcccgtctcggccgcgttagtgactgcatctcgggatgggaacaccaagtacatggactctatgatcgacaggggatataaggtacaggagtttgatctagcggttgcgctgcaggcgcttccgttagaaaatctgtcgaagatctttcgttcaatttccactagacacatggatcttcgctataaccaatctcttctccttatcgcgataaactcgggtgagagtgaagaggtacagaatgtattgatgtacttaagttcagtcgatttccggtatccctggccggcttcccagttcatgccttctggcagcaccaatccccttatgctagcactttctctcatggatagagaagctgaccccaaagctcaaatgagagtcacttcgacaccaactcaaatatctgaatccactgaatttgatattctgaagctattacttgagaaaggaggtgcccgatcaatcacaagatcacttggttttggtcatgagtataatacagcatcggcaaaaattgtggcccgcggagacttaaggataaccaaattgatgattgagaaaggtgcgaatatcaatttaccaccacacaaagaacgggaaatgacagcactcgaagcggcagcggagagcgggcatctcgacatggttcgattcctactggacaatggcgctcgacttgacaaagaaatgcggatatattatgttcgttctgtcaactttgctttgcaacgtggccataatactgtcgctgactttctacgcgagcatgggcaatggtcggaaagagacagcatgctgcaagaccgtcatggttcctctgaacgttggaccttcttccgatacaacaacatattggatgactggcacatcatcttcacaagttcatgtgagcacatgagcaagactatatctcaaagcaatgcatggttatctgttgaaatctacgatgacgacaccgactccgatagtggttcagatgaagatgattgttctgaatcgtgcgaagaaggcgagatgtcagatcagatgaacatggattctgcaaatttcaacagtgtcaacacaagtggcgtttccaaagaagtggctagtagcagggaactggacattgatagtgtgcctattgttgaggtaccattgagcggcagaactactgattgggacacgaatggtccaggcgagaacgttataccccctcagttgtcgttgctgcccatgcgaacgcatccacttcttgaaagcatggctcacaacactcatgcgagcacggtggacgaatcccacgtcgacatccacttacagggtcaacctcacgttacgagcggtgatgaggcgcgtgaggagatagtaggggcagcagggtggatacctaacttcggaacgagtgaggaaataccattcgaggctattccagactggcaagacattcctttcaatttcttcgatgatcccgggtgggagggaccttttggcggagtagaggatgttgcggatgtttttgatatttga

SEQ ID NO: 38255 - protein, 1326 aa, Muscodor strobelii
  misc_feature: SGI Peptide ID NO. 573289
  misc_feature (1023)..(1055): Pfam Id: PF00023 Pfam Desc: Ankyrin repeat
  misc_feature (597)..(626): Pfam Id: PF00023 Pfam Desc: Ankyrin repeat
  misc_feature (232)..(1096): NCBI GI: 225684431 Blast Desc: conserved [Paracoccidioides brasiliensis Pb03]
  misc_feature (122)..(1087): NCBI GI: 226284810 Blast Desc: [Paracoccidioides brasiliensis Pb01]
  misc_feature (967)..(1092): NCBI GI: 115492243 Blast Desc: [Aspergillus terreus NIH2624] gi|114197609|gb|EAU39309.1| [Aspergillus terreus NIH2624]
  misc_feature (338)..(1150): NCBI GI: 189235951 Blast Desc: : similar to ankyrin 2,3/unc44 [Tribolium castaneum]
  misc_feature (954)..(1077): NCBI GI: 240110365 Blast Desc: ankyrin repeat containing protein [Coccidioides posadasii C735 delta SOWgp]
  misc_feature (290)..(1081): NCBI GI: 238576464 Blast Desc: MPER_12988 [Moniliophthora perniciosa FA553] gi|215449006|gb|EEB88973.1| MPER_12988 [Moniliophthora perniciosa FA553]
  misc_feature (290)..(1048): NCBI GI: 238576464 Blast Desc: MPER_12988 [Moniliophthora perniciosa FA553] gi|215449006|gb|EEB88973.1| MPER_12988 [Moniliophthora perniciosa FA553]
  misc_feature (1)..(321): NCBI GI: 115492243 Blast Desc: [Aspergillus terreus NIH2624] gi|114197609|gb|EAU39309.1| [Aspergillus terreus NIH2624]
  misc_feature (556)..(1086): NCBI GI: 212532817 Blast Desc: multiple ankyrin repeats single kh domain protein, [Penicillium marneffei ATCC 18224] gi|210071929|gb|EEA26018.1| multiple ankyrin repeats single kh domain protein, [Penicillium
  misc_feature (829)..(1081): NCBI GI: 242827177 Blast Desc: multiple ankyrin repeats single kh domain protein, [Talaromyces stipitatus ATCC 10500] gi|218712034|gb|EED11462.1| multiple ankyrin repeats single kh domain protein, [Talaromyces
MASNEWERHKALIINLYLIERTPLKEIVSHMKDNHGFDRRKCHYEYQFKKWNIRKNAEREVWHWIIHEADKRGGRPFEATLFDMPLSEKKVRKQIQRYRTIPTAEEFGRRLPSPKLPDGVIVRIRTPEPIEVRIHWPICLPWFLFKDRIMPTLHHPSAFMQHFLVAIESVDVKPVGIRNSTIDSLYIISRNPLRFYDTIGSLAAAIPYNDSESEKNATRKGKTDHTFRIVSELLKVIFYRLSNKLEDIRNERALELHDKLILNLFESIAHSNPQMLSSLISHACASTKAIKEAVYGCAIRQRHYAIVERLLESSVDPDQPVRIIGSFKCKTGRGLIEMKFSTAGMPTFNGLQEAARTCDLDLASILLRYDSGGKQSRSQWPWDGLSALVNAAYFGKNDENASATIRFVRMLIDHDTEFKRQSWVCPYCDRVRISSPLTLSVMRRNYNLTKAFVNNGMHSNLLVYHAPQCSCVRHGWEQNEPLAKLGSTPGPLHAAILSDNDQLVELLIQPLLSDLTGISQSILRSLFIFSCLSGNTFVARKLNALKIDLNYGWNLDFTPLAATAWNTDTDIAEMLLNTGACGGPTIDSGVLRVATPTPMHVAAYHGNTKLIQELIRIGASCNVLLCERRGDRYFRGFLFDKIVPNQLSSPLQLALLAKHVDSANALLPSSRLHGGELTLSYIIEDGHLSSSLISRGAETVGHDIYDTSVLHAAADACSEPAIQAYFSSGGAYTSSALLRAFCNEFQSQNYSIMQLILAHRPSLVIDDLEAICMIALILASEWDHFRLFLDNGLIPAATRLRHECKLMRYMGPVLNNFHPRVNWTPVSAALVTASRDGNTKYMDSMIDRGYKVQEFDLAVALQALPLENLSKIFRSISTRHMDLRYNQSLLLIAINSGESEEVQNVLMYLSSVDFRYPWPASQFMPSGSTNPLMLALSLMDREADPKAQMRVTSTPTQISESTEFDILKLLLEKGGARSITRSLGFGHEYNTASAKIVARGDLRITKLMIEKGANINLPPHKEREMTALEAAAESGHLDMVRFLLDNGARLDKEMRIYYVRSVNFALQRGHNTVADFLREHGQWSERDSMLQDRHGSSERWTFFRYNNILDDWHIIFTSSCEHMSKTISQSNAWLSVEIYDDDTDSDSGSDEDDCSESCEEGEMSDQMNMDSANFNSVNTSGVSKEVASSRELDIDSVPIVEVPLSGRTTDWDTNGPGENVIPPQLSLLPMRTHPLLESMAHNTHASTVDESHVDIHLQGQPHVTSGDEAREEIVGAAGWIPNFGTSEEIPFEAIPDWQDIPFNFFDDPGWEGPFGGVEDVADVFDI

SEQ ID NO: 38256 - DNA, 552 bp, Muscodor strobelii
  misc_feature: SGI EST ID NO. CUFF.91760.0
  misc_feature: Variant of the nucleotide sequence at SEQ ID NO 38254
aaatacagctgtcgtccctccctcctttgccccgtcggtctcaaattccaacgcaatcatggcgtccaacgaatgggagcgacacaaggccctcatcatcaacctctaccttattgagagaactccgctcaaggagatagtctctcacatgaaagacaaccatgggttcgatagacggaaatgccattacgagtaccagttcaagaagtggaacatcaggaagaatgctgagagagaagtttggcattggatcatccatgaagccgataaaagaggcggaaggccgtttgaggccaccttgttcgacatgcctctgtctgaaaagaaggttcgtaagcagatacaaagataccggacaattccgaccgcggaggagttcgggagacgacgtaagtgtcagtccggatcagaattctgatgaaactcacgtgtgtggccagtacccagcccaaagctaccggatggagtgatcgttcgtatccgaacacctgagcctattgaagtgaggatacattggcccatttgtctcccttggtttctgttcaaggatcg

SEQ ID NO: 38257 - DNA, 373 bp, Muscodor strobelii
  misc_feature: SGI cDNA ID NO. 573290
  misc_feature: Encodes the peptide sequence at SEQ ID NO 38258
atggagccccgcaaacgcgccgttcgtgttgtgaaacccatcgatcagcaatgggaattcaaacaggctgagaagggcgatgatacgtatctccccgtcgcccagtttcctacaaacatccatctagatttgctcagtcatgcactcattccggaccccttcatcgggaagaatgagcttgacgtgcagtgggtcggcgaaacggcctggctgtaccggacacgctttacgaccatcaacaagaaccacaaggccatcctcgctttcgatggtctcgatacctttgcagaggtatggttgaacggcaagaaaatcctcgagaccgacaacatgttcatcccagaacgtgttgaagtgacagatgtcctagccg

SEQ ID NO: 38258 - protein, 124 aa, Muscodor strobelii
  misc_feature: SGI Peptide ID NO. 573290
  misc_feature (9)..(123): NCBI GI: 85115055 Blast Desc: NCU00890 [Neurospora crassa OR74A] gi|28926600|gb|EAA35570.1| NCU00890 [Neurospora crassa OR74A]
  misc_feature (8)..(123): NCBI GI: 261361356 Blast Desc: beta-mannosidase [Verticillium albo-atrum VaMs.102]
  misc_feature (7)..(123): NCBI GI: 240107626 Blast Desc: Glycosyl hydrolases family 2, immunoglobulin-like beta-sandwich domain containing protein [Coccidioides posadasii C735 delta SOWgp]
  misc_feature (7)..(123): NCBI GI: 46107848 Blast Desc: FG00807.1 [Gibberella zeae PH-1]
  misc_feature (9)..(121): NCBI GI: 145614054 Blast Desc: MGG_01178 [Magnaporthe grisea 70-15] gi|145021032|gb|EDK05161.1| MGG_01178 [Magnaporthe grisea 70-15]
  misc_feature (7)..(123): NCBI GI: 119177590 Blast Desc: CIMG_07714 [Coccidioides immitis RS]
  misc_feature (7)..(123): NCBI GI: 171694832 Blast Desc: protein product [Podospora anserina] gi|170947658|emb|CAP59820.1| protein product [Podospora anserina]
  misc_feature (9)..(123): NCBI GI: 256735520 Blast Desc: NECHADRAFT_90428 [Nectria haematococca mpVI 77-13-4]
  misc_feature (9)..(123): NCBI GI: 116182672 Blast Desc: CHGG_01964 [Chaetomium globosum CBS 148.51] gi|88186261|gb|EAQ93729.1| CHGG_01964 [Chaetomium globosum CBS 148.51]
  misc_feature (9)..(123): NCBI GI: 258564124 Blast Desc: conserved [Uncinocarpus reesii 1704] gi|237908314|gb|EEP82715.1| conserved [Uncinocarpus reesii 1704]
  misc_feature (18)..(124): SWISSPROT Homolog: EC 3.2.1.25 Beta-mannosidase
MEPRKRAVRVVKPIDQQWEFKQAEKGDDTYLPVAQFPTNIHLDLLSHALIPDPFIGKNELDVQWVGETAWLYRTRFTTINKNHKAILAFDGLDTFAEVWLNGKKILETDNMFIPERVEVTDVLA

SEQ ID NO: 38259 - DNA, 868 bp, Muscodor strobelii
  misc_feature: SGI EST ID NO. CUFF.91775.0
  misc_feature: Variant of the nucleotide sequence at SEQ ID NO 38257
ttaccatgcccggtttcgcaatgtgatagctcacacacggtatgaatagcggtctgtttcgacgtttttgagggctcttgagggctctcgagggcctcaattggtgctcgacctcggcggtagttatgccgtctccaattgggattgacgtagccacacatgcagccagtcagaatcaccacttacacgcctcggcggaagccacgaagtatataaaacatcctacttcctacctcctctgttgatacgggttgctcttgactctcgattcccatttgcgacaaagcagagccacttccatctgccgtcggtccacttgcttgtgtgacgttaggacgctgagctctagccggtaccagcccgttgtttgatacctgcctcctgtcttgttgacgatcctatctgtcattcacccactgcgtgaatccgacggcttcccccccacgcttctctctttgcttcaactgaggagtctgattgatcttcacggtccttgtacgtaccccgcgatggagccccgcaaacgcgccgttcgtgttgtgaaacccatcgatcagcaatgggaattcaaacaggctgagaagggcgatgatacgtatctccccgtcgcccagtttcctacaaacatccatctagatttgctcagtcatgcactcattccggaccccttcatcgggaagaatgagcttgacgtgcagtgggtcggcgaaacggcctggctgtaccggacacgctttacgaccatcaacaagaaccacaaggccatcctcgctttcgatggtctcgatacctttgcagaggtatggttgaacggcaagaaaatcctcgagaccgacaacatgttcatcccagaacgtgttgaagtgac

SEQ ID NO: 38260 - DNA, 465 bp, Muscodor strobelii
  misc_feature: SGI cDNA ID NO. 573291
  misc_feature: Encodes the peptide sequence at SEQ ID NO 38261
atgtccacttctcgcgccactgacgagagtagtgctcttcctccaccgccagccgatggttggaaacatgagggcgtacgtgtgattccgggaaatcaattggacacagacacacactcaacaccaggcatgaacagggcagcagcagtgaatttcgcccgcgtgggagcgcaaaagatttgggccggaaccgtccacattcacccagatgcgaagaccggggcacatcatcacggacatcttgagtccgttatttatgtagtgaaaggcaaagcacgcatgagatggggcgacaatctagagtttactgctgaggcgagcccgggcgatttcatttacgtgccgccctacgtgcctcatcaggagatcaacgcgaatgtaagtagcacttgtttcatcgaaacccccgccaacgcccgggaaattctagaacatgacaacgccattccagaccatcacgaatag

SEQ ID NO: 38261 - protein, 154 aa, Muscodor strobelii
  misc_feature: SGI Peptide ID NO. 573291
  misc_feature (63)..(136): Pfam Id: PF07883 Pfam Desc: Cupin domain
  misc_feature (63)..(125): Pfam Id: PF07883 Pfam Desc: Cupin domain
  misc_feature (21)..(126): NCBI GI: 27377518 Blast Desc: blr2407 [Bradyrhizobium japonicum USDA 110] gi|27350662|dbj|BAC47672.1| blr2406 [Bradyrhizobium japonicum USDA 110]
  misc_feature (21)..(126): NCBI GI: 148253703 Blast Desc: BBta_2202 [Bradyrhizobium sp. BTAi1] gi|146405876|gb|ABQ34382.1| BBta_2202 [Bradyrhizobium sp. BTAi1]
  misc_feature (17)..(130): NCBI GI: 91789318 Blast Desc: cupin 2, barrel [Polaromonas sp. JS666] gi|91698543|gb|ABE45372.1| Cupin 2, conserved barrel [Polaromonas sp. JS666]
  misc_feature (18)..(128): NCBI GI: 239817178 Blast Desc: Cupin 2 conserved barrel domain protein [Variovorax paradoxus S110] gi|239803755|gb|ACS20822.1| Cupin 2 conserved barrel domain protein [Variovorax paradoxus S110]
  misc_feature (21)..(126): NCBI GI: 146338944 Blast Desc: BRADO1886 [Bradyrhizobium sp. ORS278] gi|146191750|emb|CAL75755.1| conserved [Bradyrhizobium sp. ORS278]
  misc_feature (21)..(126): NCBI GI: 163793789 Blast Desc: BAL199_12191 [alpha proteobacterium BAL199] gi|159180900|gb|EDP65417.1| BAL199_12191 [alpha proteobacterium BAL199]
  misc_feature (21)..(126): NCBI GI: 158425415 Blast Desc: AZC_3791 [Azorhizobium caulinodans ORS 571] gi|158332304|dbj|BAF89789.1| conserved [Azorhizobium caulinodans ORS 571]
  misc_feature (18)..(125): NCBI GI: 90422865 Blast Desc: cupin 2, barrel [Rhodopseudomonas palustris BisB18] gi|90104879|gb|ABD86916.1| Cupin 2, conserved barrel [Rhodopseudomonas palustris BisB18]
  misc_feature (21)..(126): NCBI GI: 220924958 Blast Desc: Cupin 2 conserved barrel domain protein [Methylobacterium nodulans ORS 2060] gi|219949565|gb|ACL59957.1| Cupin 2 conserved barrel domain protein [Methylobacterium ORS
  misc_feature (21)..(126): NCBI GI: 170751226 Blast Desc: cupin 2 domain-containing protein [Methylobacterium radiotolerans JCM 2831] gi|170657748|gb|ACB26803.1| Cupin 2 conserved barrel domain protein [Methylobacterium radiotolerans
MSTSRATDESSALPPPPADGWKHEGVRVIPGNQLDTDTHSTPGMNRAAAVNFARVGAQKIWAGTVHIHPDAKTGAHHHGHLESVIYVVKGKARMRWGDNLEFTAEASPGDFIYVPPYVPHQEINANVSSTCFIETPANAREILEHDNAIPDHHE

SEQ ID NO: 38262 - DNA, 2593 bp, Muscodor strobelii
  misc_feature: SGI EST ID NO. CUFF.91782.0
  misc_feature: Variant of the nucleotide sequence at SEQ ID NO 38260
cttttattttcaccattttgagaagaaagtcaaaaacactttatcagcatctcattcgactttctgcaatcttgaatcgccatgtccacttctcgcgccactgacgagagtagtgctcttcctccaccgccagccgatggttggaaacatgagggcgtacgtgtgattccgggaaatcaattggacacagacacacactcaacaccaggcatgaacagggcagcagcagtgaatttcgcccgcgtgggagcgcaaaagatttgggccggaaccgtccacattcacccagatgcgaagaccggggcacatcatcacggacatcttgagtccgttatttatgtagtgaaaggcaaagcacgcatgagatggggcgacaatctagagtttactgctgaggcgagcccgggcgatttcatttacgtgccgccctacgtgcctcatcaggagatcaacgcgaatggtgtgtgttaaataattcgtttcttttttctaattcgtgcaattcttctagaaagatctatgctaacgtacgttatagtaagtagcacttgtttcatcgaaacccccgccaacgcccgggaaattctagaacatgacaacgccattccagaccatcacgaatagataaaaggactaacatattttgatacacaaggcagacgaaacgctcgagtgtgtgctgatgcgaagtgattccgaagcaatcgcagttaacatccccgacctcgagcccgtcgaaaaacctacgactgtgaaatggattgacccaacacatactcattgattcagtagatctgagttcaatcaatatagtcaacagattaacggcaggctgtatcttgtcagagctacacttctataggttacgatgctcggataatcatgaacagaaggattattcatctacccctctatggcttctactgatatgactgtgattttcccatcgtcaaagccttgttattgcctcgccccgaacataatatagctttcagggcttcttgtgcttaacttcatgctacctccaaaagaatgactgatatgtgtatgctcccaatattactctggagcgtagctaattgctctgatgcacattgctactcgatagctgccgggcacgattgtcctctttcgtgggctgcgtctgttccgtctatctttgggtctttcttcttcagagagctgagcagactgtcggccatgggatttagcgttttcgtcttctttgtcttgtcatcaaacaatttagagctattcccgggcttcttttcgggcttcgtcttccccttccccttcaatttctgagcctgtttgctgattttgcccttcttcagcttacgcatcttgctctttctacctgtcttacgatgtcgccatttgaacgatactatcttcgctttagagcgaactagttttctcatattccctggattgactgcatgatagagatgtgctttcgttcttgagtatatcgccttcatccaccgggacggtttgttctccacactctgattggcgtcaactggtgacgtggctgagcttgatctgaatagctccattaggtatctccgagacggctttcttttccatgaatggcgagtgggatgatttggttgatcatttttgtccggctgatcaggctgggatacagggctcgggtcggtctcgagtgtctcgttggtggtcctgctgcgacacaagctctctgccgaatccgtgtatcggatattcccatgagactcctcaatggcttctgagccattcaccgtcattgtcggtacgcgggctatggcgcccgtctcagggtccaagaacggattttcgatcattgatcctaggttggagagccgaccatctgaggagtgtctcatagatcttgctcttggggcagtgttacgcacggaagaggtttgattaacctctgtttgcattctgtttggtattttgctagatgcgaacctttcaatgaactggcgacggctgttatttgtgccagtagacaatgttcccgatgttgagcgagcttcgtacgctccaatttcctcggggaagctagttgctaaggtatgaattgcaggtgatacacgaacaagagatgcttgtgtagtattccaattctctctcgacggatacttatcaaaaccgatgtatttggctgcgatatcattggcctgacctaccggttctggcgaactggatggactgaaaggtgaccggatgccttcagagggataagaggaaacggaacgaaattgaggacgaccgaccgattcactcgacaagatgtgcgaaagcggaacgaacatgtcttgatctttggcatcctgcacttcagagctcgagagactgtaagatcggattcgaggcgtctcattgtctccgttcgttacctgggcgctatcatgcaggccgtatcgattaggagggatgctatcgttaaccgcagtagtgcttggtcgtgggatgaacctaatggctgcagtttcagatatgacatccctttctttcatgggatgaccctgcgactcgtgataaaagtaagatttgacgttcgcatgaggatttgagttctcatttattgccagcaactcct

SEQ ID NO: 38263 - DNA, 3375 bp, Muscodor strobelii
  misc_feature: SGI cDNA ID NO. 573292
  misc_feature: Encodes the peptide sequence at SEQ ID NO 38264
atggctggtatcttcgccaagctgtggtatttcccacaggccgtactgcaatggctgtgcagtcacacagcgaagctgctgaagaacaacctttggcagaaaatgctgaagaatgttcttagtactgccattactatcacaatcggtgtcatcccggccgttgttgctgtctatggaaaatccacctttctcggggcaatggcctcatctttcggtcaaccgggccaacggttcggacagatggcagaaactctctctttaattgccctgggcacggttctcggccttggatggggcaatcttggcctattcctgtcaagccttgtatacgtcaacaatcacggcgccgctttcgcaatccgagctattttcttcgtcctcgcttccatcttccatggcttggtcagatccgccgctcccaggctgttccaacttgtcttcttctttatgttgatcaatctgagtatattgacgggcgctgcaaaagcggcaactcttgctgcagtcaaggccgttgtgtatccaatattcacggccattggtgttatgattctcgtcaatgtcacgatttttccacaattctcgagcggcttcttcggcaaaaccactgttgatactctcaaggaggttgtagactcatttcaggcagcagggaactggttcgcagcagattcagccactggcaaagagaaagaaggcgaagaagcatcttcacaatcgcagcgcaccaagcttgcctcccttaccaaccagaaaaacaagttaagaacctgccttgcaaactgcaaggcagctcaagcagaatgcaatttcgaattagtccttgcagtcttaccgccccgatctctcaaaccaatcagtgtgacaatgatgacacggcttgtccaaattaccatatgtctcatcaatgcatgtgaaagcaagtttgcgctagcagcatacgaaggaaatacttcctcgtcagaacgagcgaacgaaaagaaggcggatggaggcgaatcggattccgactcgagctgcgacgagaaaactgcaaagcataaacgcaacatcgatctcattaaacctaaacgcgagatcgaatcaggcgacattgatctcttggaggaaattctatccccgatccgcctaccagctcaagagatgcaagatcatgaattagcacacactcccgataacatcctcaaagcgatggatgagagaacgaatacattcgcaaaagcacttgccaaatttgatgctgaatctgctgtcgccctcgagagcgctgctgccaccacgcatggtcaagatctgatgagagatgtcacgcctcgcatggagacccatctgatttccacgttccttatcaacattagtcaagcgggtaatcaggttcttgatatgctcaagcatgctagaacactcatcgagagaaggcaaagtagaaatagtcgccgaaggctatattggccgcgcattagctggaagaaatggcttacttctggaggcgaatctgatggcaatgtgctaccagaaaacgccaggaaagaggcccgcgctggctatggaatgacagaagattccaagaacaaggatgaggaagctgtcaacactagtaatgaagcgcttttgagaccaaagcatgacatagaaactggcgaggcatacggggaacgccctattggactcgagagggacaagatcccacgccgcaagggcccccagaaggctaaagctgggactggactttggatccggggtcttacagctgacgtcgtcgagtttctcatggattctggtgaccttatgtttgcattgaaaatgacgattgcggctttgcttgtcacttggccggcgttcatcccctcgctgaatccttggtatgtctcagtgagaggcacttgggcaaccttgcagttaatcctcgtatttgaggtctcaattggcacgtcttttcgaggattctttctccgggcctttggtacaatattcggctgctctatcggcatcatcgcctatgaaatcgggcagggcaatctagtggttcttatcgttgtcctcgtcatcgggctcataccttcaagcttcattcacttgaccacttcatacgttaaagcaggcgtgatatccatcatcagtctgtcagtggtaggcatcgccactgttgtcccagtaaacaatgactcacccgaggtgacctacgtcaaacggcttgtttgtttcctcgtaggtggcattgtagcactcttagttgagatgacattcttccctgtgcgggcacgagatcggttagttgaatctctagcttccagcatcaagcaaatctcaatcatggaggcctctgtggctctcggagttgattcagcagccaaggtcgatctcaagtctcacgcgttgaatgcaagcttcaaaaacgccaaagacaaatcagagcaagcattagctgcagcaaagacattcttgcccttctgcctaactgagccgcgaattaagggtagcttcaggggtcaggcactagtatacggcgagatgatttatgttctctatcagatcattgaccgcatggacaatatgttgcatatacgcaaattgtacgggagtaccatcctcgaagagcttcacgcggaactcttaccacaccgccggaatgtggctggctgcgtaactctcctgttgttcgctgttggtgaggcactgacaactcggctcccgttaccccagtttctaccatccagtcgggttgctcaactgcgaaatgtagcccgcgttcgcgaacttttactcgagcgtagcagagacaccgctcagacaaacgatgcaattgaattcggctcaagcgaagcagaacaacccacgtcacaagacatggatgacccaacagcaaaatctttaacacaacgaaactttctcgcatggaacgcttcttccgcaggcatgatggaaatcatcgaatacttagaagagctcgtcgacctcgcgaagctgctagttggtgttaacgcatttcgtagcgggatgctagagcgcccgaagtttcaagaatacatcaccaaaatcaaggcccgcgaatccgaagccgctgctgcaaagtcgaacatactgaagagcaagaggttcaaaagtactaaactccataggcagttgcccgccagtcaatccacggatacgactggtctgcgccggcgccagacgacacaagttgatccccgggcgacgggcgacgctgctctcgatgatgaggatttctttgacagcagtgacattcctctgagcctccggcgcgtcatctcgaggcggatggacagaggcgaaagacttcccagactcaagaggaaggacgtgggttcaagcaacactcacacacttcgcaatgtcaagacatggatgggatag

SEQ ID NO: 38264 - protein, 1124 aa, Muscodor strobelii
  misc_feature: SGI Peptide ID NO. 573292
  misc_feature (26)..(1014): NCBI GI: 156063682 Blast Desc: SS1G_01959 [Sclerotinia sclerotiorum 1980] gi|154697293|gb|EDN97031.1| SS1G_01959 [Sclerotinia sclerotiorum 1980]
  misc_feature (29)..(1092): NCBI GI: 256726906 Blast Desc: NECHADRAFT_33411 [Nectria haematococca mpVI 77-13-4]
  misc_feature (29)..(1112): NCBI GI: 46121427 Blast Desc: FG05092.1 [Gibberella zeae PH-1]
  misc_feature (504)..(1112): NCBI GI: 154318544 Blast Desc: BC1G_02661 [Botryotinia fuckeliana B05.10] gi|150857791|gb|EDN32983.1| BC1G_02661 [Botryotinia fuckeliana B05.10]
  misc_feature (18)..(713): NCBI GI: 261352492 Blast Desc: conserved [Verticillium albo-atrum VaMs.102]
  misc_feature (31)..(1100): NCBI GI: 255716082 Blast Desc: KLTH0F02552p [Lachancea thermotolerans] gi|238935705|emb|CAR23885.1| KLTH0F02552p [Lachancea thermotolerans]
  misc_feature (33)..(953): NCBI GI: 50554017 Blast Desc: YALI0E26257p [Yarrowia lipolytica] gi|49650286|emb|CAG80018.1| YALI0E26257p [Yarrowia lipolytica]
  misc_feature (31)..(1093): NCBI GI: 254584700 Blast Desc: ZYRO0F16500p [Zygosaccharomyces rouxii] gi|186703696|emb|CAQ43389.1| Uncharacterized membrane protein YGL140C [Zygosaccharomyces rouxii] gi|238940811|emb|CAR28985.1|
  misc_feature (31)..(1095): NCBI GI: 45199180 Blast Desc: AFR661Wp [Ashbya gossypii ATCC 10895] gi|44985320|gb|AAS54033.1| AFR661Wp [Ashbya gossypii ATCC 10895]
  misc_feature (31)..(1012): NCBI GI: 50292291 Blast Desc: protein product [Candida glabrata] gi|49527890|emb|CAG61541.1| protein product [Candida glabrata]
MAGIFAKLWYFPQAVLQWLCSHTAKLLKNNLWQKMLKNVLSTAITITIGVIPAVVAVYGKSTFLGAMASSFGQPGQRFGQMAETLSLIALGTVLGLGWGNLGLFLSSLVYVNNHGAAFAIRAIFFVLASIFHGLVRSAAPRLFQLVFFFMLINLSILTGAAKAATLAAVKAVVYPIFTAIGVMILVNVTIFPQFSSGFFGKTTVDTLKEVVDSFQAAGNWFAADSATGKEKEGEEASSQSQRTKLASLTNQKNKLRTCLANCKAAQAECNFELVLAVLPPRSLKPISVTMMTRLVQITICLINACESKFALAAYEGNTSSSERANEKKADGGESDSDSSCDEKTAKHKRNIDLIKPKREIESGDIDLLEEILSPIRLPAQEMQDHELAHTPDNILKAMDERTNTFAKALAKFDAESAVALESAAATTHGQDLMRDVTPRMETHLISTFLINISQAGNQVLDMLKHARTLIERRQSRNSRRRLYWPRISWKKWLTSGGESDGNVLPENARKEARAGYGMTEDSKNKDEEAVNTSNEALLRPKHDIETGEAYGERPIGLERDKIPRRKGPQKAKAGTGLWIRGLTADVVEFLMDSGDLMFALKMTIAALLVTWPAFIPSLNPWYVSVRGTWATLQLILVFEVSIGTSFRGFFLRAFGTIFGCSIGIIAYEIGQGNLVVLIVVLVIGLIPSSFIHLTTSYVKAGVISIISLSVVGIATVVPVNNDSPEVTYVKRLVCFLVGGIVALLVEMTFFPVRARDRLVESLASSIKQISIMEASVALGVDSAAKVDLKSHALNASFKNAKDKSEQALAAAKTFLPFCLTEPRIKGSFRGQALVYGEMIYVLYQIIDRMDNMLHIRKLYGSTILEELHAELLPHRRNVAGCVTLLLFAVGEALTTRLPLPQFLPSSRVAQLRNVARVRELLLERSRDTAQTNDAIEFGSSEAEQPTSQDMDDPTAKSLTQRNFLAWNASSAGMMEIIEYLEELVDLAKLLVGVNAFRSGMLERPKFQEYITKIKARESEAAAAKSNILKSKRFKSTKLHRQLPASQSTDTTGLRRRQTTQVDPRATGDAALDDEDFFDSSDIPLSLRRVISRRMDRGERLPRLKRKDVGSSNTHTLRNVKTWMG

SEQ ID NO: 38265 - DNA, 1967 bp, Muscodor strobelii
  misc_feature: SGI EST ID NO. CUFF.91788.0
  misc_feature: Variant of the nucleotide sequence at SEQ ID NO 38263
tttggatccggggtcttacagctgacgtcgtcgagtttctcatggattctggtgaccttatgtttgcattgaaaatgacgattgcggctttgcttgtcacttggccggcgttcatcccctcgctgaatccttggtatgtctcagtgagaggcacttgggcaaccttgcagttaatcctcgtatttgaggtctcaattggcacgtcttttcgaggattctttctccgggcctttggtacaatattcggctgctctatcggcatcatcgcctatgaaatcgggcagggcaatctagtggttcttatcgttgtcctcgtcatcgggctcataccttcaagcttcattcacttgaccacttcatacgttaaagcaggcgtgatatccatcatcagtctgtcagtggtaggcatcgccactgttgtcccagtaaacaatgactcacccgaggtgacctacgtcaaacggcttgtttgtttcctcgtaggtggcattgtagcactcttagttgagatgacattcttccctgtgcgggcacgagatcggttagttgaatctctagcttccagcatcaagcaaatctcaatcatggaggcctctgtggctctcggagttgattcagcagccaaggtcgatctcaagtctcacgcgttgaatgcaagcttcaaaaacgccaaagacaaatcagagcaagcattagctgcagcaaagacattcttgcccttctgcctaactgagccgcgaattaagggtagcttcaggggtcaggcactagtatacggcgagatgatttatgttctctatcagatcattgaccgcatggacaatatgttgcatatacgcaaattgtacgggagtaccatcctcgaagagcttcacgcggaactcttaccacaccgccggaatgtggctggctgcgtaactctcctgttgttcgctgttggtgaggcactgacaactcggctcccgttaccccagtttctaccatccagtcgggttgctcaactgcgaaatgtagcccgcgttcgcgaacttttactcgagcgtagcagagacaccgctcagacaaacgatgcaattgaattcggctcaagcgaagcagaacaacccacgtcacaagacatggatgacccaacagcaaaatctttaacacaacgaaactttctcgcatggaacgcttcttccgcaggcatgatggaaatcatcgaatacttagaagagctcgtcgacctcgcgaagctgctagttggtgttaacgcatttcgtagcgggatgctagagcgcccgaagtttcaagaatacatcaccaaaatcaaggcccgcgaatccgaagccgctgctgcaaagtcgaacatactgaagagcaagaggttcaaaagtactaaactccataggcagttgcccgccagtcaatccacggatacgactggtctgcgccggcgccagacgacacaagttgatccccgggcgacgggcgacgctgctctcgatgatgaggatttctttgacagcagtgacattcctctgagcctccggcgcgtcatctcgaggcggatggacagaggcgaaagacttcccagactcaagaggaaggacgtgggttcaagcaacactcacacacttcgcaatgtcaagacatggatgggatagctgtacgcattgtggccaactcatacagcttattatttgtcagtggagttgtactagaaaggaggaggagtttttggtggtcgttgcccattattgcgatcacgacatccgagtcaccattttcttagtctgaaaagtatgaaacatcaaaatttgggcatgttgcttcgccacaggctagacgcacaagataccatcaattatctggcgaacggaatatacgtagacgtttagacacggcttcaatggacagttacttcactgcgttttgcagtgactgagttatacataattagagtatttcaaatatagaaagttctg

SEQ ID NO: 38266 - DNA, 909 bp, Muscodor strobelii
  misc_feature: SGI cDNA ID NO. 573293
  misc_feature: Encodes the peptide sequence at SEQ ID NO 38267
atgccgccacaagcgacaatcgtcgcgaagctcaaggtgcagctcaaactgtcgatcgcccgtctacgcatggtacagcaacgcgatgactccatgggaaaggcacagagacgagcaatggcccagctactcgaggtcggcaagatcgaatctgctaggataagaaccgagaatatcattcgatctgatatcaccaccgagctccacgagattcttgagctgtactgtgagcttcttcttgcacgtgccggactcttggagagttcgacatgcgacccgggtctcgaggaagctgtcaagagcatcatctatgcagcaccaaagactgaaatcaaagaattgcaacaagttcgtgtgcttcttgctgagaaattcggcaaggagtttgtgcttgcggcgatggagaactcaaacggtgcggtttccgagaaggtggtaaagaaacttagcgttactccgcctagaccggaactcgtgcaaggatatctcgaggagatcgcaaaggcttatggagttgcttggccaaacaaagctccagagcttggaaatgctcctgggccagtagatgacctgggtgacggaaatgctgatgatgatgaaccgggcggtggagagactgccaaagttgaggatgccgtacggatgaaagacagtaaatctgcgatggagagagaagatctaagccgggccacaccaccacggacgttggcgagtaatcctctgcatgtaaatccacctagcccttcgaccgaaaatcctcggcctaaagtgactctgaattcgatggaactgaaaccaagccaaaaaatggttgatgctggcatcgctaaaccaagagaacaagggaaaagcgacggcatacccgatttaaatgaactagcggcgcggttcgctgctctcaagagatga

SEQ ID NO: 38267 - protein, 302 aa, Muscodor strobelii
  misc_feature: SGI Peptide ID NO. 573293
  misc_feature (17)..(136): Pfam Id: PF03398 Pfam Desc: Eukaryotic protein of function, DUF292
  misc_feature (1)..(302): NCBI GI: 85108918 Blast Desc: NCU07991 [Neurospora crassa OR74A] gi|28924272|gb|EAA33425.1| conserved [Neurospora crassa OR74A]
  misc_feature (1)..(302): NCBI GI: 156063684 Blast Desc: SS1G_01960 [Sclerotinia sclerotiorum 1980] gi|154697294|gb|EDN97032.1| SS1G_01960 [Sclerotinia sclerotiorum 1980]
  misc_feature (1)..(302): NCBI GI: 171690866 Blast Desc: protein product [Podospora anserina] gi|170945381|emb|CAP71493.1| protein product [Podospora anserina]
  misc_feature (1)..(302): NCBI GI: 39952245 Blast Desc: MGG_01765 [Magnaporthe grisea 70-15] gi|145020381|gb|EDK04510.1| MGG_01765 [Magnaporthe grisea 70-15]
  misc_feature (1)..(302): NCBI GI: 256726905 Blast Desc: [Nectria haematococca mpVI 77-13-4]
  misc_feature (2)..(302): NCBI GI: 261352493 Blast Desc: DUF292 domain-containing protein [Verticillium albo-atrum VaMs.102]
  misc_feature (1)..(302): NCBI GI: 46121431 Blast Desc: FG05094.1 [Gibberella zeae PH-1]
  misc_feature (1)..(188): NCBI GI: 116195876 Blast Desc: CHGG_04536 [Chaetomium globosum CBS 148.51] gi|88180449|gb|EAQ87917.1| CHGG_04536 [Chaetomium globosum CBS 148.51]
  misc_feature (1)..(302): NCBI GI: 189211066 Blast Desc: PTRG_11533 [Pyrenophora tritici-repentis Pt-1C-BFP] gi|187977957|gb|EDU44583.1| PTRG_11533 [Pyrenophora tritici-repentis Pt-1C-BFP]
  misc_feature (1)..(171): NCBI GI: 154318548 Blast Desc: BC1G_02663 [Botryotinia fuckeliana B05.10] gi|150857793|gb|EDN32985.1| BC1G_02663 [Botryotinia fuckeliana B05.10]
MPPQATIVAKLKVQLKLSIARLRMVQQRDDSMGKAQRRAMAQLLEVGKIESARIRTENIIRSDITTELHEILELYCELLLARAGLLESSTCDPGLEEAVKSIIYAAPKTEIKELQQVRVLLAEKFGKEFVLAAMENSNGAVSEKVVKKLSVTPPRPELVQGYLEEIAKAYGVAWPNKAPELGNAPGPVDDLGDGNADDDEPGGGETAKVEDAVRMKDSKSAMEREDLSRATPPRTLASNPLHVNPPSPSTENPRPKVTLNSMELKPSQKMVDAGIAKPREQGKSDGIPDLNELAARFAALKR

SEQ ID NO: 38268 - DNA, 1312 bp, Muscodor strobelii
  misc_feature: SGI EST ID NO. CUFF.91805.0
  misc_feature: Variant of the nucleotide sequence at SEQ ID NO 38266
gcggggtctcgcggggcatggatatgcccaggctgtgtggtgtacctatttcctggtagcgttgtcgtattggataatccattgacaacatttgactaccaagttaaacagctaagtccggagacatcatcgactatctatcgcgtgttccacgggacgcctgcgtgtgagggttgcagccgcttgcgtctccatcatgccgccacaagcgacaatcgtcgcgaagctcaaggtgcagctcaaactgtcgatcgcccgtctacgcatggtacagcaacgcgatgactccatgggaaaggcacagagacgagcaatggcccagctactcgaggtcggcaagatcgaatctgctaggataagaaccgagaatatcattcgatctgatatcaccaccgagctccacgagattcttgagctgtactgtgagcttcttcttgcacgtgccggactcttggagagttcgacatgcgacccgggtctcgaggaagctgtcaagagcatcatctatgcagcaccaaagactgaaatcaaagaattgcaacaagttcgtgtgcttcttgctgagaaattcggcaaggagtttgtgcttgcggcgatggagaactcaaacggtgcggtttccgagaaggtggtaaagaaacttagcgttactccgcctagaccggaactcgtgcaaggatatctcgaggagatcgcaaaggcttatggagttgcttggccaaacaaagctccagagcttggaaatgctcctgggccagtagatgacctgggtgacggaaatgctgatgatgatgaaccgggcggtggagagactgccaaagttgaggatgccgtacggatgaaagacagtaaatctgcgatggagagagaagatctaagccgggccacaccaccacggacgttggcgagtaatcctctgcatgtaaatccacctagcccttcgaccgaaaatcctcggcctaaagtgactctgaattcgatggaactgaaaccaagccaaaaaatggttgatgctggcatcgctaaaccaagagaacaagggaaaagcgacggcatacccgatttaaatgaactagcggcgcggttcgctgctctcaagagatgagcaacacatcgatacatcacgtgtctctggggcaaccccgttctcaagccgtcaatatgcgtattgtcgttactccctctaccttctttggagttgtccgtacagagacacatcaactcgtatggctcagatatggaaatacataaacatatacttatatacccagtcagttcattcataaaatattgccgagtggcacaagaaatg

SEQ ID NO: 38269 - DNA, 1707 bp, Muscodor strobelii
  misc_feature: SGI cDNA ID NO. 573294
  misc_feature: Encodes the peptide sequence at SEQ ID NO 38270
atggatcccgacattgcgtcaatggactacaagaacatgtcggttgaaggtctttatggccgtctccttgaccttcactctgaaaaaggacggtctatcacttgtgctatggattggctcgatgagcatatcaaacaagacagcctgactgaaacccttctaattggtttcatcgagttatttcgcgagcattatgacgagcttgggtatagtttggatatcaatgacatcgatgaacagtttggtcaatggctcaagaacggtgatcttaccaatcgccgcagatacttgattacacagcaagattttcatcgtctgtggtccaagagtgctcttgctggaatctctgaagatattgaagagacctcggcccatgacaccaataactttacttctcggaatcacgatggccgtgttagccgcagagattctggctcacggtctaagaaggggacaaaggcaggtcgaaaggttgaggctctcatacatcaagattctgatccggacgacgtcgtcatcactcgcgagacaattttgatcaaatcctcgccaaataggagaaaatcaccacaagttgaacagagaaggaccgttccgacaattgaacaccgttcttacggtcgacgtggaagttttcatcatcccgattcttatctttcctcaccaccaccgaagaaatacacatgcaagcgctgcggagacactggccattggattcggttctgcccaacaaacctcgacccttcatttgatcggcccccaaccgaagattacgaatgttatatctgtggggaagtgggatcacattttggaactctctgcccgcagaatgaagcaaaacactccctaacaaagcagcgagaaagtgctagggctgatatcggatcgcatgcccaagctctgcaggactataggtctcgaatcacgacaccgaggggtcatcggcaaggatctcgctctattggggatgggcgaaatgacgaccgccatcttcgggacgagggctgggatgacaaatcggacaccaatccagatatttcgccttacacggcgcgagctcgcatgacccgagatagacgaatccggtcacaacattattcacctccacgagagcgacgctcgatgtccccattcacgggtccaggtcaaggtcccgatcgtactcgcaccaagtacaaaagcaaacgccggcaacgtgatcttggtagttcctcaagcaaaaccgttgagggcaggcttgcatatgacgatgaaactgaactcatggacactgactcgcccacgcatatcccggattttgagcaccagcgcagggaaacttacccctcaagtgtgaaagtcaaccatgggaaggtcggagaggacatagatggctttctgcattcattggctactgaactaatgtcgcagaagtcgcagacagactctgacggagtgctgtctcgtcctggaatgctcgccatcgacgatgcatcaacagctcaacgcaatgagagccaatgtgatatcgcgccatcgactctccgtctgccctatcggccacgaggcgtagctatctcggaacccgagttacatccggtactcatgtctcttttcagaaatcgcgaaaatcccatcatcaacaagaaagccaagcgcatgactgccgatcagatgatggacaagcgcaaaaacacgatagccgtacaagatgcagtcatgaactga

SEQ ID NO: 38270 - protein, 568 aa, Muscodor strobelii
  misc_feature: SGI Peptide ID NO. 573294
  misc_feature (226)..(333): NCBI GI: 85108914 Blast Desc: NCU07990 [Neurospora crassa OR74A] gi|28924271|gb|EAA33424.1| [Neurospora crassa OR74A]
  misc_feature (137)..(254): NCBI GI: 256732073 Blast Desc: NECHADRAFT_104433 [Nectria haematococca mpVI 77-13-4]
  misc_feature (137)..(254): NCBI GI: 46136753 Blast Desc: FG09892.1 [Gibberella zeae PH-1]
  misc_feature (137)..(251): NCBI GI: 156056244 Blast Desc: SS1G_05474 [Sclerotinia sclerotiorum 1980] gi|154703258|gb|EDO02997.1| SS1G_05474 [Sclerotinia sclerotiorum 1980]
  misc_feature (137)..(251): NCBI GI: 154291216 Blast Desc: BC1G_15234 [Botryotinia fuckeliana B05.10] gi|150847047|gb|EDN22240.1| BC1G_15234 [Botryotinia fuckeliana B05.10]
  misc_feature (154)..(251): NCBI GI: 225678027 Blast Desc: zinc knuckle domain-containing protein [Paracoccidioides brasiliensis Pb03]
  misc_feature (154)..(251): NCBI GI: 226280394 Blast Desc: conserved [Paracoccidioides brasiliensis Pb01]
  misc_feature (222)..(251): NCBI GI: 238838837 Blast Desc: MPE1 [Microsporum canis CBS 113480]
  misc_feature (179)..(251): NCBI GI: 212528780 Blast Desc: zinc knuckle domain protein [Penicillium marneffei ATCC 18224] gi|210073945|gb|EEA28032.1| zinc knuckle domain protein [Penicillium marneffei ATCC 18224]
  misc_feature (209)..(254): NCBI GI: 261351880 Blast Desc: MPE1 [Verticillium albo-atrum VaMs.102]
MDPDIASMDYKNMSVEGLYGRLLDLHSEKGRSITCAMDWLDEHIKQDSLTETLLIGFIELFREHYDELGYSLDINDIDEQFGQWLKNGDLTNRRRYLITQQDFHRLWSKSALAGISEDIEETSAHDTNNFTSRNHDGRVSRRDSGSRSKKGTKAGRKVEALIHQDSDPDDVVITRETILIKSSPNRRKSPQVEQRRTVPTIEHRSYGRRGSFHHPDSYLSSPPPKKYTCKRCGDTGHWIRFCPTNLDPSFDRPPTEDYECYICGEVGSHFGTLCPQNEAKHSLTKQRESARADIGSHAQALQDYRSRITTPRGHRQGSRSIGDGRNDDRHLRDEGWDDKSDTNPDISPYTARARMTRDRRIRSQHYSPPRERRSMSPFTGPGQGPDRTRTKYKSKRRQRDLGSSSSKTVEGRLAYDDETELMDTDSPTHIPDFEHQRRETYPSSVKVNHGKVGEDIDGFLHSLATELMSQKSQTDSDGVLSRPGMLAIDDASTAQRNESQCDIAPSTLRLPYRPRGVAISEPELHPVLMSLFRNRENPIINKKAKRMTADQMMDKRKNTIAVQDAVMN

SEQ ID NO: 38271 - DNA, 537 bp, Muscodor strobelii
  misc_feature: SGI EST ID NO. CUFF.91813.0
  misc_feature: Variant of the nucleotide sequence at SEQ ID NO 38269
ctctttgctaccgagatgcctgctttgtggccaatgcagaatgaagctaactgaggatccagtgcccgcagaatgaagcaaaacactccctaacaaagcagcgagaaagtgctagggctgatatcggatcgcatgcccaagctctgcaggactataggtctcgaatcacgacaccgaggggtcatcggcaaggatctcgctctattggggatgggcgaaatgacgaccgccatcttcgggacgagggctgggatgacaaatcggacaccaatccagatatttcgccttacacggcgcgagctcgcatgacccgagatagacgaatccggtcacaacattattcacctccacgagagcgacgctcgatgtccccattcacgggtccaggtcaaggtcccgatcgtactcgcaccaagtacaaaagcaaacgccggcaacgtgatcttggtagttcctcaagcaaaaccgttgagggcaggcttgcatatgacgatgaaactgaactcatggacactgactcgcccacgcatatcccgg

SEQ ID NO: 38272 - DNA, 432 bp, Muscodor strobelii
  misc_feature: SGI cDNA ID NO. 573295
  misc_feature: Encodes the peptide sequence at SEQ ID NO 38273
atgctttccttcatactaatacagaaccgccaagggaagacacggctcgcaaagtactacgtgccctacacagacgacgagaagatcaaactgaagggcgaggtccaccgcctcgtagcaccacgcgaccaaaagtaccaatcaaacttcgtcgagttccgcaaccacaagatcgtctaccgccgctacgcggggctgttcttctgcgcctgtgtcgacaccaacgacaacgagctagcctacctcgaggccatccacttcttcgtcgaggtcctcgacgccttcttcggcaacgtctgcgagctcgacctcgtcttcaacttctacaaagtctacgccattctcgacgaagtcttcctcgccggcgagatcgaggagacaagcaaacaggtcgtgctcacccgtctggaacacctcgataagctcgagtag

SEQ ID NO: 38273 - protein, 143 aa, Muscodor strobelii
  misc_feature: SGI Peptide ID NO. 573295
  misc_feature (1)..(143): Pfam Id: PF01217 Pfam Desc: Clathrin adaptor complex small chain
  misc_feature (1)..(143): NCBI GI: 171690862 Blast Desc: protein product [Podospora anserina] gi|170945379|emb|CAP71491.1| protein product [Podospora anserina]
  misc_feature (1)..(143): NCBI GI: 85108910 Blast Desc: AP-2 complex subunit sigma [Neurospora crassa OR74A] gi|74617209|sp|Q7SAQ1.1|AP2S_NEUCR RecName: Full=AP-2 complex subunit sigma; AltName: Full=Sigma2-adaptin; AltName: small 2
  misc_feature (1)..(143): NCBI GI: 116195880 Blast Desc: conserved [Chaetomium globosum CBS 148.51] gi|88180451|gb|EAQ87919.1| conserved [Chaetomium globosum CBS 148.51]
  misc_feature (1)..(143): NCBI GI: 261352494 Blast Desc: AP-2 complex subunit sigma [Verticillium albo-atrum VaMs.102]
  misc_feature (1)..(143): NCBI GI: 256727471 Blast Desc: [Nectria haematococca mpVI 77-13-4]
  misc_feature (1)..(143): NCBI GI: 46121429 Blast Desc: FG05093.1 [Gibberella zeae PH-1] gi|85700951|sp|Q4ICG5.1|AP2S_GIBZE RecName: Full=AP-2 complex subunit sigma; AltName: Full=Sigma2-adaptin; AltName: small 2
  misc_feature (1)..(143): NCBI GI: 39952239 Blast Desc: conserved [Magnaporthe grisea 70-15] gi|145020384|gb|EDK04513.1| conserved [Magnaporthe grisea 70-15]
  misc_feature (1)..(143): NCBI GI: 154318566 Blast Desc: clathrin coat assembly protein [Botryotinia fuckeliana B05.10] gi|150857802|gb|EDN32994.1| clathrin coat assembly protein [Botryotinia fuckeliana B05.10]
  misc_feature (1)..(143): NCBI GI: 169600853 Blast Desc: SNOG_03279 [Phaeosphaeria nodorum SN15] gi|111068890|gb|EAT90010.1| SNOG_03279 [Phaeosphaeria nodorum SN15]
  misc_feature (1)..(143): NCBI GI: 189191482 Blast Desc: AP-2 complex subunit sigma [Pyrenophora tritici-repentis Pt-1C-BFP] gi|187973686|gb|EDU41185.1| AP-2 complex subunit sigma [Pyrenophora tritici-repentis Pt-1C-BFP]
MLSFILIQNRQGKTRLAKYYVPYTDDEKIKLKGEVHRLVAPRDQKYQSNFVEFRNHKIVYRRYAGLFFCACVDTNDNELAYLEAIHFFVEVLDAFFGNVCELDLVFNFYKVYAILDEVFLAGEIEETSKQVVLTRLEHLDKLE

SEQ ID NO: 38274 - DNA, 1648 bp, Muscodor strobelii
  misc_feature: SGI EST ID NO. CUFF.91888.1
  misc_feature: Variant of the nucleotide sequence at SEQ ID NO 38272
ccgatccgcactgcactcttaaccccgagcattgctcacaatcgagacttccaacagcccgacttccaacgttcaaacatatgtagatgatctgctgagcttttcaatctgcaactgcagagctgtgtcgccagggctctgctagtcggacacgatgctttccttcatactaatacagaaccgccaagggaagacacggctcgcaaagtactacgtgccctacacagacgacgagaagatcaaactgaagggcgaggtccaccgcctcgtagcaccacgcgaccaaaagtaccaatcaaacttcgtcgagttccgcaaccacaagatcgtctaccgccgctacgcggggctgttcttctgcgcctgtgtcgacaccaacgacaacgagctagcctacctcgaggccatccacttcttcgtcgaggtcctcgacgccttcttcggcaacgtctgcgagctcgacctcgtcttcaacttctacaaagtctacgccattctcgacgaagtcttcctcgccggcgagatcgaggagacaagcaaacaggtcgtgctcacccgtctggaacacctcgataagctcgagtagaccacagacgaagatgcttgaaaggaaacaacgcgaacaagcgcgcctggctatttgatggtggctcgtgagagatcgacggagagaggaatgtggggggtgccataccatgtcccattagcgacggcgttcggcgttgtctctgcgaaagaaagagcccgtgggaaggtgtctccacggcgtggcgacaccaaactcacgcaattttcatcatgatatctacaggagatacctccagtccacaatgagcagtcgcaatgagccacatcgcctcgatatgaactctagaatatatacggggcttcttgcacgcctctgcgagaacatggacattgatgagtgtaagaaattagcatgattccaaaaaccttcaagccatggcaatacccccgtcaccaatatctgggcttaggaggatttgtgagaagccggcaggtactacgtcttaggtcattgaacttgagagcatagttttttttaattgagcagttatctgtattcagagcttttatgttaagacacaataacgataagcctcagcaaatgagagcacccataaagacgtcgatgtctcatctttatttgaacagatgcaaggtttccttatgaggaaacaggagcctgcatgtgatgctcttcaccgtttgcactatgaaatgcataacgagtagaatcacttagatcttgtaattagactcaacctctaagcgtacggactctggttttcattcgcccgacacggcgttgtttgccgcgtatcctacaccagggaaaatggcacaggtggtattaggcgatattggctctgtataatccaccgttaccataaatgaagttgccataactcaactccgtctggtaggaggaacaaaaagcaacaagtaatattcagagcgcgacctttaacggcaatatcgaccttggaaatgtgaacttcaaggcagattcctggatattagatcagcttgacgtctgctttagcttttatctatcgtattcgtcaggtttgtaatggcctcaacggactgagcgctggacaatagtatataatcatgacttcag

SEQ ID NO: 38275 - DNA, 507 bp, Muscodor strobelii
  misc_feature: SGI cDNA ID NO. 573296
  misc_feature: Encodes the peptide sequence at SEQ ID NO 38276
atgccgaagatacaacagccagggggccgcttggtaaatgttacgagctctgcgcatagatatcaaggagttcgctttcaagatcccaatttttcagaatccgactcgtacagtgaatttggagcttacggtcaagcaaaatcggcaaatattctgttcagtgtggcctggaaccagcgactagctgcacgaggtgttcatgcctttgcgccaactcctggaagtgttcaaacgggcttgcaagatcacgtcaaagcactcggagaccgagcccaagcgttatatgaagaggcagcttggaaagtcaagactctgcaacaaggctcagccaccattatccgagcagctctcgaccctaatctcaccgacaaggaaggggtttatgtcgaggatgccatcttgaagacggaccccagcgtcgtgaagtcatgggctactgatcccgaactggcacaaaaattgtggcagttgagcgaagagctcattggacagaaattcgacttttga

SEQ ID NO: 38276 - protein, 168 aa, Muscodor strobelii
  misc_feature: SGI Peptide ID NO. 573296
  misc_feature (1)..(167): NCBI GI: 39972379 Blast Desc: MGG_07491 [Magnaporthe grisea 70-15] gi|145016681|gb|EDK01111.1| MGG_07491 [Magnaporthe grisea 70-15]
  misc_feature (1)..(168): NCBI GI: 85112940 Blast Desc: NCU09735 [Neurospora crassa OR74A] gi|28926219|gb|EAA35201.1| [Neurospora crassa OR74A]
  misc_feature (10)..(168): NCBI GI: 46109408 Blast Desc: FG01586.1 [Gibberella zeae PH-1]
  misc_feature (10)..(168): NCBI GI: 145249970 Blast Desc: An14g07010 [Aspergillus niger] gi|134082009|emb|CAK46694.1| protein product [Aspergillus niger]
  misc_feature (1)..(168): NCBI GI: 154317021 Blast Desc: BC1G_03928 [Botryotinia fuckeliana B05.10] gi|150845540|gb|EDN20733.1| BC1G_03928 [Botryotinia fuckeliana B05.10]
  misc_feature (10)..(168): NCBI GI: 238839103 Blast Desc: WW domain-containing oxidoreductase [Microsporum canis CBS 113480]
  misc_feature (10)..(168): NCBI GI: 121700999 Blast Desc: short-chain dehydrogenase, [Aspergillus clavatus NRRL 1] gi|119396907|gb|EAW07338.1| short-chain dehydrogenase, [Aspergillus clavatus NRRL 1]
  misc_feature (1)..(166): NCBI GI: 238496683 Blast Desc: short-chain dehydrogenase, [Aspergillus flavus NRRL3357] gi|220694457|gb|EED50801.1| short-chain dehydrogenase, [Aspergillus flavus NRRL3357]
  misc_feature (1)..(166): NCBI GI: 169774723 Blast Desc: [Aspergillus oryzae RIB40] gi|83769692|dbj|BAE59827.1| protein product [Aspergillus oryzae]
  misc_feature (10)..(168): NCBI GI: 41582296 Blast Desc: oxidoreductase, short-chain dehydrogenase/reductase family [uncultured marine bacterium 463]
MPKIQQPGGRLVNVTSSAHRYQGVRFQDPNFSESDSYSEFGAYGQAKSANILFSVAWNQRLAARGVHAFAPTPGSVQTGLQDHVKALGDRAQALYEEAAWKVKTLQQGSATIIRAALDPNLTDKEGVYVEDAILKTDPSVVKSWATDPELAQKLWQLSEELIGQKFDF

SEQ ID NO: 38277 - DNA, 1731 bp, Muscodor strobelii
  misc_feature: SGI cDNA ID NO. 573297
  misc_feature: Encodes the peptide sequence at SEQ ID NO 38278
atgtcccgtagcaagtcccaagactcaaaaacaggaggaccagagtctcagaccgtccaagccatacctatccaaatatggcgaagtgacgggtcaaaagctgtcaatgttaactaccctgaagtctctccggatgaccgcgttgttatcgaatggcagaataagctgggccaggccctagctcgcgaactgatgcccggttcgaatcaccagtactttctgcaagagttccctgagaactaccacttgcggttttaccaaggtcgggaaccagagttgagaatcaatcgtcagtacactgataatcttgtagctcccgataaaaatgcgaagcattactacttgttcggctatccagaaaccgagaagttcgcggccaaatcaaaatactttcgatcgccgtatcacttcattccacaccttctgtggttggcgggtgactctcaagatcgaggcgactgccattgcgatttctgcgccggctcaaagcccaatactagcaaacaaggcaaaacaccatctacgtctacctctaaagcatcgtcaataccagccatcaatccccctacgaggcccagcccagttacatcggtgcaagcggtagcagaggcggttccgaacaacaactttaatcctaccgctcatcattcccaacccaatgcacaacaaccggtcccatctgtgactcagcagcagccagtcgcacaccaagtaccgcatattgccaatactgcacctgcattgcctatacccgcgcttgataatggtgccttattccgagtcggtgaggctgtttggttcaagaacaacaactcgtggcgagtgggcatgattgttggagtcacccaaggcctttctattattccttttggccaccccttatatcccactcaagaagtatccaagacagaggcggacgtacgacccttccttgctttcagcataccgaagattgccgatgtcctagcagaagtgaaaggtcttccgcttgcttcaattaattggcatgatctccaacagcgctttcatatcgcgctcgatccctctagagccgaggcactagcaattgaggctacgaaactagcagccactcgtatcgatcaatgctattcaactttcaatcgcatgcgtgaaacatcacctgattttgagctctacggcggcattttcctgggcgcggagaaaatatgtgctggtgaggccgttaggatgaaagtaccacgagaacagcaagacccaagctgggacacaagcctacccataatcttggctgtacaaaacatccgaattaccaaggaccagaccaaggcgttgactttcgaaggatcagtttggagactacagcatgcgccattggcacaaccagctcagccaaatcaagcctcgttacctacagccatgctccgagagaaagaattcagagatggcttgctccaaaatcgcggctggcgagtcgattgggtcattgtgaatccatccattgtccttgcagaatcggctattcgtgggcgattttacgagacacaacgtctcactcctatcctaaaccccgccaaataccaggaaatgattcagcagcaacatgtcgaggatatacagacgctcctcaacaatcacggtgattcaaatgggccccatgttggacgagtgcagtctcgggccttagctgttgctggcgccgttccagctggaaccctcacttcactgggcgcggatgtcaatgaggcatag

SEQ ID NO: 38278 - protein, 576 aa, Muscodor strobelii
  misc_feature: SGI Peptide ID NO. 573297
  misc_feature (23)..(561): NCBI GI: 116195852 Blast Desc: CHGG_04524 [Chaetomium globosum CBS 148.51] gi|88180437|gb|EAQ87905.1| CHGG_04524 [Chaetomium globosum CBS 148.51]
  misc_feature (252)..(561): NCBI GI: 256727584 Blast Desc: NECHADRAFT_76560 [Nectria haematococca mpVI 77-13-4]
  misc_feature (9)..(572): NCBI GI: 156031341 Blast Desc: SS1G_14092 [Sclerotinia sclerotiorum 1980] gi|154699494|gb|EDN99232.1| SS1G_14092 [Sclerotinia sclerotiorum 1980]
  misc_feature (9)..(562): NCBI GI: 154293357 Blast Desc: BC1G_13701 [Botryotinia fuckeliana B05.10] gi|150845358|gb|EDN20551.1| BC1G_13701 [Botryotinia fuckeliana B05.10]
  misc_feature (23)..(559): NCBI GI: 171690852 Blast Desc: protein product [Podospora anserina] gi|170945374|emb|CAP71486.1| protein product [Podospora anserina]
  misc_feature (254)..(576): NCBI GI: 39952221 Blast Desc: MGG_01753 [Magnaporthe grisea 70-15] gi|145020398|gb|EDK04527.1| MGG_01753 [Magnaporthe grisea 70-15]
  misc_feature (39)..(572): NCBI GI: 189206217 Blast Desc: [Pyrenophora tritici-repentis Pt-1C-BFP] gi|187975536|gb|EDU42162.1| [Pyrenophora tritici-repentis Pt-1C-BFP]
  misc_feature (245)..(563): NCBI GI: 85112945 Blast Desc: NCU09736 [Neurospora crassa OR74A] gi|28926220|gb|EAA35202.1| [Neurospora crassa OR74A]
  misc_feature (39)..(565): NCBI GI: 169621460 Blast Desc: SNOG_13940 [Phaeosphaeria nodorum SN15] gi|160704259|gb|EAT78565.2| SNOG_13940 [Phaeosphaeria nodorum SN15]
  misc_feature (45)..(207): NCBI GI: 261353092 Blast Desc: conserved [Verticillium albo-atrum VaMs.102]
MSRSKSQDSKTGGPESQTVQAIPIQIWRSDGSKAVNVNYPEVSPDDRVVIEWQNKLGQALARELMPGSNHQYFLQEFPENYHLRFYQGREPELRINRQYTDNLVAPDKNAKHYYLFGYPETEKFAAKSKYFRSPYHFIPHLLWLAGDSQDRGDCHCDFCAGSKPNTSKQGKTPSTSTSKASSIPAINPPTRPSPVTSVQAVAEAVPNNNFNPTAHHSQPNAQQPVPSVTQQQPVAHQVPHIANTAPALPIPALDNGALFRVGEAVWFKNNNSWRVGMIVGVTQGLSIIPFGHPLYPTQEVSKTEADVRPFLAFSIPKIADVLAEVKGLPLASINWHDLQQRFHIALDPSRAEALAIEATKLAATRIDQCYSTFNRMRETSPDFELYGGIFLGAEKICAGEAVRMKVPREQQDPSWDTSLPIILAVQNIRITKDQTKALTFEGSVWRLQHAPLAQPAQPNQASLPTAMLREKEFRDGLLQNRGWRVDWVIVNPSIVLAESAIRGRFYETQRLTPILNPAKYQEMIQQQHVEDIQTLLNNHGDSNGPHVGRVQSRALAVAGAVPAGTLTSLGADVNEA

SEQ ID NO: 38279 - DNA, 2685 bp, Muscodor strobelii
  misc_feature: SGI EST ID NO. CUFF.91836.0
  misc_feature: Variant of the nucleotide sequence at SEQ ID NO 38277
gttcgagctttagaacattgaacgtgcctgtcgtccactcttcgcgcggtcagccgtctctgaatcgcgtgctctgagtggtagaatatcaatggcgccgtgaatcttgcagccttgcttcaggaatttgttccactattacttctatcagccatcaatcattgtgtggtcttggcgtccacgttgagaaactggcaagcaaagccctatctaggaaagggatgcaaactattcacgatatcatacctaccgtttcacctggtgggttccaacttcaaaccatcgtcgaagagacaggagaccatcttttccacgcagacacttgcgacaattgacataacgacaagatagagagcagatgaacaaccatacaaaggatgtatgaggcggtcaggacaattatcgacgacaactggagcattgtggagatagtcaaagccgcgtgactgcacagtacaacttgctcccgcctcgagtgaacagtactgattgctcccgccttaacgcaaacaaccctcccaagcaccaggagacacttggtatccaaccaaggcattatctgtcttcagggaacacattgttcaatacgtcctctatgccaagacactgcgcaggattctcaaacccagttatcaaagatccagacttaatggacttggtcactgcaatcgccctgagtcatcatcgcattattcttgggcttcaaaccccatcctagaagaccaaactattcttacacagaaagtattgagacttgcttgccccagtgatgagatatcagaaataatacgggagtcatcaacatggcaacgacgatgtcccgtagcaagtcccaagactcaaaaacaggaggaccagagtctcagaccgtccaagccatacctatccaaatatggcgaagtgacgggtcaaaagctgtcaatgttaactaccctgaagtctctccggatgaccgcgttgttatcgaatggcagaataagctgggccaggccctagctcgcgaactgatgcccggttcgaatcaccagtactttctgcaagagttccctgagaactaccacttgcggttttaccaagctcccgataaaaatgcgaagcattactacttgttcggctatccagaaaccgagaagttcgcggccaaatcaaaatactttcgatcgccgtatcacttcattccacaccttctgtggttggcgggtgactctcaagatcgaggcgactgccattgcgatttctgcgccggctcaaagcccaatactagcaaacaaggcaaaacaccatctacgtctacctctaaagcatcgtcaataccagccatcaatccccctacgaggcccagcccagttacatcggtgcaagcggtagcagaggcggttccgaacaacaactttaatcctaccgctcatcattcccaacccaatgcacaacaaccggtcccatctgtgactcagcagcagccagtcgcacaccaagtaccgcatattgccaatactgcacctgcattgcctatacccgcgcttgataatggtgccttattccgagtcggtgaggctgtttggttcaagaacaacaactcgtggcgagtgggcatgattgttggagtcacccaaggcctttctattattccttttggccaccccttatatcccactcaagaagtatccaagacagaggcggacgtacgacccttccttgctttcagcataccgaagattgccgatgtcctagcagaagtgaaaggtcttccgcttgcttcaattaattggcatgatctccaacagcgctttcatatcgcgctcgatccctctagagccgaggcactagcaattgaggctacgaaactagcagccactcgtatcgatcaatgctattcaactttcaatcgcatgcgtgaaacatcacctgattttgagctctacggcggcattttcctgggcgcggagaaaatatgtgctggtgaggccgttaggatgaaagtaccacgagaacagcaagacccaagctgggacacaagcctacccataatcttggctgtacaaaacatccgaattaccaaggaccagaccaaggcgttgactttcgaaggatcagtttggagactacagcatgcgccattggcacaaccagctcagccaaatcaagcctcgttacctacagccatgctccgagagaaagaattcagagatggcttgctccaaaatcgcggctggcgagtcgattgggtcattgtgaatccatccattgtccttgcagaatcggctattcgtgggcgattttacgagacacaacgtctcactcctatcctaaaccccgccaaataccaggaaatgattcagcagcaacatgtcgaggatatacagacgctcctcaacaatcacggtgattcaaatgggccccatgttggacgagtgcagtctcgggccttagctgttgctggcgccgttccagctggaaccctcacttcactgggcgcggatgtcaatgaggcatagattattcttaggtagaaacaacgtaactccgaatcgactatcaacaccgtgctaaaatgccctttcgaataagtaacgtgtgactcgagtgtcactgtcacccgtcttaataggctgtagagcttcgtatcgataatagctcgaaacgcgaattgtctttcggatacgcaaaaatactactggcttccaa

SEQ ID NO: 38280 - DNA, 834 bp, Muscodor strobelii
  misc_feature: SGI cDNA ID NO. 573298
  misc_feature: Reduced expression when VOC is produced
  misc_feature: Encodes the peptide sequence at SEQ ID NO 38281
atggcagacatcgaatcgcttagcccgacggaggcattgtacgagtcccaaggagatcttcgcactctcgagacaaccgttgcgggagcgacgtacgtccaagccctgtcggagcaggaccagaagctgttcaaatcggctctgccggaagatcctgtcatcgccaccaaggagacaatattccatgcccaagggggtgggcagcccagcgatactggctctatgattacaagttcccccgcgggagatggcagtgaggtgcgcttcctggtgcagtccacacggcgcacaggagccggagtaatccttcatcagggcaagttgcaacccccgggagctgttccgatcgttggctcctccgtgggacagaagatagatggcgaaagccgggatctcttctctaggattcataccgcaggccatttactcggcctcgctgtccgatcactgggggaccagatccctgacgtcaccgagacaaaggcacagcactatccggatgctgcgtacgtggagtttcaggggaagattgacccggtcaagtatgccgagacgatccagaaggttctagacgacctggtgcagcaggatctccccgtgtgtgtgtcattcctcgaagccaagcgtctcagggagaaaggcattcatgtgccagacaacttcctccacgatacgtctgcagagactacaacgagagtcgtggagatcggggacctgggtggatatccatgtggcggtactcactgccagagtacatcgaagttggggagggtcatggtgggaaagatctcgaataaaaagggaaacacacaggttcgatatacagtatcatag

SEQ ID NO: 38281 - protein, 277 aa, Muscodor strobelii
  misc_feature: SGI Peptide ID NO. 573298
  misc_feature (231)..(273): Pfam Id: PF07973 Pfam Desc: Threonyl and Alanyl tRNA synthetase second additional domain
  misc_feature (57)..(129): Pfam Id: PF01411 Pfam Desc: tRNA synthetases class II (A)
  misc_feature (231)..(271): Pfam Id: PF07973 Pfam Desc: Threonyl and Alanyl tRNA synthetase second additional domain
  misc_feature (13)..(276): NCBI GI: 255946485 Blast Desc: Pc20g15380 [Penicillium chrysogenum Wisconsin 54-1255] gi|211588745|emb|CAP86867.1| Pc20g15380 [Penicillium chrysogenum Wisconsin 54-1255]
  misc_feature (10)..(277): NCBI GI: 261361653 Blast Desc: tRNA_SAD domain-containing protein [Verticillium albo-atrum VaMs.102]
  misc_feature (10)..(276): NCBI GI: 154318102 Blast Desc: BC1G_03034 [Botryotinia fuckeliana B05.10] gi|150843692|gb|EDN18885.1| BC1G_03034 [Botryotinia fuckeliana B05.10]
  misc_feature (14)..(277): NCBI GI: 70983967 Blast Desc: alanyl-tRNA synthetase [Aspergillus fumigatus Af293] gi|66845135|gb|EAL85471.1| alanyl-tRNA synthetase, [Aspergillus fumigatus Af293] gi|159123513|gb|EDP48632.1| alanyl-tRNA A1163]
  misc_feature (10)..(277): NCBI GI: 255942495 Blast Desc: Pc18g01720 [Penicillium chrysogenum Wisconsin 54-1255] gi|211586749|emb|CAP94396.1| Pc18g01720 [Penicillium chrysogenum Wisconsin 54-1255]
  misc_feature (7)..(276): NCBI GI: 238839250 Blast Desc: threonyl/alanyl tRNA synthetase [Microsporum canis CBS 113480]
  misc_feature (6)..(277): NCBI GI: 121720172 Blast Desc: alanyl-tRNA synthetase, [Aspergillus clavatus NRRL 1] gi|119404996|gb|EAW15358.1| alanyl-tRNA synthetase, [Aspergillus clavatus NRRL 1]
  misc_feature (10)..(276): NCBI GI: 154311339 Blast Desc: BC1G_06522 [Botryotinia fuckeliana B05.10] gi|150850919|gb|EDN26112.1| BC1G_06522 [Botryotinia fuckeliana B05.10]
  misc_feature (4)..(276): NCBI GI: 242804518 Blast Desc: alanyl-tRNA synthetase, [Talaromyces stipitatus ATCC 10500] gi|218717736|gb|EED17157.1| alanyl-tRNA synthetase, [Talaromyces stipitatus ATCC 10500]
  misc_feature (10)..(268): NCBI GI: 145245932 Blast Desc: An12g01270 [Aspergillus niger] gi|134079925|emb|CAK41056.1| protein product [Aspergillus niger]
  misc_feature (4)..(260): SWISSPROT Homolog: EC 6.1.1.7 Alanine--tRNA ligase
  misc_feature: Useful for introducing or modulating the production of volatile compounds
MADIESLSPTEALYESQGDLRTLETTVAGATYVQALSEQDQKLFKSALPEDPVIATKETIFHAQGGGQPSDTGSMITSSPAGDGSEVRFLVQSTRRTGAGVILHQGKLQPPGAVPIVGSSVGQKIDGESRDLFSRIHTAGHLLGLAVRSLGDQIPDVTETKAQHYPDAAYVEFQGKIDPVKYAETIQKVLDDLVQQDLPVCVSFLEAKRLREKGIHVPDNFLHDTSAETTTRVVEIGDLGGYPCGGTHCQSTSKLGRVMVGKISNKKGNTQVRYTVS

SEQ ID NO: 38282 - DNA, 1478 bp, Muscodor strobelii
  misc_feature: SGI EST ID NO. CUFF.91858.0
  misc_feature: Variant of the nucleotide sequence at SEQ ID NO 38280
cagacttgcatccccgcgccttccgggttctacttatgacatcatacgtcaatttctgctgcacgatcctattctttacctaatagcaatcatcaaatcaacaaattctcacctcgccaactcttgcgttgggaggcggtgtcatgacaataagctgataatggttgaccgtcaacccatttgaaatctctcttctccacctgcgacgtcgtcagcccccaaatccatgatagccaatctcctcctgcgtactcgcgtggctccctcttttcgattgttcacagatgccgaattgctgttggcgttcgtctgtcataagtcagcgctagtgccagacggagtggcgcaacaactagcgaaccattgtcaagttcgttttaacggcgatccgttacgcagtgacgagtacgagaaacactaaagtcgaatctctgcaggcgccgctgcggcgaggtcgcgaagcatcacacaatggcagacatcgaatcgcttagcccgacggaggcattgtacgagtcccaaggagatcttcgcactctcgagacaaccgttgcgggagcgacgtacgtccaagccctgtcggagcaggaccagaagctgttcaaatcggctctgccggaagatcctgtcatcgccaccaaggagacaatattccatgcccaagggggtgggcagcccagcgatactggctctatgattacaagttcccccgcgggagatggcagtgaggtgcgcttcctggtgcagtccacacggcgcacaggagccggagtaatccttcatcagggcaagttgcaacccccgggagctgttccgatcgttggctcctccgtgggacagaagatagatggcgaaagccgggatctcttctctaggattcataccgcaggccatttactcggcctcgctgtccgatcactgggggaccagatccctgacgtcaccgagacaaaggcacagcactatccggatgctgcgtacgtggagtttcaggggaagattgacccggtcaagtatgccgagacgatccagaaggttctagacgacctggtgcagcaggatctccccgtgtgtgtgtcattcctcgaagccaagcgtctcagggagaaaggcattcatgtgccagacaacttcctccacgatacgtctgcagagactacaacgagagtcgtggagatcggggacctgggtggatatccatgtggcggtactcactgccagagtacatcgaagttggggagggtcatggtgggaaagatctcgaataaaaagggaaacacacaggttcgatatacagtatcatagcaaactattgcagactatatcatcggtatcgggggtgtccaacctaggatttgaatcaagagccttaaaattaggtgttgatcaatctcgttctatcagtgtgacactgcaaggtattgagatattcctagtctcatcacgccgagtgcctcaatgcgtgctctaaactattc

SEQ ID NO: 38283 - DNA, 1026 bp, Muscodor strobelii
  misc_feature: SGI cDNA ID NO. 573299
  misc_feature: Encodes the peptide sequence at SEQ ID NO 38284
atgtctttcgtcagagccagctcgaagcgattggcgggccgatcctggcctctcactgcaactgtgactgcatcacggtcagttggtgttcttctcctcaaccgccgtccatactcggtaacacaactagatgagccagcacattcccagactcccgagtttcttgttcgtcatgatatgcaaagaccaacacatgcccgtcctgttcaaacaaactggacgacgctggaagaccaaccggtgaccggcaagtctgttatcgacctatttcacaatactatcccctccgtacgccaccggggcttcttatcagcagatgaatgcaaaagacttgttgatatcgtccagcaacaccatattggctcatacaaccagaaagtggtattcccacctctgggttcgataggcttgacccagtttgatcaccagcaagataagacaacttacctcaatcgcgttgatgaggcctactctctgcagaaacgcttcaaacaagaagtcggcgtagacatcctgcgccgcgtcgccgccctcctccaggaagccacgggcctcgaaacccgcgttgctcgtgaagatgggcggacgtactttgctggccttctccgcgccgtcaacgactacattcagatccattccgactatgccccatatgatggctcgggttgggagatcggtaagatcacgggtcagttgacctggaacatcctactccgtcaggtccccggaggcgacaccatagtctacgacaggccatggcaaggggacaaagacgaagtcttccgcaagccatttccacggtacgcatatgaaccgaggggcgtccagggctccatattcaaggccttgtctgccgtggaaggagatatcgccttcttcaactcgagaaatttccacgaggtcaagccgtgtgataaagcatgggacagaccggacgacgtcgttcgttacactatgagttctttcgtgggctacctcccgccccagtcggccggctgcaagccgagcttgattctatggtcttga

SEQ ID NO: 38284 - protein, 341 aa, Muscodor strobelii
  misc_feature: SGI Peptide ID NO. 573299
  misc_feature (69)..(341): NCBI GI: 169621781 Blast Desc: SNOG_14103 [Phaeosphaeria nodorum SN15] gi|160704623|gb|EAT78340.2| SNOG_14103 [Phaeosphaeria nodorum SN15]
  misc_feature (73)..(341): NCBI GI: 75907836 Blast Desc: Ava_1614 [Anabaena variabilis ATCC 29413] gi|75701561|gb|ABA21237.1| conserved [Anabaena variabilis ATCC 29413]
  misc_feature (73)..(341): NCBI GI: 119513138 Blast Desc: N9414_22478 [Nodularia spumigena CCY9414] gi|119462210|gb|EAW43196.1| N9414_22478 [Nodularia spumigena CCY9414]
  misc_feature (73)..(341): NCBI GI: 152974310 Blast Desc: signal transduction protein [Bacillus cereus subsp. cytotoxis NVH 391-98] gi|152023062|gb|ABS20832.1| signal transduction protein [Bacillus cytotoxicus NVH 391-98]
  misc_feature (73)..(341): NCBI GI: 27817219 Blast Desc: [Nostoc sp. ATCC 53789]
  misc_feature (73)..(341): NCBI GI: 6563401 Blast Desc: [Nostoc sp. GSV224]
  misc_feature (73)..(341): NCBI GI: 15615495 Blast Desc: BH2933 [Bacillus halodurans C-125] gi|10175555|dbj|BAB06652.1| BH2933 [Bacillus halodurans C-125]
  misc_feature (73)..(341): NCBI GI: 186682533 Blast Desc: Npun_F2185 [Nostoc punctiforme PCC 73102] gi|186464985|gb|ACC80786.1| conserved [Nostoc punctiforme PCC 73102]
  misc_feature (69)..(340): NCBI GI: 156042147 Blast Desc: SS1G_11624 [Sclerotinia sclerotiorum 1980] gi|154696007|gb|EDN95745.1| SS1G_11624 [Sclerotinia sclerotiorum 1980]
  misc_feature (69)..(340): NCBI GI: 154299418 Blast Desc: BC1G_10971 [Botryotinia fuckeliana B05.10] gi|150857313|gb|EDN32505.1| BC1G_10971 [Botryotinia fuckeliana B05.10]
MSFVRASSKRLAGRSWPLTATVTASRSVGVLLLNRRPYSVTQLDEPAHSQTPEFLVRHDMQRPTHARPVQTNWTTLEDQPVTGKSVIDLFHNTIPSVRHRGFLSADECKRLVDIVQQHHIGSYNQKVVFPPLGSIGLTQFDHQQDKTTYLNRVDEAYSLQKRFKQEVGVDILRRVAALLQEATGLETRVAREDGRTYFAGLLRAVNDYIQIHSDYAPYDGSGWEIGKITGQLTWNILLRQVPGGDTIVYDRPWQGDKDEVFRKPFPRYAYEPRGVQGSIFKALSAVEGDIAFFNSRNFHEVKPCDKAWDRPDDVVRYTMSSFVGYLPPQSAGCKPSLILWS

SEQ ID NO: 38285 - DNA, 709 bp, Muscodor strobelii
  misc_feature: SGI EST ID NO. CUFF.91845.0
  misc_feature: Variant of the nucleotide sequence at SEQ ID NO 38283
tgtaaattagaacttttctctgcctgaataaaaatagtaagaagatgtctttcgtcagagccagctcgaagcgattggcgggccgatcctggcctctcactgcaactgtgactgcatcacggtcagttggtgttcttctcctcaaccgccgtccatactcggtaacacaactagatgagccagcacattcccagactcccgagtttcttgttcgtcatgatatgcaaagaccaacacatgcccgtcctgttcaaacaaactggacgacgctggaagaccaaccggtgaccggcaagtctgttatcgacctatttcacaatactatcccctccgtacgccaccggggcttcttatcagcagatgaatgcaaaagacttgttgatatcgtccagcaacaccatattggctcatacaaccagaaagtggtattcccacctctgggttcgataggcttgacccagtttgatcaccagcaagataagacaacttacctcaatcgcgttgatgaggcctactctctgcagaaacgcttcaaacaagaagtcggcgtagacatcctgcgccgcgtcgccgccctcctccaggaagccacgggcctcgaaacccgcgttgctcgtgaagatgggcggacgtactttgctggccttctccgcgccgtcaacgactacattcagatccattccgactatgccccatatgtacagtgacc

SEQ ID NO: 38286 - DNA, 1869 bp, Muscodor strobelii
  misc_feature: SGI cDNA ID NO. 573300
  misc_feature: Encodes the peptide sequence at SEQ ID NO 38287
atgaatccaacacatgagtcgaacgcggcgctggcgcatgatcaatcgccagcgaccgctgtcgacaccgcacttccggcagacctccagcactctgcagtgttagagaaggcggcaactaatgagaacactaccgctccccacgcgcacgaggatggtcagaatgagaagaaggaggcggatgagactgtaaacgccgacgctccacccgccgacgacgagtctcaatacccccagggtgtgaagcttcttctcgttacccttggtcttctctctgccctgttcctggtgtcactagacggtactatcttggccacggcaattcctgccatcacgaaccagtttcactcactgaacgatgtcggctggtacggaggctcgtatctgttcgccgttagtgcattgcaactgctctatggcaagctctataccatgtatagggtcaagagtgttttcctcgtcgccgtcgctcttttcgagctcggttcgctcatcgctggtgttgcgccgaattcgaacgccctcatcataggaagaacgatctcgggaacaggggctgcgggcatctttgccggtgccattatcattatcggtacagctgtacctctccgccaacgccctctcttcactggaattctgtccagtgtgcatggtattgccagtgttattggtcccatcctcggcggtgtcttcacagaccatgtcacatggagattgtgcttcctcatcaatctgcctttcggcgtcattaccatcgtgttcctcttcttctgccttccccaacaaccggcgatgcagggcgggttgccctggaaggaacaagtcaagcaattcgatctgcccggcacgttcttcctgatcccgtccatcgtcaccctgcttctggcactccagtggggagggtccgtatacgccttcaacgatgcccgcatcatcgccctcttcgtcgttgctggtgtgactgccatcgcgttcatcggtgttgagtactggcagggtgatcgtgctaccgttccgggacgcattattaagaacaagaacatactcggcggtacctggtacggtgtattcatgggcggcgcgacctttatcttcacctactatctgccaatctggttccaagccattcaaggcgtatcagcgacccagtctggtattcgcactctgcctagtgttctgggccttgttttatttgcaatcgtcggtggtgcagtagccactgcatggggccaatacgtgccgctcctcatcatctcgtcggccgtcgcgacagtcggttccggcctcctcagcactctcaaggtcgattcatctatcggctactggttcggttatcaactcctgatggcagctggtgtcggtgtcggggctcaaaacgtcatgcttgttgggcaggtagctgtccccattacggacatggcgatggctacttcagttctgtccttctcccaaaccctgtcgtcttccattttcctcgctattgcccaagccgtgttctcaaacagattgatggccaacctggccgcgcaagcccccgaggtcaacatggcggacgtctttaccggaggagctacaggacttagaatggtgagtaaacctcttcttcggctatgtgcctgcatcgctcttgtcacccctgatcagttacccgcggtcctcgaggcgtacaactcggccatcatgcagaccttttacgttggtgtcgccgcggcgggtgtgtccatcggtggtcccctcatcatggattggttatcagtcaaggcaaagcccgcgcctgcggcgaaagacgagtcggttccaactaccgccgaaggatcaacggccgacggcgcgtcctccgagtctggcccccatgccggtggttcatag

SEQ ID NO: 38287 - protein, 622 aa, Muscodor strobelii
  misc_feature: SGI Peptide ID NO. 573300
  misc_feature (90)..(492): Pfam Id: PF07690 Pfam Desc: Major Facilitator Superfamily
  misc_feature (1)..(589): NCBI GI: 169601798 Blast Desc: SNOG_03774 [Phaeosphaeria nodorum SN15] gi|111067859|gb|EAT88979.1| SNOG_03774 [Phaeosphaeria nodorum SN15]
  misc_feature (6)..(594): NCBI GI: 255950952 Blast Desc: Pc22g23520 [Penicillium chrysogenum Wisconsin 54-1255] gi|211593260|emb|CAP99640.1| Pc22g23520 [Penicillium chrysogenum Wisconsin 54-1255]
  misc_feature (15)..(593): NCBI GI: 238499375 Blast Desc: efflux pump antibiotic resistance protein, [Aspergillus flavus NRRL3357] gi|220692675|gb|EED49021.1| efflux pump antibiotic resistance protein, [Aspergillus flavus NRRL3357]
  misc_feature (28)..(589): NCBI GI: 118511752 Blast Desc: MFS transporter [Penicillium digitatum]
  misc_feature (2)..(589): NCBI GI: 189193587 Blast Desc: MFS transporter [Pyrenophora tritici-repentis Pt-1C-BFP] gi|187978696|gb|EDU45322.1| MFS transporter [Pyrenophora tritici-repentis Pt-1C-BFP]
  misc_feature (41)..(589): NCBI GI: 145247328 Blast Desc: An12g08620 [Aspergillus niger] gi|134080647|emb|CAK41312.1| protein product [Aspergillus niger]
  misc_feature (30)..(600): NCBI GI: 119467210 Blast Desc: MFS toxin efflux pump, [Neosartorya fischeri NRRL 181] gi|119405563|gb|EAW15514.1| MFS toxin efflux pump, [Neosartorya fischeri NRRL 181]
  misc_feature (13)..(589): NCBI GI: 14389419 Blast Desc: AF238225_1 DHA14-like major facilitator [Botryotinia fuckeliana]
  misc_feature (1)..(589): NCBI GI: 121704086 Blast Desc: MFS toxin efflux pump, [Aspergillus clavatus NRRL 1] gi|119398451|gb|EAW08881.1| MFS toxin efflux pump, [Aspergillus clavatus NRRL 1]
  misc_feature (3)..(589): NCBI GI: 156036306 Blast Desc: conserved [Sclerotinia sclerotiorum 1980] gi|154698247|gb|EDN97985.1| conserved [Sclerotinia sclerotiorum 1980]
MNPTHESNAALAHDQSPATAVDTALPADLQHSAVLEKAATNENTTAPHAHEDGQNEKKEADETVNADAPPADDESQYPQGVKLLLVTLGLLSALFLVSLDGTILATAIPAITNQFHSLNDVGWYGGSYLFAVSALQLLYGKLYTMYRVKSVFLVAVALFELGSLIAGVAPNSNALIIGRTISGTGAAGIFAGAIIIIGTAVPLRQRPLFTGILSSVHGIASVIGPILGGVFTDHVTWRLCFLINLPFGVITIVFLFFCLPQQPAMQGGLPWKEQVKQFDLPGTFFLIPSIVTLLLALQWGGSVYAFNDARIIALFVVAGVTAIAFIGVEYWQGDRATVPGRIIKNKNILGGTWYGVFMGGATFIFTYYLPIWFQAIQGVSATQSGIRTLPSVLGLVLFAIVGGAVATAWGQYVPLLIISSAVATVGSGLLSTLKVDSSIGYWFGYQLLMAAGVGVGAQNVMLVGQVAVPITDMAMATSVLSFSQTLSSSIFLAIAQAVFSNRLMANLAAQAPEVNMADVFTGGATGLRMVSKPLLRLCACIALVTPDQLPAVLEAYNSAIMQTFYVGVAAAGVSIGGPLIMDWLSVKAKPAPAAKDESVPTTAEGSTADGASSESGPHAGGS

SEQ ID NO: 38288 - DNA, 2108 bp, Muscodor strobelii
  misc_feature: SGI EST ID NO. CUFF.91873.0
  misc_feature: Variant of the nucleotide sequence at SEQ ID NO 38286
acgatttgacagccaagccctcaacggcacagcatccctggcttgtcttgaagggcgtgcgagtaggtacctcgagaacggatcattctgttggcttgtggcatgtcgatcgctaccatcctcatccctgttagatgaacctgggtattcactcgcacaggacaaggctacccgtgtttgcgcgtagatctgatttttaacgcttacaaggcttacaacaaggtcgctgcatgggtgaacgagcgccgacaagggtgattttggtgtaagtaccgcgctacgaaatactccatctaataggggaggtgatagtattatggacaaattttgtttcccgacatcatctttctttctattcggggagtattcgcgggcagtcttcaatgacatcgcagttcgtttcgtttcgctcgttcctttcatagacttttcattgttcttttactcctcgtttgatgcgcagcgacgatgaatccaacacatgagtcgaacgcggcgctggcgcatgatcaatcgccagcgaccgctgtcgacaccgcacttccggcagacctccagcactctgcagtgttagagaaggcggcaactaatgagaacactaccgctccccacgcgcacgaggatggtcagaatgagaagaaggaggcggatgagactgtaaacgccgacgctccacccgccgacgacgagtctcaatacccccagggtgtgaagcttcttctcgttacccttggtcttctctctgccctgttcctggtgtcactagacggtactatcttggccacggcaattcctgccatcacgaaccagtttcactcactgaacgatgtcggctggtacggaggctcgtatctgttcgccgttagtgcattgcaactgctctatggcaagctctataccatgtatagggtcaagagtgttttcctcgtcgccgtcgctcttttcgagctcggttcgctcatcgctggtgttgcgccgaattcgaacgccctcatcataggaagaacgatctcgggaacaggggctgcgggcatctttgccggtgccattatcattatcggtacagctgtacctctccgccaacgccctctcttcactggaattctgtccagtgtgcatggtattgccagtgttattggtcccatcctcggcggtgtcttcacagaccatgtcacatggagattgtgcttcctcatcaatctgcctttcggcgtcattaccatcgtgttcctcttcttctgccttccccaacaaccggcgatgcagggcgggttgccctggaaggaacaagtcaagcaattcgatctgcccggcacgttcttcctgatcccgtccatcgtcaccctgcttctggcactccagtggggagggtccgtatacgccttcaacgatgcccgcatcatcgccctcttcgtcgttgctggtgtgactgccatcgcgttcatcggtgttgagtactggcagggtgatcgtgctaccgttccgggacgcattattaagaacaagaacatactcggcggtacctggtacggtgtattcatgggcggcgcgacctttatcttcacctactatctgccaatctggttccaagccattcaaggcgtatcagcgacccagtctggtattcgcactctgcctagtgttctgggccttgttttatttgcaatcgtcggtggtgcagtagccactgcatggggccaatacgtgccgctcctcatcatctcgtcggccgtcgcgacagtcggttccggcctcctcagcactctcaaggtcgattcatctatcggctactggttcggttatcaactcctgatggcagctggtgtcggtgtcggggctcaaaacgtcatgcttgttgggcaggtagctgtccccattacggacatggcgatggctacttcagttctgtccttctcccaaaccctgtcgtcttccattttcctcgctattgcccaagccgtgttctcaaacagattgatggccaacctggccgcgcaagcccccgaggtcaacatggcggacgtctttaccggaggagctacaggacttagaatgggtacgtattcatacattcttgatttctaacgtacatgaagtcgattgtatat

SEQ ID NO: 38289 - DNA, 1038 bp, Muscodor strobelii
  misc_feature: SGI cDNA ID NO. 573301
  misc_feature: Encodes the peptide sequence at SEQ ID NO 38290
atgtctcccagtatcatcaacgagttccgcgaaccttacatcttagacataaggagtgactactctggtcttgatgtcaaggcggaagtgatctcgggtatgcaggcgcaagagccgacactgccatcgcttttactctgggatgaccgtggacagaagctgtttgatcgattttctcagacttcaacctactacccgtttcacagtgagatagaggttctcaacaagcatggttcggatattggaagatgcattcctggagatggacttctcttggaactgggctgtggagccattcggaaaaccaagtcgattctctccgggttccggaaagagcagaaaccagttcaatactttgcactagacgtgtcccgagaaagcctggagagcagtcttgcggaattaagaaaactattcaaagactgccctttcatcaccatcacgggactcttgggcacgtatgatgactgcgtgtcgtggttatcgaacctcaccaaccagcacgagcagacatcggtgacgatcatgtggctgggcaacagcatcgccaacgtggatagcagggagcaagccagtgcgttcctagaccgattcggtactgcctgcgaggaagggaacctctcctgtcggttcatcttgtcgacagacatctgccaaaacgacgacaaggtcctcgtggcctacgacgtggagcgtcccgagtaccgagacttcttgctcaatgccgtggaagcggccaacctaagtctaggccacgcagctttctcgccagaggactggcaacccgacagctggctggacaactacgaacgcaatttacatttctacctcaaagccaagcgcgacctctctgttgacatgactgacggcagcaaggtggcagtgaaaaccggccagcgagtccgtgtcgttacgagtggcaagtggagcgaagaggctttggctagcctatgcagccaagctcggttcgacatcagacaatcttggaaggatgaaacgggtgattactgtgagcacttccacggccctctcgaataa

SEQ ID NO: 38290 - protein, 345 aa, Muscodor strobelii
  misc_feature: SGI Peptide ID NO. 573301
  misc_feature (4)..(336): NCBI GI: 121717277 Blast Desc: conserved [Aspergillus clavatus NRRL 1] gi|119404218|gb|EAW14635.1| conserved [Aspergillus clavatus NRRL 1]
  misc_feature (14)..(337): NCBI GI: 238503023 Blast Desc: conserved [Aspergillus flavus NRRL3357] gi|220691555|gb|EED47903.1| conserved [Aspergillus flavus NRRL3357]
  misc_feature (1)..(337): NCBI GI: 169768218 Blast Desc: [Aspergillus oryzae RIB40] gi|83766437|dbj|BAE56577.1| protein product [Aspergillus oryzae]
  misc_feature (1)..(336): NCBI GI: 238497506 Blast Desc: N-methyltransferase, [Aspergillus flavus NRRL3357] gi|220693262|gb|EED49607.1| N-methyltransferase, [Aspergillus flavus NRRL3357]
  misc_feature (9)..(336): NCBI GI: 169776339 Blast Desc: [Aspergillus oryzae RIB40] gi|83771371|dbj|BAE61503.1| protein product [Aspergillus oryzae]
  misc_feature (14)..(340): NCBI GI: 189206405 Blast Desc: PTRG_09205 [Pyrenophora tritici-repentis Pt-1C-BFP] gi|187975630|gb|EDU42256.1| PTRG_09205 [Pyrenophora tritici-repentis Pt-1C-BFP]
  misc_feature (12)..(343): NCBI GI: 85107734 Blast Desc: NCU07917 [Neurospora crassa OR74A] gi|28924039|gb|EAA33197.1| [Neurospora crassa OR74A]
  misc_feature (14)..(340): NCBI GI: 240106343 Blast Desc: CPC735_059060 [Coccidioides posadasii C735 delta SOWgp]
  misc_feature (3)..(336): NCBI GI: 70984451 Blast Desc: conserved [Aspergillus fumigatus Af293] gi|66845359|gb|EAL85694.1| conserved [Aspergillus fumigatus Af293]
  misc_feature (3)..(336): NCBI GI: 159122516 Blast Desc: conserved [Aspergillus fumigatus A1163]
MSPSIINEFREPYILDIRSDYSGLDVKAEVISGMQAQEPTLPSLLLWDDRGQKLFDRFSQTSTYYPFHSEIEVLNKHGSDIGRCIPGDGLLLELGCGAIRKTKSILSGFRKEQKPVQYFALDVSRESLESSLAELRKLFKDCPFITITGLLGTYDDCVSWLSNLTNQHEQTSVTIMWLGNSIANVDSREQASAFLDRFGTACEEGNLSCRFILSTDICQNDDKVLVAYDVERPEYRDFLLNAVEAANLSLGHAAFSPEDWQPDSWLDNYERNLHFYLKAKRDLSVDMTDGSKVAVKTGQRVRVVTSGKWSEEALASLCSQARFDIRQSWKDETGDYCEHFHGPLE

SEQ ID NO: 38291 - DNA, 4422 bp, Muscodor strobelii
  misc_feature: SGI cDNA ID NO. 573302
  misc_feature: Encodes the peptide sequence at SEQ ID NO 38292
atgactctcgaacctgaccggaacgagctccagcacgccacaacgtctggtgacaacaaccatactgaggatcgcattcattacgagaccacgatcaacactaccggtgccgtgttcgccagctcttctggccacggtcaacttacgctcgctaccaatacgaatgtccctacggaccgaggacctgtagaatacgtcgcggaacttggccagtatggttcaacgcctggtctaactaataatcacacgcaaagtcagacacaagaggttattggctctgtggaagcatcatatcggaatgacaacgccacctataccgccgtgaaggaactgcagcaacttgtatcgaggcagaccaagagaccgatcgaaagtgacaccgaacaggaccctaatcgtcctccctctaagaagcagaggcagagtgctcggcaaacaccacccaagaacattgatctcagtagctttactaaaccacatctaccgccaaaactcgtggacgggcttacctctccgttgttcttctctcaccggcacaaatcgattcttcccagactgccttcttacactggcgcggacgcaactacgatgctaaagacggttcgcgatgggaccgaagtcacgactctcaagcttgcgaggggcaccgtcagtgcagcaagccccgccagatcgtcgagcacgcccggcagctggtcttcgatagacgcaacagcgccggtaaatcggagtccggacacgcaaacatctgcaccggccttgcaggtactccagggcattggcattctggagctactagaacgtgatgaccggccgacgttcatcgttgatacttcacatccaatcaacaccacgccaacaggcccgatttctatcatctatgccaatcctgcattacacgtatccgatgccatccgacacctagtctacggggaccatcatgatgatccagatggaaagaacgatttgggaaacttcaggaattgggtgaaaacacttgggtcagaaggcatcgatgtctttcacccgtcgtaccactatggcggggtgaactggacatgctcgacgctccgaaatcgatttcgcttcatcagcgccaatatgagtgccgcgtcgatagcgcgcacatcgcctgagccagctcttgagcgtgaggcaagcatcgactcacgcagtcgaggacttacgcccaatgctcaacctcaaacgccaagtgatgtcgttattcatgaccgtgattattttggcgacgtggaagatgtcgggaccgatgatcaaatacagcgtgatggtgatcttgatgtggaagacgcaatggtaatacacgagacacacggcttccggccagatatgcttctgtccatccctcaatcctctttcgactggacccgcattccgctgactgcagatctaccggagcatatcaagtttgctcgttcgagggactgggcctcgacccctctagggcccatagaaaactggtcgttggaactgcggacaatgtccaacatggtcatgggtagccctcatccggctgctatgtactggggaaaggagctcacagtaatctacaacgaagcgtatgtccctctggccgggcaaaagcatccaggactcatggcctccctatacaaagattcttgggccgagatatgggatgaaattgaacctattttcgcaagcgcgtgggaatctggccaagcgaccatgaaaaacgatgaccgattcatcttgaaacgggacggcttcgatgaggaggcatttttctcgtggtctgtggttccactagtcggtgaagacggagcagtccatggactctacaatcctgcgttcgaaataacccgacgaaaagtggccgagcgtagaatgttgactctgcgcgaggttggcgagaagactgcgttggctcgagacattaagagcttctggactcaagtcaataaaggactcgagtataacgaagatgatgttcccttcaatctagtctactccgtcacagaggatcaagaaagtgatattgcttctatgcattccggcagctggataaatcccccacagttgaatttggaagcatcaatcggtgtacctcctggccacccatgcttgatcagctccttggatctgaggagcagtaacgaaggatttgcgccatacatgcgagaatcgatgtccaacgccggacggcctgtcatactttccgccgacaagggcacgctccccgagggtcttatggatggcttcaattgccggggcggcggcgacccatgccattccattgtgatttttccagtacatcctacgacaggtagcgaaagtgtggtcggtttcattgtcataggtgtcaacccgcgacgtccatatgacggagattaccagctatttatcaatctcctttcgaggcaactggcaacatcccttgcatcggttgttctgttcgaagaggaaatccggcgtggtcaacgggccgcccagatggctctcgcagatcggcaagagcttaccgaacagcttcacctgcgcactcgtgaggttgaagagagtgaactcaaattcacgaggatggccgagtttgctcccgtcggcatgttcattgccaatgagcaaggtcatataacctattgcaatgatgtatggtgggacttatctcggcacaatcgatcagaaagcgtcaacaactggatgcaaagtgtgaaagatgaggacaggtccacgctcgaagccgtgtggcagaaactagtctgcgacaaggttgcgattactcatgaattccgcttcaaatgctctcgtcacgagggtagtacgatcatgaatacctgggttcttttgtccgcttatcctgagaaagactccgtgggtggcattaaaggcatctttggatgcattaccaacatatcgcagcagaagttagccgagcagatacagatgcagcgacgcgaagaagcagtggagctcaagcgccaacaggaaaacttcattgacataacaagccacgaaatgcgtaaccccctcagtgccatactccaatgcgcggatgagatagctactaccctcgctaagtgcagcacgttggaagagtgccgagggagcgaaaatctgaagctggccttggctggatgtctggaggctgcgaatacgataacgctctgcgccagccatcaaaagcgcatcgtcgatgacatcttgacgctgtccaaactcgactctcagctcttattagtaactcctgttgatgtgcaaccagtgtcggtcgtgaaacgagtcctcaaaatgttcgagggagagttgagtacgaatggcatcgaaatgaaattccaggtaaaaaatcgctatattgatatgggcatcgactgggttaagctggacccttcccggctccttcaggtgttgatcaatctgatgaccaatgcaatcaagttcactcaagctcgtgctgaacgatctatcgttatcacgctagatgcttcgacagaggttgctgcgactaccgaatcaggcattacttatttcccaagtgatcgcgctgataaagacagtcttacagatcacgatgactggggcaacggcgaaaaggtcaacctccatttttccgtccaagacaccggcagaggtttagatgagcatgaaatgaaactactattccagcgcttctcccaggcaactcctcgcacccacgtgcaatacggaggttctggactgggcctgttcatttctcgcattttgaccgaattgcagggcggccagattggtgtcacgtcgcagaaaggtgtcggcagcaccttctcattctatattcagagtagaaaaaccggaacaccctcaccagagaccagtaaaactctgccgcccgcgccgcctctgacacgagctccaggatcatccactatgatagaaactaagcagccgaaactaacgccgcgagatatcgtcgaacgatccgtaaaccggcagtctcgcaaaccaagattctctgcagatggccaacggctcttcgacgtcctcatcgtcgaggataatttagtcaaccagagagtacttcaacggcagttacgtaatgttggtaacaataccaaagtggcgaatcatggaggtgaggctctcgatgttctgaaggaatcccgcttctggagcggcagagagtctacaggagatgacatttctgttatcttgatggaccttgaaatgccggtgatggacggcatgacatgtgctcgaaaaatccgagagcttgaaaaggagggaacgattgtgggtcatattccgatcatagcagtaacggcatatgcgcgccctgagcaaattgaggacgccagagccgcaggtgtggacgatgtaatctcgaagccgttccgtatacccgagttgatgcctcgtatagaagaattggttaacgccaatgctcactacgacgaggagatggcataa

SEQ ID NO: 38292 - protein, 1473 aa, Muscodor strobelii
  misc_feature: SGI Peptide ID NO. 573302
  misc_feature (1120)..(1267): Pfam Id: PF02518 Pfam Desc: Histidine kinase-, DNA gyrase B-, and HSP90-like ATPase
  misc_feature (987)..(1069): Pfam Id: PF00512 Pfam Desc: His Kinase A (phosphoacceptor) domain
  misc_feature (1330)..(1459): Pfam Id: PF00072 Pfam Desc: Response regulator receiver domain
  misc_feature (135)..(1462): NCBI GI: 46107946 Blast Desc: FG00856.1 [Gibberella zeae PH-1]
  misc_feature (120)..(1462): NCBI GI: 39726353 Blast Desc: histidine kinase HHK13p [Gibberella moniliformis]
  misc_feature (168)..(1471): NCBI GI: 85114822 Blast Desc: NCU00939 [Neurospora crassa OR74A] gi|28926558|gb|EAA35529.1| conserved [Neurospora crassa OR74A]
  misc_feature (136)..(1468): NCBI GI: 145613964 Blast Desc: MGG_01227 [Magnaporthe grisea 70-15] gi|145020967|gb|EDK05096.1| MGG_01227 [Magnaporthe grisea 70-15]
  misc_feature (146)..(1462): NCBI GI: 171694938 Blast Desc: protein product [Podospora anserina] gi|170947711|emb|CAP59873.1| protein product [Podospora anserina]
  misc_feature (125)..(1462): NCBI GI: 116182566 Blast Desc: CHGG_01911 [Chaetomium globosum CBS 148.51] gi|88186208|gb|EAQ93676.1| CHGG_01911 [Chaetomium globosum CBS 148.51]
  misc_feature (197)..(1472): NCBI GI: 156054666 Blast Desc: SS1G_06181 [Sclerotinia sclerotiorum 1980] gi|154703961|gb|EDO03700.1| SS1G_06181 [Sclerotinia sclerotiorum 1980]
  misc_feature (256)..(1462): NCBI GI: 154296378 Blast Desc: BC1G_13015 [Botryotinia fuckeliana B05.10] gi|150843376|gb|EDN18569.1| BC1G_13015 [Botryotinia fuckeliana B05.10]
  misc_feature (460)..(1463): NCBI GI: 189197201 Blast Desc: conserved [Pyrenophora tritici-repentis Pt-1C-BFP] gi|187980886|gb|EDU47512.1| conserved [Pyrenophora tritici-repentis Pt-1C-BFP]
  misc_feature (507)..(1463): NCBI GI: 169621823 Blast Desc: SNOG_14124 [Phaeosphaeria nodorum SN15] gi|160704630|gb|EAT78361.2| SNOG_14124 [Phaeosphaeria nodorum SN15]
MTLEPDRNELQHATTSGDNNHTEDRIHYETTINTTGAVFASSSGHGQLTLATNTNVPTDRGPVEYVAELGQYGSTPGLTNNHTQSQTQEVIGSVEASYRNDNATYTAVKELQQLVSRQTKRPIESDTEQDPNRPPSKKQRQSARQTPPKNIDLSSFTKPHLPPKLVDGLTSPLFFSHRHKSILPRLPSYTGADATTMLKTVRDGTEVTTLKLARGTVSAASPARSSSTPGSWSSIDATAPVNRSPDTQTSAPALQVLQGIGILELLERDDRPTFIVDTSHPINTTPTGPISIIYANPALHVSDAIRHLVYGDHHDDPDGKNDLGNFRNWVKTLGSEGIDVFHPSYHYGGVNWTCSTLRNRFRFISANMSAASIARTSPEPALEREASIDSRSRGLTPNAQPQTPSDVVIHDRDYFGDVEDVGTDDQIQRDGDLDVEDAMVIHETHGFRPDMLLSIPQSSFDWTRIPLTADLPEHIKFARSRDWASTPLGPIENWSLELRTMSNMVMGSPHPAAMYWGKELTVIYNEAYVPLAGQKHPGLMASLYKDSWAEIWDEIEPIFASAWESGQATMKNDDRFILKRDGFDEEAFFSWSVVPLVGEDGAVHGLYNPAFEITRRKVAERRMLTLREVGEKTALARDIKSFWTQVNKGLEYNEDDVPFNLVYSVTEDQESDIASMHSGSWINPPQLNLEASIGVPPGHPCLISSLDLRSSNEGFAPYMRESMSNAGRPVILSADKGTLPEGLMDGFNCRGGGDPCHSIVIFPVHPTTGSESVVGFIVIGVNPRRPYDGDYQLFINLLSRQLATSLASVVLFEEEIRRGQRAAQMALADRQELTEQLHLRTREVEESELKFTRMAEFAPVGMFIANEQGHITYCNDVWWDLSRHNRSESVNNWMQSVKDEDRSTLEAVWQKLVCDKVAITHEFRFKCSRHEGSTIMNTWVLLSAYPEKDSVGGIKGIFGCITNISQQKLAEQIQMQRREEAVELKRQQENFIDITSHEMRNPLSAILQCADEIATTLAKCSTLEECRGSENLKLALAGCLEAANTITLCASHQKRIVDDILTLSKLDSQLLLVTPVDVQPVSVVKRVLKMFEGELSTNGIEMKFQVKNRYIDMGIDWVKLDPSRLLQVLINLMTNAIKFTQARAERSIVITLDASTEVAATTESGITYFPSDRADKDSLTDHDDWGNGEKVNLHFSVQDTGRGLDEHEMKLLFQRFSQATPRTHVQYGGSGLGLFISRILTELQGGQIGVTSQKGVGSTFSFYIQSRKTGTPSPETSKTLPPAPPLTRAPGSSTMIETKQPKLTPRDIVERSVNRQSRKPRFSADGQRLFDVLIVEDNLVNQRVLQRQLRNVGNNTKVANHGGEALDVLKESRFWSGRESTGDDISVILMDLEMPVMDGMTCARKIRELEKEGTIVGHIPIIAVTAYARPEQIEDARAAGVDDVISKPFRIPELMPRIEELVNANAHYDEEMA

SEQ ID NO: 38293 - DNA, 5579 bp, Muscodor strobelii
  misc_feature: SGI EST ID NO. CUFF.91884.0
  misc_feature: Variant of the nucleotide sequence at SEQ ID NO 38291
cgctagtgctgggagggtgttatggccttgggacctcaaactgcccgccccgtttgtccgtcaagtccgtgttgcagccatctgcctggtatcgggtgtggatgctttggccttcctctgcaattcctcaccctaccagaccctgatgctggtccgacaaggctctgtatctctgtatgcaaattcagaaacgagtcgttgtcgcttcgtgcatatcctcacatcagcatgaactagcatcttcctgtgaacaagacttggcatgatactgtagacaggcagcgcaacgagttggagttggagttcgtcaacagttaagactggtgtttcggatccccaaaaaggctcggggccttcaattgtgtcacggtatacataacgttcgcattccagacaggatagcaggatttaatgctgaacgagagtccgcccatcagtctctatcaccagaaccgcaccgcttctgccgcggcttgctcatggccacagccaccgtgaagcccagcgacatacgaagcctcatcccacttcatgactctcgaacctgaccggaacgagctccagcacgccacaacgtctggtgacaacaaccatactgaggatcgcattcattacgagaccacgatcaacactaccggtgccgtgttcgccagctcttctggccacggtcaacttacgctcgctaccaatacgaatgtccctacggaccgaggacctgtagaatacgtcgcggaacttggccagtatggttcaacgcctggtctaactaataatcacacgcaaagtcagacacaagaggttattggctctgtggaagcatcatatcggaatgacaacgccacctataccgccgtgaaggaactgcagcaacttgtatcgaggcagaccaagagaccgatcgaaagtgacaccgaacaggaccctaatcgtcctccctctaagaagcagaggcagagtgctcggcaaacaccacccaagaacattgatctcagtagctttactaaaccacatctaccgccaaaactcgtggacgggcttacctctccgttgttcttctctcaccggcacaaatcgattcttcccagactgccttcttacactggcgcggacgcaactacgatgctaaagacggttcgcgatgggaccgaagtcacgactctcaagcttgcgaggggcaccgtcagtgcagcaagccccgccagatcgtcgagcacgcccggcagctggtcttcgatagacgcaacagcgccggtaaatcggagtccggacacgcaaacatctgcaccggccttgcaggtactccagggcattggcattctggagctactagaacgtgatgaccggccgacgttcatcgttgatacttcacatccaatcaacaccacgccaacaggcccgatttctatcatctatgccaatcctgcattacacgtatccgatgccatccgacacctagtctacggggaccatcatgatgatccagatggaaagaacgatttgggaaacttcaggaattgggtgaaaacacttgggtcagaaggcatcgatgtctttcacccgtcgtaccactatggcggggtgaactggacatgctcgacgctccgaaatcgatttcgcttcatcagcgccaatatgagtgccgcgtcgatagcgcgcacatcgcctgagccagctcttgagcgtgaggcaagcatcgactcacgcagtcgaggacttacgcccaatgctcaacctcaaacgccaagtgatgtcgttattcatgaccgtgattattttggcgacgtggaagatgtcgggaccgatgatcaaatacagcgtgatggtgatcttgatgtggaagacgcaatggtaatacacgagacacacggcttccggccagatatgcttctgtccatccctcaatcctctttcgactggacccgcattccgctgactgcagatctaccggagcatatcaagtttgctcgttcgagggactgggcctcgacccctctagggcccatagaaaactggtcgttggaactgcggacaatgtccaacatggtcatgggtagccctcatccggctgctatgtactggggaaaggagctcacagtaatctacaacgaagcgtatgtccctctggccgggcaaaagcatccaggactcatggcctccctatacaaagattcttgggccgagatatgggatgaaattgaacctattttcgcaagcgcgtgggaatctggccaagcgaccatgaaaaacgatgaccgattcatcttgaaacgggacggcttcgatgaggaggcatttttctcgtggtctgtggttccactagtcggtgaagacggagcagtccatggactctacaatcctgcgttcgaaataacccgacgaaaagtggccgagcgtagaatgttgactctgcgcgaggttggcgagaagactgcgttggctcgagacattaagagcttctggactcaagtcaataaaggactcgagtataacgaagatgatgttcccttcaatctagtctactccgtcacagaggatcaagaaagtgatattgcttctatgcattccggcagctggataaatcccccacagttgaatttggaagcatcaatcggtgtacctcctggccacccatgcttgatcagctccttggatctgaggagcagtaacgaaggatttgcgccatacatgcgagaatcgatgtccaacgccggacggcctgtcatactttccgccgacaagggcacgctccccgagggtcttatggatggcttcaattgccggggcggcggcgacccatgccattccattgtgatttttccagtacatcctacgacaggtagcgaaagtgtggtcggtttcattgtcataggtgtcaacccgcgacgtccatatgacggagattaccagctatttatcaatctcctttcgaggcaactggcaacatcccttgcatcggttgttctgttcgaagaggaaatccggcgtggtcaacgggccgcccagatggctctcgcagatcggcaagagcttaccgaacagcttcacctgcgcactcgtgaggttgaagagagtgaactcaaattcacgaggatggccgagtttgctcccgtcggcatgttcattgccaatgagcaaggtcatataacctattgcaatgatgtatggtgggacttatctcggcacaatcgatcagaaagcgtcaacaactggatgcaaagtgtgaaagatgaggacaggtccacgctcgaagccgtgtggcagaaactagtctgcgacaaggttgcgattactcatgaattccgcttcaaatgctctcgtcacgagggtagtacgatcatgaatacctgggttcttttgtccgcttatcctgagaaagactccgtgggtggcattaaaggcatctttggatgcattaccaacatatcgcagcagaagttagccgagcagatacagatgcagcgacgcgaagaagcagtggagctcaagcgccaacaggaaaacttcattgacataacaagccacgaaatgcgtaaccccctcagtgccatactccaatgcgcggatgagatagctactaccctcgctaagtgcagcacgttggaagagtgccgagggagcgaaaatctgaagctggccttggctggatgtctggaggctgcgaatacgataacgctctgcgccagccatcaaaagcgcatcgtcgatgacatcttgacgctgtccaaactcgactctcagctcttattagtaactcctgttgatgtgcaaccagtgtcggtcgtgaaacgagtcctcaaaatgttcgagggagagttgagtacgaatggcatcgaaatgaaattccaggtaaaaaatcgctatattgatatgggcatcgactgggttaagctggacccttcccggctccttcaggtgttgatcaatctgatgaccaatgcaatcaagttcactcaagctcgtgctgaacgatctatcgttatcacgctagatgcttcgacagaggttgctgcgactaccgaatcaggcattacttatttcccaagtgatcgcgctgataaagacagtcttacagatcacgatgactggggcaacggcgaaaaggtcaacctccatttttccgtccaagacaccggcagaggtttagatgagcatgaaatgaaactactattccagcgcttctcccaggcaactcctcgcacccacgtgcaatacggaggttctggactgggcctgttcatttctcgcattttgaccgaattgcagggcggccagattggtgtcacgtcgcagaaaggtgtcggcagcaccttctcattctatattcagagtagaaaaaccggaacaccctcaccagagaccagtaaaactctgccgcccgcgccgcctctgacacgagctccaggatcatccactatgatagaaactaagcagccgaaactaacgccgcgagatatcgtcgaacgatccgtaaaccggcagtctcgcaaaccaagattctctgcagatggccaacggctcttcgacgtcctcatcgtcgaggataatttagtcaaccagagagtacttcaacggcagttacgtaatgttggtaacaataccaaagtggcgaatcatggaggtgaggctctcgatgttctgaaggaatcccgcttctggagcggcagagagtctacaggagatgacatttctgttatcttgatggaccttgaaatgccggtgatggacggcatgacatgtgctcgaaaaatccgagagcttgaaaaggagggaacgattgtgggtcatattccgatcatagcagtaacggcatatgcgcgccctgagcaaattgaggacgccagagccgcaggtgtggacgatgtaatctcgaagccgttccgtatacccgagttgatgcctcgtatagaagaattggttaacgccaatgctcactacgacgaggagatggcataatcgccaactatatcacctgtataaattcgacagtacaaagtggtggaaggtctcaacaatagttagatgaccaaccgatctccaccagagtggatcaccatcacgcccaaaagtacttgagtttgaccaatggtcatggcactgggttcttgctttgcacggcgttccggactaaggatgatagcatggggggcgaaaactaggcagtaaagcccatgacggacggatttggggtctgggctttaccatggtatcaatagatgacgaaaaaggcgggctgctttgaccctatcctggaatgacttttacaccttacatatttcaaataatcattcttcccgctgattgagggtggaagacgcatagacaagcagcgttcagttctgcatcgcgctcggaggaggatgcatagagtgtatcaaagcacttccgctcgttgatacaaaatgttcgtcaatagaactagtaatagaattaagcctgggtccgccgaacagacgtggacacttgttagtcacaatcaactatgatcagataatgatgaaaaccatctcgtactattcctgcccatgaacgaaacattaggattcagctactatacgcatgccgccgacctgcctaaccgc

SEQ ID NO: 38294 - DNA, 561 bp, Muscodor strobelii
  misc_feature: SGI cDNA ID NO. 573303
  misc_feature: Reduced expression when VOC is produced
  misc_feature: Encodes the peptide sequence at SEQ ID NO 38295
atgtcttccaacgacaacacctccactctcaaggccgcttacgactctgttactggcgcagcccagaacgtcctcggtaatctcaccggttcgacgggcgatcaagtccaaggccaggccaagcaagacaagggttctgccgagcacgacgcctccaaggcgaccatcaaagtacctggcttcactgcctcttcttccggcgccgtcaccaaggacgaccccgaccgcgctagcggttcatggaagcagaccgttggctctgcggaggaggcccttggtcatgcaattggctccgaatcactcaaagcttccggtcgccagcaaaacagggaaggtcaggcgcagcaacaggaaggcatggccaaagatttcgtcggaggggctggagagcgtattacgggtgccattggcggaggtctggccagcatcactggcaatactaaggcccagcaagactatcaggaccagcacgatgccggaaagactcagcagcgtggtgctgagcacgatattcagaagcaagctgatgccgagtacaacgcttctcagcgccctgtctaa

SEQ ID NO: 38295 - protein, 186 aa, Muscodor strobelii
  misc_feature: SGI Peptide ID NO. 573303
  misc_feature (75)..(127): Pfam Id: PF05532 Pfam Desc: CsbD-like
  misc_feature (1)..(178): NCBI GI: 261351805 Blast Desc: conserved [Verticillium albo-atrum VaMs.102]
  misc_feature (3)..(178): NCBI GI: 171691727 Blast Desc: protein product [Podospora anserina] gi|170945812|emb|CAP72612.1| protein product [Podospora anserina]
  misc_feature (3)..(171): NCBI GI: 39974175 Blast Desc: MGG_00766 [Magnaporthe grisea 70-15] gi|145018300|gb|EDK02579.1| MGG_00766 [Magnaporthe grisea 70-15]
  misc_feature (3)..(181): NCBI GI: 85092002 Blast Desc: NCU04635 [Neurospora crassa OR74A] gi|21622302|emb|CAD37005.1| related to mismatched base pair and cruciform dna recognition protein [Neurospora crassa] conserved
  misc_feature (3)..(178): NCBI GI: 256731688 Blast Desc: NECHADRAFT_73679 [Nectria haematococca mpVI 77-13-4]
  misc_feature (1)..(179): NCBI GI: 46137069 Blast Desc: FG10050.1 [Gibberella zeae PH-1]
  misc_feature (1)..(177): NCBI GI: 116179852 Blast Desc: CHGG_00554 [Chaetomium globosum CBS 148.51] gi|88184851|gb|EAQ92319.1| CHGG_00554 [Chaetomium globosum CBS 148.51]
  misc_feature (3)..(178): NCBI GI: 189207717 Blast Desc: conserved [Pyrenophora tritici-repentis Pt-1C-BFP] gi|187976285|gb|EDU42911.1| conserved [Pyrenophora tritici-repentis Pt-1C-BFP]
  misc_feature (3)..(174): NCBI GI: 154298154 Blast Desc: BC1G_12042 [Botryotinia fuckeliana B05.10] gi|150858228|gb|EDN33420.1| BC1G_12042 [Botryotinia fuckeliana B05.10]
  misc_feature (1)..(173): NCBI GI: 212527198 Blast Desc: mismatched base pair and cruciform DNA recognition protein, [Penicillium marneffei ATCC 18224] gi|210073154|gb|EEA27241.1| mismatched base pair and cruciform
  misc_feature: Useful for introducing or modulating the production of volatile compounds
MSSNDNTSTLKAAYDSVTGAAQNVLGNLTGSTGDQVQGQAKQDKGSAEHDASKATIKVPGFTASSSGAVTKDDPDRASGSWKQTVGSAEEALGHAIGSESLKASGRQQNREGQAQQQEGMAKDFVGGAGERITGAIGGGLASITGNTKAQQDYQDQHDAGKTQQRGAEHDIQKQADAEYNASQRPV

SEQ ID NO: 38296 - DNA, 1058 bp, Muscodor strobelii
  misc_feature: SGI EST ID NO. CUFF.92136.1
  misc_feature: Variant of the nucleotide sequence at SEQ ID NO 38294
ctttcagctactgtagcttccttgggcagatcatacccagcagctcttgcttttgtctggagccgaacgtatttataaagagctcaggtcttccagtcccgaacctctcctttccacaacaacatcagcatcagcatccctcatttcattacatacacaaccaaacctaaaccactatttcagtcattcaccatgtcttccaacgacaacacctccactctcaaggccgcttacgactctgttactggcgcagcccagaacgtcctcggtaatctcaccggttcgacgggcgatcaagtccaaggccaggccaagcaagacaagggttctgccgagcacgacgcctccaaggcgaccatcaaagtacctggcttcactgcctcttcttccggcgccgtcaccaaggacgaccccgaccgcgctagcggttcatggaagcagaccgttggctctgcggaggaggcccttggtcatgcaattggctccgaatcactcaaagcttccggtcgccagcaaaacagggaaggtcaggcgcagcaacaggaaggcatggccaaagatttcgtcggaggggctggagagcgtattacgggtgccattggcggaggtctggccagcatcactggcaatactaaggcccagcaagactatcaggaccagcacgatgccggaaagactcagcagcgtggtgctgagcacgatattcagaagcaagctgatgccgagtacaacgcttctcagcgccctgtctaaaggatgaccaagttgcaactatgcttggggacgagcgcggatgatattatgatacccatgagaatgcaagttgacctaagtgtttagccctcagggcaataatgattacgaatgctaggcgaagcagatagtgtacatagctactcaataacactgccaatgctataccatatcggtccatttcaagtgtgccttcaatgcgaggctacgattgagtgacgttgcaaaaatatagttcatgtatcctaatctccacacgggcagatggtcagaagttccatgcatacatcatgtttaccttgtcg

SEQ ID NO: 38297 - DNA, 1530 bp, Muscodor strobelii
  misc_feature: SGI cDNA ID NO. 573304
  misc_feature: Reduced expression when VOC is produced
  misc_feature: Encodes the peptide sequence at SEQ ID NO 38298
atggcaaatgtagccacgacagcgctgaggcaggcctcgcgccttggcctaaagcagaccatttcatctgctcctgtgcgacgatccctgacgaaagctgctggtactgtaggcgcgagatcggccaggagaggatatgtctccgaaacgaaacgaagcaatgcccaagtcaatgtcgagactgccatcaggctagacaagaaagatttcatgaacgaaaggggggagcttgtcatgccaggttcctcaagtgccttgggcgccgctggcagccccgttgcagaagtcctcaaagaagccagtctcatggacgaagggcagcgtccgatatatctcgatatgcaagccactacgcccgtcgaccccagagtattggacgccatgttgccgttcttcgtcggtgtctacgggaaccctcattcacggactcacgcttacgggtgggagagcgaaaaggccgttgaagaagctcgtgagcacgttgctaacctcatcggtgccgacccgaaagaaattatattcacgagtggtgcaacggaaagcaataatatgagtatcaaaggtgttgcgagatttttcggccgctctggcaagaagaaacacatcattacaagccagactgagcataagtgcgtcttggacagttgcaggcatttgcaagatgagggtttcgaggtcacatatttgcccgttcagaataatggcttaattgatatggctgagctagaggctgccatccgacctaacacggctcttgtcagtatcatgacggtcaacaacgagatcggagtaatccagccaatggaggaaattggcaaactgtgtcggtcaaagaaggtctttttccatactgacgctgcacaggcagtaggaaaaataccactcgatgtcaatgcgatgaacattgacttgatgtccatctcgtcacataagatctatggccccaagggcatgggtgcctgttacattcggagacggcctagagtcagaattgatcccatcatcagtgggggtggtcaagaacgtggtctgcgaagtggtactctggctccgccactcatcgtcggtttcggcgaggcgtgccggattgccaaagaggagatgccgtatgactcgaagcgcatcaaggcgctttccgaccgactgcttaaaggtcttctgtcgcttgagcatgcgactcagaacggtgacccgaagagcttctatcctggttgcgtcaatgtttcttttgcatacgtcgagggcgaatcactccttatggcattgaaggatattgctctgtcatcaggcagtgcatgcacatctgcgtctctggagcccagctatgttctgcgagcgctaggcaacagcgacgaaagtgcccacagtagtattcgattcggcatcggtcggttcacaacagagcaagaggtcgactacgttcttaaggccgtccaggagcgtgttactttcttgagagaattgagtcccctgtgggaacttgtccaggaaggtatagatctcaatactattgagtggagccaacactaa

SEQ ID NO: 38298 - protein, 509 aa, Muscodor strobelii
  misc_feature: SGI Peptide ID NO. 573304
  misc_feature (110)..(474): Pfam Id: PF00266 Pfam Desc: Aminotransferase class-V
  misc_feature (122)..(416): Pfam Id: PF01212 Pfam Desc: Beta-eliminating lyase
  misc_feature (1)..(509): NCBI GI: 39974173 Blast Desc: conserved [Magnaporthe grisea 70-15] gi|58257397|gb|AAW69320.1| cysteine desulfurase-like protein [Magnaporthe grisea] gi|145018299|gb|EDK02578.1| conserved grisea
  misc_feature (2)..(509): NCBI GI: 46137067 Blast Desc: FG10049.1 [Gibberella zeae PH-1]
  misc_feature (1)..(509): NCBI GI: 156065855 Blast Desc: SS1G_00938 [Sclerotinia sclerotiorum 1980] gi|154691797|gb|EDN91535.1| SS1G_00938 [Sclerotinia sclerotiorum 1980]
  misc_feature (1)..(509): NCBI GI: 85092004 Blast Desc: cysteine desulfurase, mitochondrial precursor [Neurospora crassa OR74A] gi|21622303|emb|CAD37006.1| trna splicing protein spl1 [Neurospora crassa] cysteine desulfurase,
  misc_feature (1)..(509): NCBI GI: 171691725 Blast Desc: protein product [Podospora anserina] gi|170945811|emb|CAP72611.1| protein product [Podospora anserina]
  misc_feature (1)..(509): NCBI GI: 145242194 Blast Desc: An09g04280 [Aspergillus niger] gi|134078288|emb|CAK96869.1| protein product [Aspergillus niger]
  misc_feature (1)..(509): NCBI GI: 121706228 Blast Desc: tRNA splicing protein (Spl1), [Aspergillus clavatus NRRL 1] gi|119399523|gb|EAW09951.1| tRNA splicing protein (Spl1), [Aspergillus clavatus NRRL 1]
  misc_feature (1)..(509): NCBI GI: 115390312 Blast Desc: cysteine desulfurase, mitochondrial precursor [Aspergillus terreus NIH2624] gi|114195057|gb|EAU36757.1| cysteine desulfurase, mitochondrial precursor [Aspergillus
  misc_feature (1)..(509): NCBI GI: 70998961 Blast Desc: tRNA splicing protein (Spl1) [Aspergillus fumigatus Af293] gi|66851839|gb|EAL92164.1| tRNA splicing protein (Spl1), [Aspergillus fumigatus Af293] gi|159127220|gb|EDP52335.1| tRNA
  misc_feature (1)..(509): NCBI GI: 238504908 Blast Desc: tRNA splicing protein (Spl1), [Aspergillus flavus NRRL3357] gi|220689797|gb|EED46147.1| tRNA splicing protein (Spl1), [Aspergillus flavus NRRL3357]
  misc_feature (98)..(509): SWISSPROT Homolog: EC 2.8.1.7 Cysteine desulfurase
  misc_feature: Useful for introducing or modulating the production of volatile compounds
MANVATTALRQASRLGLKQTISSAPVRRSLTKAAGTVGARSARRGYVSETKRSNAQVNVETAIRLDKKDFMNERGELVMPGSSSALGAAGSPVAEVLKEASLMDEGQRPIYLDMQATTPVDPRVLDAMLPFFVGVYGNPHSRTHAYGWESEKAVEEAREHVANLIGADPKEIIFTSGATESNNMSIKGVARFFGRSGKKKHIITSQTEHKCVLDSCRHLQDEGFEVTYLPVQNNGLIDMAELEAAIRPNTALVSIMTVNNEIGVIQPMEEIGKLCRSKKVFFHTDAAQAVGKIPLDVNAMNIDLMSISSHKIYGPKGMGACYIRRRPRVRIDPIISGGGQERGLRSGTLAPPLIVGFGEACRIAKEEMPYDSKRIKALSDRLLKGLLSLEHATQNGDPKSFYPGCVNVSFAYVEGESLLMALKDIALSSGSACTSASLEPSYVLRALGNSDESAHSSIRFGIGRFTTEQEVDYVLKAVQERVTFLRELSPLWELVQEGIDLNTIEWSQH

SEQ ID NO: 38299 - DNA, 2129 bp, Muscodor strobelii
  misc_feature: SGI EST ID NO. CUFF.92146.1
  misc_feature: Variant of the nucleotide sequence at SEQ ID NO 38297
ggcaaattcgccatctcctcaaaataatttcgccctactctgacctgttggcgtctgctcttcgtcatcaaccactcccacattgttcacacatttactatggcaaatgtagccacgacagcgctgaggcaggcctcgcgccttggcctaaagcagaccatttcatctgctcctgtgcgacgatccctgacgaaagctgctggtactgtaggcgcgagatcggccaggagaggatatgtctccgaaacgaaacgaagcaatgcccaagtcaatgtcgagactgccatcaggctagacaagaaagatttcatgaacgaaaggggggagcttgtcatgccaggttcctcaagtgccttgggcgccgctggcagccccgttgcagaagtcctcaaagaagccagtctcatggacgaagggcagcgtccgatatatctcgatatgcaagccactacgcccgtcgaccccagagtattggacgccatgttgccgttcttcgtcggtgtctacgggaaccctcattcacggactcacgcttacgggtgggagagcgaaaaggccgttgaagaagctcgtgagcacgttgctaacctcatcggtgccgacccgaaagaaattatattcacgagtggtgcaacggaaagcaataatatgagtatcaaaggtgttgcgagatttttcggccgctctggcaagaagaaacacatcattacaagccagactgagcataagtgcgtcttggacagttgcaggcatttgcaagatgagggtttcgaggtcacatatttgcccgttcagaataatggcttaattgatatggctgagctagaggctgccatccgacctaacacggctcttgtcagtatcatgacggtcaacaacgagatcggagtaatccagccaatggaggaaattggcaaactgtgtcggtcaaagaaggtctttttccatactgacgctgcacaggcagtaggaaaaataccactcgatgtcaatgcgatgaacattgacttgatgtccatctcgtcacataagatctatggccccaagggcatgggtgcctgttacattcggagacggcctagagtcagaattgatcccatcatcagtgggggtggtcaagaacgtggtctgcgaagtggtactctggctccgccactcatcgtcggtttcggcgaggcgtgccggattgccaaagaggagatgccgtatgactcgaagcgcatcaaggcgctttccgaccgactgcttaaaggtcttctgtcgcttgagcatgcgactcagaacggtgacccgaagagcttctatcctggttgcgtcaatgtttcttttgcatacgtcgagggcgaatcactccttatggcattgaaggatattgctctgtcatcaggcagtgcatgcacatctgcgtctctggagcccagctatgttctgcgagcgctaggcaacagcgacgaaagtgcccacagtagtattcgattcggcatcggtcggttcacaacagagcaagaggtcgactacgttcttaaggccgtccaggagcgtgttactttcttgagagaattgagtcccctgtgggaacttgtccaggaaggtatagatctcaatactattgagtggagccaacactaaataacgcatttgcattactcaatttgtacaacacaatatgatgattgagatgggcatgcttctctttaacgatcgtttatttgaactctacctccatcgtaaccaaggtagtcacttctgagaggcggatgggcctcggaatcctcctgtacaacacagtcgctagggcagtagccaaaatgataccaatgtactatgaattcaacataacgaactcgggtttgcattgcacgttataaatcatcgacatgaaaataataacatagagagataatgtcattgtctatctacatgtagatattgagcctccgatttgagttgagtggattgttgagggccaagtcgtttctggaaatttttcatccagttcgggagcccatatgacgtagtctgatgatcctgggttaggtgtatcggacgccgcatgggagatttgcctgtggagggcgaacgggaagtgagcgtcacatgtgttttgcaactggaaagtggtggccggc

SEQ ID NO: 38300 - DNA, 273 bp, Muscodor strobelii
  misc_feature: SGI cDNA ID NO. 573305
  misc_feature: Elevated expression when VOC is produced
  misc_feature: Encodes the peptide sequence at SEQ ID NO 38301
atggcattgaaggatattgctctgtcatcaggcagtgcatgcacatctgcgtctctggagcccagctatgttctgcgagcgctaggcaacagcgacgaaagtgcccacagtagtattcgattcggcatcggtcggttcacaacagagcaagaggtcgactacgttcttaaggccgtccaggagcgtgttactttcttgagagaattgagtcccctgtgggaacttgtccaggaaggtatagatctcaatactattgagtggagccaacactaa

SEQ ID NO: 38301 - protein, 90 aa, Muscodor strobelii
  misc_feature: SGI Peptide ID NO. 573305
  misc_feature (6)..(55): Pfam Id: PF00266 Pfam Desc: Aminotransferase class-V
  misc_feature (1)..(90): NCBI GI: 171691725 Blast Desc: protein product [Podospora anserina] gi|170945811|emb|CAP72611.1| protein product [Podospora anserina]
  misc_feature (1)..(90): NCBI GI: 39974173 Blast Desc: conserved [Magnaporthe grisea 70-15] gi|58257397|gb|AAW69320.1| cysteine desulfurase-like protein [Magnaporthe grisea] gi|145018299|gb|EDK02578.1| conserved grisea
  misc_feature (1)..(90): NCBI GI: 238837601 Blast Desc: cysteine desulfurase [Microsporum canis CBS 113480]
  misc_feature (1)..(90): NCBI GI: 85092004 Blast Desc: cysteine desulfurase, mitochondrial precursor [Neurospora crassa OR74A] gi|21622303|emb|CAD37006.1| trna splicing protein spl1 [Neurospora crassa] cysteine desulfurase,
  misc_feature (1)..(90): NCBI GI: 46137067 Blast Desc: FG10049.1 [Gibberella zeae PH-1]
  misc_feature (1)..(90): NCBI GI: 225558737 Blast Desc: cysteine desulfurase [Ajellomyces capsulatus G186AR]
  misc_feature (1)..(90): NCBI GI: 240275131 Blast Desc: cysteine desulfurase [Ajellomyces capsulatus H143]
  misc_feature (1)..(90): NCBI GI: 261193555 Blast Desc: cysteine desulfurase IscS [Ajellomyces dermatitidis SLH14081] gi|239588788|gb|EEQ71431.1| cysteine desulfurase IscS [Ajellomyces dermatitidis SLH14081] gi|239613888|gb|EEQ90875.1|
  misc_feature (1)..(90): NCBI GI: 154286612 Blast Desc: cysteine desulfurase, mitochondrial precursor [Ajellomyces capsulatus NAm1] gi|150407742|gb|EDN03283.1| cysteine desulfurase, mitochondrial precursor [Ajellomyces NAm1]
  misc_feature (1)..(90): NCBI GI: 169625772 Blast Desc: SNOG_16163 [Phaeosphaeria nodorum SN15] gi|111055415|gb|EAT76535.1| SNOG_16163 [Phaeosphaeria nodorum SN15]
  misc_feature (1)..(90): SWISSPROT Homolog: EC 2.8.1.7 Cysteine desulfurase
  misc_feature: Useful for introducing or modulating the production of volatile compounds
MALKDIALSSGSACTSASLEPSYVLRALGNSDESAHSSIRFGIGRFTTEQEVDYVLKAVQERVTFLRELSPLWELVQEGIDLNTIEWSQH

SEQ ID NO: 38302 - DNA, 2332 bp, Muscodor strobelii
  misc_feature: SGI EST ID NO. CUFF.92145.0
  misc_feature: Variant of the nucleotide sequence at SEQ ID NO 38300
ggcaaattcgccatctcctcaaaataatttcgccctactctgacctgttggcgtctgctcttcgtcatcaaccactcccacattgttcacacatttactatggcaaatgtagccacgacagcgctgaggcaggcctcgcgccttggcctaaagcagaccatttcatctgctcctgtgcgacgatccctgacgaaagctgctggtactgtaggcgcgagatcggccaggagaggatatgtctccgaaacgaaacgaagcaatgcccaagtcaatgtcgagactgccatcaggctagacaagaaagatttcatgaacgaaaggggggagcttgtcatgccaggttcctcaagtgccttgggcgccgctggcagccccgttgcagaagtcctcaaagaagccagtctcatggacgaagggcagcgtccgatatatctcgatatgcaagccactacgcccgtcgaccccagagtattggacgccatgttgccgttcttcgtcggtgtctacgggaaccctcattcacggactcacgcttacgggtgggagagcgaaaaggccgttgaagaagctcgtgagcacgttgctaacctcatcggtgccgacccgaaagaaattatattcacgagtggtgcaacggaaagcaataatatgagtatcaaaggtgttgcgagatttttcggccgctctggcaagaagaaacacatcattacaagccagactgagcataagtgcgtcttggacagttgcaggcatttgcaagatgagggtttcgaggtcacatatttgcccgttcagaataatggcttaattgatatggctgagctagaggctgccatccgacctaacacggctcttgtcagtatcatgacggtcaacaacgagatcggagtaatccagccaatggaggaaattggcaaactgtgtcggtcaaagaaggtctttttccatactgacgctgcacaggcagtaggaaaaataccactcgatgtcaatgcgatgaacattgacttgatgtccatctcgtcacataagatctatggccccaagggcatgggtgcctgttacattcggagacggcctagagtcagaattgatcccatcatcagtgggggtggtcaagaacgtggtctgcgaagtggtactctggctccgccactcatcgtcggtttcggcgaggcgtgccggattgccaaagaggagatgccggtgagtgaccaatttcgttcgcgacttttcgttttgcacatttcttgaatttgtatgatgaatcgcttaaacatgcatggcttgctgaattccttgaccggagtccatttgttgatccacagcacacacgtctgatctctcatcattttgcatatgcctctgaactatcacgtctaagatcgccaggactgacataagattagtatgactcgaagcgcatcaaggcgctttccgaccgactgcttaaaggtcttctgtcgcttgagcatgcgactcagaacggtgacccgaagagcttctatcctggttgcgtcaatgtttcttttgcatacgtcgagggcgaatcactccttatggcattgaaggatattgctctgtcatcaggcagtgcatgcacatctgcgtctctggagcccagctatgttctgcgagcgctaggcaacagcgacgaaagtgcccacagtagtattcgattcggcatcggtcggttcacaacagagcaagaggtcgactacgttcttaaggccgtccaggagcgtgttactttcttgagagaattgagtcccctgtgggaacttgtccaggaaggtatagatctcaatactattgagtggagccaacactaaataacgcatttgcattactcaatttgtacaacacaatatgatgattgagatgggcatgcttctctttaacgatcgtttatttgaactctacctccatcgtaaccaaggtagtcacttctgagaggcggatgggcctcggaatcctcctgtacaacacagtcgctagggcagtagccaaaatgataccaatgtactatgaattcaacataacgaactcgggtttgcattgcacgttataaatcatcgacatgaaaataataacatagagagataatgtcattgtctatctacatgtagatattgagcctccgatttgagttgagtggattgttgagggccaagtcgtttctggaaatttttcatccagttcgggagcccatatgacgtagtctgatgatcctgggttaggtgtatcggacgccgcatgggagatttgcctgtggagggcgaacgggaagtgagcgtcacatgtgttttgcaactggaaagtggtggccggc

SEQ ID NO: 38303 - DNA, 1356 bp, Muscodor strobelii
  misc_feature: SGI cDNA ID NO. 573306
  misc_feature: Reduced expression when VOC is produced
  misc_feature: Encodes the peptide sequence at SEQ ID NO 38304
atgagctttcgcggcttccagaagagcgtggtccgcgcaccacagcaattcaaagcgaagttcaatatcggagagcacaccaaagatgccgttttcattgactccgagcgtcggttccaagagctcgaaaacgagacaaagcgccttcacgatgagagtcagaaatacttcaacgcaatcaacggcatgctcaaccaccagatcgagttcagtaaagccatagccgaaatctacaagcccatatccggccgtgtctccgatccggactccctcgagatccaggggaacccggagggtatccgcgcctgcgaggaatacgaggctgttgtaaaagacctgcagaataccattgcccccgagctggagatgattgacaccaggatcgtgcgaccggccaacgagctgatggacgtgcttaaggtcatccgaaagaccgctgtgaagcgcgatcacaagcagctcgattacgataggcatcgcatgacgctcaagaagctacaagacaagaaagaaaagagtgccaaggacgaaaaggcaatgtggaaagccgagacagagcttgagacgtcatcgcaggagttcaattactttaacgatctcttgaaggaagagctcccgaagctttttgctttggagcggcagttcattcaaccgctcttccagtccttctactacatgcagttgaacatcttttatactttgcacgaaaagatgcaacagtgcgacatcggttatttcaatctacagttggacatcgaggaggcattcgaggcgaagcgcggcgacatccaagaacaagccgagaaattgtccattgtacgctttaagaccaagccaatccgaccccagaaatacggaaagcctgtagctgcgatcgaagacggcacctcaaagcctgcgggtctgctcacggagggtcatgcatccagtcccagcccctccgcttcatatagtcacgcacagcaatctgcttacgagcctccagcttcatcctcgccaggtcccgccacatcaaaatttggccagcatccccattttgaagcaccgacgactgaaaacccccctcctccatattcagcaggagctgcacataaccctgcgttagcagccgcagcagcagggaagccaaaaccgccaccaccaaagcccaagcctggccggctgagcggtgcgccacaagtagagaccgtgacggctttgtacgattactcggcccaagcagacggagacttgagtttcagagctggtgatgtgatcgagattgtcacgcgtacacagaatgagaacgagtggtggacgggcaagattggtggaaggcagggtcaattcccgggcaactacgtgaaacttggctag

SEQ ID NO: 38304 - protein, 451 aa, Muscodor strobelii
  misc_feature: SGI Peptide ID NO. 573306
  misc_feature (6)..(247): Pfam Id: PF03114 Pfam Desc: BAR domain
  misc_feature (395)..(451): Pfam Id: PF00018 Pfam Desc: SH3 domain
  misc_feature (396)..(451): Pfam Id: PF07653 Pfam Desc: Variant SH3 domain
  misc_feature (1)..(444): NCBI GI: 21622304 Blast Desc: RVS167 protein [Neurospora crassa]
  misc_feature (13)..(451): NCBI GI: 85092006 Blast Desc: Amphiphysin-like, reduced viability upon starvation protein rvs167p [Neurospora crassa OR74A] gi|28920582|gb|EAA29944.1| Amphiphysin-like, reduced viability
  misc_feature (1)..(451): NCBI GI: 171691723 Blast Desc: protein product [Podospora anserina] gi|170945810|emb|CAP72610.1| protein product [Podospora anserina]
  misc_feature (1)..(446): NCBI GI: 261351803 Blast Desc: BAR domain-containing protein [Verticillium albo-atrum VaMs.102]
  misc_feature (1)..(450): NCBI GI: 46137065 Blast Desc: FG10048.1 [Gibberella zeae PH-1]
  misc_feature (1)..(450): NCBI GI: 256732065 Blast Desc: [Nectria haematococca mpVI 77-13-4]
  misc_feature (1)..(450): NCBI GI: 156065857 Blast Desc: SS1G_00939 [Sclerotinia sclerotiorum 1980] gi|154691798|gb|EDN91536.1| SS1G_00939 [Sclerotinia sclerotiorum 1980]
  misc_feature (1)..(450): NCBI GI: 145610967 Blast Desc: MGG_11497 [Magnaporthe grisea 70-15] gi|145018298|gb|EDK02577.1| MGG_11497 [Magnaporthe grisea 70-15]
  misc_feature (1)..(450): NCBI GI: 70998963 Blast Desc: BAR adaptor protein RVS167 [Aspergillus fumigatus Af293] gi|66851840|gb|EAL92165.1| BAR adaptor protein RVS167, [Aspergillus fumigatus Af293] gi|159127221|gb|EDP52336.1| BAR
  misc_feature (1)..(445): NCBI GI: 121706226 Blast Desc: BAR adaptor protein RVS167, [Aspergillus clavatus NRRL 1] gi|119399522|gb|EAW09950.1| BAR adaptor protein RVS167, [Aspergillus clavatus NRRL 1]
  misc_feature: Useful for introducing or modulating the production of volatile compounds
MSFRGFQKSVVRAPQQFKAKFNIGEHTKDAVFIDSERRFQELENETKRLHDESQKYFNAINGMLNHQIEFSKAIAEIYKPISGRVSDPDSLEIQGNPEGIRACEEYEAVVKDLQNTIAPELEMIDTRIVRPANELMDVLKVIRKTAVKRDHKQLDYDRHRMTLKKLQDKKEKSAKDEKAMWKAETELETSSQEFNYFNDLLKEELPKLFALERQFIQPLFQSFYYMQLNIFYTLHEKMQQCDIGYFNLQLDIEEAFEAKRGDIQEQAEKLSIVRFKTKPIRPQKYGKPVAAIEDGTSKPAGLLTEGHASSPSPSASYSHAQQSAYEPPASSSPGPATSKFGQHPHFEAPTTENPPPPYSAGAAHNPALAAAAAGKPKPPPPKPKPGRLSGAPQVETVTALYDYSAQADGDLSFRAGDVIEIVTRTQNENEWWTGKIGGRQGQFPGNYVKLG

SEQ ID NO: 38305 - DNA, 2453 bp, Muscodor strobelii
  misc_feature: SGI EST ID NO. CUFF.91908.1
  misc_feature: Variant of the nucleotide sequence at SEQ ID NO 38303
tatcaatctacatgtagatagcaggtagctcttcaagacatttctcaatagacattcttgactctcctctactcgtctcgtcgacaaagcgcatgcaagcccccaagtcacctgttgtttgtaggcaaactttaaagttattgacacagacccgactcatgcgccaagccacgcgacagcagactgcgggctcttagtgaagcccgatcccagttagcactgccaccaagaaagaggccttcgtcagtcgggacagtaataagtcgcaacctgcctcttagtcaggtgtttattccttcatcctcccgccctcacctcccatcattaccttactcctggtcgcctacaataataatttgcgaacaccatcaaatcattctagacaagtcactcccctctctcctaccgtgagcaatatccatctcgtgactctccttgtactttcgcattccactgaggggcagtctaccaccgacgccgatcgatccgcaacctccaaaccccgtcattttcgcccctcaacaccaacaattggcacctatatactttcgcattgtatgactgcgtagcatccaaatcgctacctgacagacatgagctttcgcggcttccagaagagcgtggtccgcgcaccacagcaattcaaagcgaagttcaatatcggagagcacaccaaagatgccgttttcattgactccgagcgtcggttccaagagctcgaaaacgagacaaagcgccttcacgatgagagtcagaaatacttcaacgcaatcaacggcatgctcaaccaccagatcgagttcagtaaagccatagccgaaatctacaagcccatatccggccgtgtctccgatccggactccctcgagatccaggggaacccggagggtatccgcgcctgcgaggaatacgaggctgttgtaaaagacctgcagaataccattgcccccgagctggagatgattgacaccaggatcgtgcgaccggccaacgagctgatggacgtgcttaaggtcatccgaaagaccgctgtgaagcgcgatcacaagcagctcgattacgataggcatcgcatgacgctcaagaagctacaagacaagaaagaaaagagtgccaaggacgaaaaggcaatgtggaaagccgagacagagcttgagacgtcatcgcaggagttcaattactttaacgatctcttgaaggaagagctcccgaagctttttgctttggagcggcagttcattcaaccgctcttccagtccttctactacatgcagttgaacatcttttatactttgcacgaaaagatgcaacagtgcgacatcggttatttcaatctacagttggacatcgaggaggcattcgaggcgaagcgcggcgacatccaagaacaagccgagaaattgtccattgtacgctttaagaccaagccaatccgaccccagaaatacggaaagcctgtagctgcgatcgaagacggcacctcaaagcctgcgggtctgctcacggagggtcatgcatccagtcccagcccctccgcttcatatagtcacgcacagcaatctgcttacgagcctccagcttcatcctcgccaggtcccgccacatcaaaatttggccagcatccccattttgaagcaccgacgactgaaaacccccctcctccatattcagcaggagctgcacataaccctgcgttagcagccgcagcagcagggaagccaaaaccgccaccaccaaagcccaagcctggccggctgagcggtgcgccacaagtagagaccgtgacggctttgtacgattactcggcccaagcagacggagacttgagtttcagagctggtgatgtgatcgagattgtcacgcgtacacagaatgagaacgagtggtggacgggcaagattggtggaaggcagggtcaattcccgggcaactacgtgaaacttggctagaatccaagaaatggccgctttggaagcatctgaggaatttagacatcttcgtgttcgagctgggcagcctcgatttaacggccacttagtctctctacgcatatatatgcgatgacttggtccctcttttcgcatgcatgcctcgggagctggagaaggcaggataatgaggagagatgcattgattacagattataccaccttctagacgataggaacgaacaggataagagtaggagtaaaaggtagtgagatagggactgaacatgatacctcagacagttgataggacaacgaacaaaaccaccaatccacatgctattcgagtcttattaggaatggcacagccctagttctaacaatttgtgattgtatctttcgagcccctttggtctaaatcatgtttcgaaataaactagatgtcagtgatattacacgcatttaacctaatattaacgtccagtacacaacgggccctcagacaagccggagccaagagtttgc

SEQ ID NO: 38306 - DNA, 792 bp, Muscodor strobelii
  misc_feature: SGI cDNA ID NO. 573307
  misc_feature: Encodes the peptide sequence at SEQ ID NO 38307
atgggggaagagtttcagatattctcaacaatccgttgggatccaaatctgctcaatgtccctcaagcaggctatagagacgttggatggaaccagacaccgtcccccttctacatgctagatctccatcgcgatcgcatgctcagagccgctcagcactggaactgggagaatgctgttcgtacactcaccggcgaggaaggcttgcgtagacttgcgaacttcttgagcaaagagatcgaactcattaatccaaaagggcctctgcgcgtgaaggctctactcgataaagatgggtctctaggtgtcatattggcagatactccatctgtcagcatggccacactctttccctctactctgtcaacttcgcaccttgatgactctaatttccttgtagaggtcgacaagacgtatactaccaggtctccactcacccatcacaagacaacctctcgcgaaatgtacgacaacgcacgagctcgctcgaaagccgtcgcagcaggcccaggagagattcttctagtcaataccgacgatgggtcggtaatggagggcagcatcacaactccttatttctggaggaacaacaaatgggtcacgccgcctgtggctcaagagttcagcgcgactgtaggcagtggaggtaacaatggcacaactcgaagatgggctctcgaaagaaatcttgtcgttgaagagaagatccatgcagactcaattgtcgacggggaacggatctggttgagcaacggcctgaaaggtttcttccctggggttgtgaaattgtga

SEQ ID NO: 38307 - protein, 263 aa, Muscodor strobelii
  misc_feature: SGI Peptide ID NO. 573307
  misc_feature (13)..(263): NCBI GI: 46136821 Blast Desc: FG09926.1 [Gibberella zeae PH-1]
  misc_feature (1)..(263): NCBI GI: 256732091 Blast Desc: NECHADRAFT_40658 [Nectria haematococca mpVI 77-13-4]
  misc_feature (4)..(263): NCBI GI: 39973747 Blast Desc: MGG_00980 [Magnaporthe grisea 70-15] gi|145018065|gb|EDK02344.1| MGG_00980 [Magnaporthe grisea 70-15]
  misc_feature (4)..(263): NCBI GI: 171693705 Blast Desc: protein product [Podospora anserina] gi|170946801|emb|CAP73605.1| protein product [Podospora anserina]
  misc_feature (1)..(228): NCBI GI: 261352130 Blast Desc: conserved [Verticillium albo-atrum VaMs.102]
  misc_feature (1)..(228): NCBI GI: 116197829 Blast Desc: CHGG_07070 [Chaetomium globosum CBS 148.51] gi|88178349|gb|EAQ85817.1| CHGG_07070 [Chaetomium globosum CBS 148.51]
  misc_feature (7)..(263): NCBI GI: 11595525 Blast Desc: conserved [Neurospora crassa]
  misc_feature (2)..(263): NCBI GI: 70988897 Blast Desc: conserved [Aspergillus fumigatus Af293] gi|66846931|gb|EAL87262.1| conserved [Aspergillus fumigatus Af293] gi|159128714|gb|EDP53828.1| conserved [Aspergillus A1163]
  misc_feature (5)..(263): NCBI GI: 258564827 Blast Desc: conserved [Uncinocarpus reesii 1704] gi|237906859|gb|EEP81260.1| conserved [Uncinocarpus reesii 1704]
  misc_feature (3)..(261): NCBI GI: 121710872 Blast Desc: conserved [Aspergillus clavatus NRRL 1] gi|119401202|gb|EAW11626.1| conserved [Aspergillus clavatus NRRL 1]
  misc_feature (81)..(262): SWISSPROT Homolog: EC 4.1.3.38 Aminodeoxychorismate lyase
MGEEFQIFSTIRWDPNLLNVPQAGYRDVGWNQTPSPFYMLDLHRDRMLRAAQHWNWENAVRTLTGEEGLRRLANFLSKEIELINPKGPLRVKALLDKDGSLGVILADTPSVSMATLFPSTLSTSHLDDSNFLVEVDKTYTTRSPLTHHKTTSREMYDNARARSKAVAAGPGEILLVNTDDGSVMEGSITTPYFWRNNKWVTPPVAQEFSATVGSGGNNGTTRRWALERNLVVEEKIHADSIVDGERIWLSNGLKGFFPGVVKL

SEQ ID NO: 38308 - DNA, 1211 bp, Muscodor strobelii
  misc_feature: SGI EST ID NO. CUFF.91912.1
  misc_feature: Variant of the nucleotide sequence at SEQ ID NO 38306
tttcgaactaggactggagctcggagcaaggaaagaaacagtgttcaccaatgcaatcatacataatcgaccagcatgattgatctctttattatctaactgcgtttacctataggtagttgttgatgagtctcatgtcaaacaatggatagcttggttgccgcctggcgccacttgcttgtggacagaagctgagtcatcttcatctactgcaagtcgttgcacgtagggacatggtgcagcgtcacgttatcactatacctacctacatctagaataatacatgactgagtcgaaatgggggaagagtttcagatattctcaacaatccgttgggatccaaatctgctcaatgtccctcaagcaggctatagagacgttggatggaaccagacaccgtcccccttctacatgctagatctccatcgcgatcgcatgctcagagccgctcagcactggaactgggagaatgctgttcgtacactcaccggcgaggaaggcttgcgtagacttgcgaacttcttgagcaaagagatcgaactcattaatccaaaagggcctctgcgcgtgaaggctctactcgataaagatgggtctctaggtgtcatattggcagatactccatctgtcagcatggccacactctttccctctactctgtcaacttcgcaccttgatgactctaatttccttgtagaggtcgacaagacgtatactaccaggtctccactcacccatcacaagacaacctctcgcgaaatgtacgacaacgcacgagctcgctcgaaagccgtcgcagcaggcccaggagagattcttctagtcaataccgacgatgggtcggtaatggagggcagcatcacaactccttatttctggaggaacaacaaatgggtcacgccgcctgtggctcaagagttcagcgcgactgtaggcagtggaggtaacaatggcacaactcgaagatgggctctcgaaagaaatcttgtcgttgaagagaagatccatgcagactcaattgtcgacggggaacggatctggttgagcaacggcctgaaaggtttcttccctggggttgtgaaattgtgagataaagaatcgactcaaaagataatttaaatatgcacttgtgagagacactaacacaattcttgaatctgcggtttcttgcaccgttgcctgtcagtctcgcctacatgcacaactgtggc

SEQ ID NO: 38309 - DNA, 1873 bp, Muscodor strobelii
  misc_feature: SGI cDNA ID NO. 573308
  misc_feature: Reduced expression when VOC is produced
  misc_feature: Encodes the peptide sequence at SEQ ID NO 38310
atgtctggcgccgccgccgctcctccgcccatgccaccactggctcaacccatcgctgtccctgtcgagagttccgtctgggatcgtctcaccaactgggcctccgagaacaaggccctcgtctacacaatcgctggtgtcgccgtcgttgtcacaggagctggtgtcgtatactacctgaatggggatgctaaggcaaagagctccgatgcccccagattaagcaaaaaggagaggaggaagaagaaggaagccgagcgccaagcagaagctgccgagaaggccgctcctcctccatcgaccgctccccagcctaaagctgccattgtagagagcaccgatgagctaccggaagtcgacgagttctccgtcggtgctctgtccgacgaggtcaggaacgagtacgcccagaagctcaaggccgctggaaacaaggcatacggcagcaaggactacaaccgcgccatcgagctctactctaaagccatcatctgcaagccagatcccatcttctactccaacagggccgcgtgttacaacgctctgagcgagtgggagaaggtcgtcgacgacaccactgctgccgtcaccctcgaccccctctacgtcaaggccctgaaccgacgcgccaatgcctacgagcacctccagctatacagcgagtccttactggacttcactgccagctgcattatcgatgacttccggaacgagagcaccgccgcctcggtcgagaagctcctgaagaaggttgccgaagtcaaggccgaagacatcctcaagtccaagagtcccaccaagctgccaagccccatcttcgtctccaactacatcaagagcttccgcgagaagccgcgccctgctgggctggaggaatctgccgatctctctcccggaaaggcacaagtgctcgaaggtctgatcgccatggagaagaagacgcacgagggctacacagatgctgccaacgcatttgagcaagccattgaaagcggtgatcttggtgagtatgaggcactagcctataacatgcgcggcactttcagatgcctgcgtgggcagcaggacgaagctcttgaggatcttaacaagagcatcgagctcgatccttctatgacccagagctacgtgaagcgtgcaagcatgcatttagagaagggcgaacgccaggaggctgcaaacgacttgcagaccgccatccagcacaacgagaacgatccggatatctactatcatcgcgcccagctgcacttcatccacggcgagtggcaagacgctgccaaagactaccagaaatcaatcgacctcgacaaagacttcatcttctcacacatacagcttggtgtcacgcagtacaagatgggttcgttggcatcctcgatggccaccttccgacgatgcatcaagaacttcagcgaggttccggatgtgtacaactactacggcgagcttctgctagaccaaggtgactatgaccaggccatagcgcagtttgacattgccatcaacaaggagaagagcagcaagcctctggccatgaacgtcttgcccctcatcaacaaggctctcaccttgttccagcaaaagcatgactttgccgaggcagagagcctgtgcgagaaggctttgattctcgaccccgaatgcgacatcgccgtcgcgacgatggcccagctactcctccagcaaggcaaagtcgacaaggccttaactcacttcgagaaggccgccgagctggccaggacgcctgccgagatcgtgaatgccctgtcttacgctgaggcaacgcggacacagcttcacgtccagatgaaatacccacagctcaaggctaaactcgaacagggcgctgctatgggcgccggcatgggtg

SEQ ID NO: 38310 - protein, 624 aa, Muscodor strobelii
  misc_feature: SGI Peptide ID NO. 573308
  misc_feature (407)..(440): Pfam Id: PF00515 Pfam Desc: Tetratricopeptide repeat
  misc_feature (339)..(372): Pfam Id: PF00515 Pfam Desc: Tetratricopeptide repeat
  misc_feature (407)..(440): Pfam Id: PF07719 Pfam Desc: Tetratricopeptide repeat
  misc_feature (475)..(508): Pfam Id: PF07719 Pfam Desc: Tetratricopeptide repeat
  misc_feature (556)..(583): Pfam Id: PF00515 Pfam Desc: Tetratricopeptide repeat
  misc_feature (373)..(406): Pfam Id: PF00515 Pfam Desc: Tetratricopeptide repeat
  misc_feature (9)..(624): NCBI GI: 261352129 Blast Desc: mitochondrial precursor proteins import receptor [Verticillium albo-atrum VaMs.102]
  misc_feature (8)..(623): NCBI GI: 85101921 Blast Desc: mitochondrial precursor protein import receptor tom70 [Neurospora crassa OR74A] gi|11595524|emb|CAC18318.1| mitochondrial precursor protein import receptor tom70 [Neurospora
  misc_feature (11)..(624): NCBI GI: 256731711 Blast Desc: [Nectria haematococca mpVI 77-13-4]
  misc_feature (8)..(623): NCBI GI: 67477439 Blast Desc: TOM70_NEUCR RecName: Full=Mitochondrial import receptor subunit tom-70; AltName: Full=Translocase of outer membrane tom-70; AltName: Full=Mitochondrial precursor proteins
  misc_feature (8)..(623): NCBI GI: 3028 Blast Desc: mitochondrial outer membrane 72K protein [Neurospora crassa] gi|227471|prf||1704253A ADP/ATP carrier receptor
  misc_feature (15)..(607): NCBI GI: 46136823 Blast Desc: FG09927.1 [Gibberella zeae PH-1]
  misc_feature (18)..(624): NCBI GI: 39973749 Blast Desc: MGG_00979 [Magnaporthe grisea 70-15] gi|145018066|gb|EDK02345.1| MGG_00979 [Magnaporthe grisea 70-15]
  misc_feature (26)..(613): NCBI GI: 115433392 Blast Desc: mitochondrial precursor proteins import receptor [Aspergillus terreus NIH2624] gi|114189685|gb|EAU31385.1| mitochondrial precursor proteins import receptor [Aspergillus
  misc_feature (13)..(614): NCBI GI: 119497941 Blast Desc: mitochondrial outer membrane translocase receptor (TOM70), [Neosartorya fischeri NRRL 181] gi|119413892|gb|EAW23831.1| mitochondrial outer membrane receptor
  misc_feature (10)..(601): NCBI GI: 169604955 Blast Desc: SNOG_05494 [Phaeosphaeria nodorum SN15] gi|160706673|gb|EAT86558.2| SNOG_05494 [Phaeosphaeria nodorum SN15]
  misc_feature: Useful for introducing or modulating the production of volatile compounds
MSGAAAAPPPMPPLAQPIAVPVESSVWDRLTNWASENKALVYTIAGVAVVVTGAGVVYYLNGDAKAKSSDAPRLSKKERRKKKEAERQAEAAEKAAPPPSTAPQPKAAIVESTDELPEVDEFSVGALSDEVRNEYAQKLKAAGNKAYGSKDYNRAIELYSKAIICKPDPIFYSNRAACYNALSEWEKVVDDTTAAVTLDPLYVKALNRRANAYEHLQLYSESLLDFTASCIIDDFRNESTAASVEKLLKKVAEVKAEDILKSKSPTKLPSPIFVSNYIKSFREKPRPAGLEESADLSPGKAQVLEGLIAMEKKTHEGYTDAANAFEQAIESGDLGEYEALAYNMRGTFRCLRGQQDEALEDLNKSIELDPSMTQSYVKRASMHLEKGERQEAANDLQTAIQHNENDPDIYYHRAQLHFIHGEWQDAAKDYQKSIDLDKDFIFSHIQLGVTQYKMGSLASSMATFRRCIKNFSEVPDVYNYYGELLLDQGDYDQAIAQFDIAINKEKSSKPLAMNVLPLINKALTLFQQKHDFAEAESLCEKALILDPECDIAVATMAQLLLQQGKVDKALTHFEKAAELARTPAEIVNALSYAEATRTQLHVQMKYPQLKAKLEQGAAMGAGMG

SEQ ID NO: 38311 - DNA, 2195 bp, Muscodor strobelii
  misc_feature: SGI EST ID NO. CUFF.92139.0
  misc_feature: Variant of the nucleotide sequence at SEQ ID NO 38309
tggatagcgtgccgggctgggtgcagagaaggttctttgggtcgcgctaccaattttttgtgacagaattatcacttccttacaccatcacagctccctcatgagcgcatcatcgttcgaacgaccatccccatctcccatctctctctttcccgttcctgccgctatctacctccattcctaggtctggtaattgacgtctccattgccaatcccgctcgcgcctgtcctttgtcgtcggcatcccttcccgccgccgcggacagtccccgtaacaaatcgcctccatctcgccagctctctgcattagtcaagacacgccatgtctggcgccgccgccgctcctccgcccatgccaccactggctcaacccatcgctgtccctgtcgagagttccgtctgggatcgtctcaccaactgggcctccgagaacaaggccctcgtctacacaatcgctggtgtcgccgtcgttgtcacaggagctggtgtcgtatactacctgaatggggatgctaaggcaaagagctccgatgcccccagattaagcaaaaaggagaggaggaagaagaaggaagccgagcgccaagcagaagctgccgagaaggccgctcctcctccatcgaccgctccccagcctaaagctgccattgtagagagcaccgatgagctaccggaagtcgacgagttctccgtcggtgctctgtccgacgaggtcaggaacgagtacgcccagaagctcaaggccgctggaaacaaggcatacggcagcaaggactacaaccgcgccatcgagctctactctaaagccatcatctgcaagccagatcccatcttctactccaacagggccgcgtgttacaacgctctgagcgagtgggagaaggtcgtcgacgacaccactgctgccgtcaccctcgaccccctctacgtcaaggccctgaaccgacgcgccaatgcctacgagcacctccagctatacagcgagtccttactggacttcactgccagctgcattatcgatgacttccggaacgagagcaccgccgcctcggtcgagaagctcctgaagaaggttgccgaagtcaaggccgaagacatcctcaagtccaagagtcccaccaagctgccaagccccatcttcgtctccaactacatcaagagcttccgcgagaagccgcgccctgctgggctggaggaatctgccgatctctctcccggaaaggcacaagtgctcgaaggtctgatcgccatggagaagaagacgcacgagggctacacagatgctgccaacgcatttgagcaagccattgaaagcggtgatcttggtgagtatgaggcactagcctataacatgcgcggcactttcagatgcctgcgtgggcagcaggacgaagctcttgaggatcttaacaagagcatcgagctcgatccttctatgacccagagctacgtgaagcgtgcaagcatgcatttagagaagggcgaacgccaggaggctgcaaacgacttgcagaccgccatccagcacaacgagaacgatccggatatctactatcatcgcgcccagctgcacttcatccacggcgagtggcaagacgctgccaaagactaccagaaatcaatcgacctcgacaaagacttcatcttctcacacatacagcttggtgtcacgcagtacaagatgggttcgttggcatcctcgatggccaccttccgacgatgcatcaagaacttcagcgaggttccggatgtgtacaactactacggcgagcttctgctagaccaaggtgactatgaccaggccatagcgcagtttgacattgccatcaacaaggagaagagcagcaagcctctggccatgaacgtcttgcccctcatcaacaaggctctcaccttgttccagcaaaagcatgactttgccgaggcagagagcctgtgcgagaaggctttgattctcgaccccgaatgcgacatcgccgtcgcgacgatggcccagctactcctccagcaaggcaaagtcgacaaggccttaactcacttcgagaaggccgccgagctggccaggacgcctgccgagatcgtgaatgccctgtcttacgctgaggcaacgcggacacagcttcacgtccagatgaaatacccacagctcaaggctaaactcgaacagggcgctgctatgggcgccggcatgggtg

SEQ ID NO: 38312 - DNA, 552 bp, Muscodor strobelii
  misc_feature: SGI cDNA ID NO. 573309
  misc_feature: Encodes the peptide sequence at SEQ ID NO 38313
atgtcagaatataatgcacctgagccagtgccatcggcacctcaattgccgcagcccacgtggagagatctgttcgccttcacgacatggcaacacgctgggctgttggccatcgggctcttggccgcagcgctagccggcgctctcaagacagccgtgttcattgtgtttgtgaagatatttggagtcatcgcgcagttcggcgccggagatctagcaggcccagagactctggccgaggtctcatcgtggtgcgtgctgcttgctttggtcggcggcggcgcctggctcatcaacttcgctgtcctgttctcttgggccacctttggcgagttacaagcacgtactatccgatttagtctgtttcgcgggctactcaagaaagaaatggcatggcttgactctcagccagatggtgtcgccagtttactggtcaggatccaaacacaagcacgcgagctccaaatagcatcctccatggccctcggcaaccccacgatagaggctgctaccgcgctcgccaacctcattgtggccctatatacagcatag

SEQ ID NO: 38313 - protein, 183 aa, Muscodor strobelii
  misc_feature: SGI Peptide ID NO. 573309
  misc_feature (20)..(181): NCBI GI: 261355436 Blast Desc: multidrug resistance protein [Verticillium albo-atrum VaMs.102]
  misc_feature (18)..(181): NCBI GI: 156056943 Blast Desc: SS1G_04202 [Sclerotinia sclerotiorum 1980] gi|154701988|gb|EDO01727.1| SS1G_04202 [Sclerotinia sclerotiorum 1980]
  misc_feature (18)..(181): NCBI GI: 256724819 Blast Desc: NECHADRAFT_96021 [Nectria haematococca mpVI 77-13-4]
  misc_feature (15)..(181): NCBI GI: 46126277 Blast Desc: FG07516.1 [Gibberella zeae PH-1]
  misc_feature (18)..(181): NCBI GI: 85090808 Blast Desc: NCU09443 [Neurospora crassa OR74A] gi|28919969|gb|EAA29359.1| [Neurospora crassa OR74A]
  misc_feature (2)..(180): NCBI GI: 171681571 Blast Desc: protein product [Podospora anserina] gi|170940744|emb|CAP65972.1| protein product [Podospora anserina]
  misc_feature (5)..(183): NCBI GI: 240281992 Blast Desc: ABC a-pheromone efflux pump AtrD [Ajellomyces capsulatus H143]
  misc_feature (20)..(183): NCBI GI: 225559070 Blast Desc: ABC a-pheromone efflux pump AtrD [Ajellomyces capsulatus G186AR]
  misc_feature (17)..(183): NCBI GI: 226286121 Blast Desc: multidrug resistance protein [Paracoccidioides brasiliensis Pb01]
  misc_feature (21)..(183): NCBI GI: 225679841 Blast Desc: bile salt export pump [Paracoccidioides brasiliensis Pb03]
MSEYNAPEPVPSAPQLPQPTWRDLFAFTTWQHAGLLAIGLLAAALAGALKTAVFIVFVKIFGVIAQFGAGDLAGPETLAEVSSWCVLLALVGGGAWLINFAVLFSWATFGELQARTIRFSLFRGLLKKEMAWLDSQPDGVASLLVRIQTQARELQIASSMALGNPTIEAATALANLIVALYTA

SEQ ID NO: 38314 - DNA, 876 bp, Muscodor strobelii
  misc_feature: SGI cDNA ID NO. 573310
  misc_feature: Encodes the peptide sequence at SEQ ID NO 38315
atgcatatcagttcttgctacgtcagattctggattgaaagcctgttcatcgttggtctctactacggtgctgtgctcgtggaccagggcctcagcccagtcaacactttgacggctttctacgcggctctcaacacgctccagtcccttgaggcattcgcacccatgtatctcgttcttggtaaaggcatggcagcgggtcatgctctccgcctggtttctgaaattatcgaaagtgaccggtcggttcactctatgataggcggttcggaccctggaagatgcattggtgatatcgaacttcaaaatattacttttgcatacctgtccaatcctctgagtgccgtgctgaagaaatcgtccttccattttcgtcacggtggtctttactttatcatcggccgaaatggctctggcaagagcaccttgagcgatctacttctaaagttctatgagcccctcagaggtgagatattggtcggtggcaacacgatcagaacgctcgataccagttggctgcggaaaaatattacgctcgtccaacagtccagtgtactcttcaatgataacttcttcatgaacgtcgctcttggccaccccaacccgtcacgtgtttctacactccgtgtaaaggccgcgtgtgagattgcattacttcaatcaaccatctcgaacctatcgtccggcctggacacctacatcggtgccggcggtcacagtctcagcgatggagagatacagcggcttgcactcgcaagagccaagcttagaaacacgcctgttcttatccttgacgaagtcactagtggtctagattcagtgagccgggtactcgttatggaagccaccagacgatggcatctgccagtacgatag

SEQ ID NO: 38315 - protein, 291 aa, Muscodor strobelii
  misc_feature: SGI Peptide ID NO. 573310
  misc_feature (127)..(291): Pfam Id: PF00005 Pfam Desc: ABC transporter
  misc_feature (127)..(282): Pfam Id: PF00005 Pfam Desc: ABC transporter
  misc_feature (7)..(287): NCBI GI: 261355436 Blast Desc: multidrug resistance protein [Verticillium albo-atrum VaMs.102]
  misc_feature (7)..(286): NCBI GI: 85090808 Blast Desc: NCU09443 [Neurospora crassa OR74A] gi|28919969|gb|EAA29359.1| [Neurospora crassa OR74A]
  misc_feature (7)..(287): NCBI GI: 171681571 Blast Desc: protein product [Podospora anserina] gi|170940744|emb|CAP65972.1| protein product [Podospora anserina]
  misc_feature (3)..(287): NCBI GI: 256724819 Blast Desc: NECHADRAFT_96021 [Nectria haematococca mpVI 77-13-4]
  misc_feature (7)..(287): NCBI GI: 46126277 Blast Desc: FG07516.1 [Gibberella zeae PH-1]
  misc_feature (3)..(287): NCBI GI: 145602444 Blast Desc: MGG_04899 [Magnaporthe grisea 70-15] gi|145010868|gb|EDJ95524.1| MGG_04899 [Magnaporthe grisea 70-15]
  misc_feature (6)..(287): NCBI GI: 255942763 Blast Desc: Pc18g03100 [Penicillium chrysogenum Wisconsin 54-1255] gi|211586883|emb|CAP94534.1| Pc18g03100 [Penicillium chrysogenum Wisconsin 54-1255]
  misc_feature (5)..(287): NCBI GI: 225679841 Blast Desc: bile salt export pump [Paracoccidioides brasiliensis Pb03]
  misc_feature (5)..(287): NCBI GI: 226291599 Blast Desc: multidrug resistance protein [Paracoccidioides brasiliensis Pb18]
  misc_feature (15)..(286): NCBI GI: 119179041 Blast Desc: CIMG_08312 [Coccidioides immitis RS]
  misc_feature (3)..(286): SWISSPROT Homolog: EC 3.6.3.48 Alpha-factor-transporting ATPase
MHISSCYVRFWIESLFIVGLYYGAVLVDQGLSPVNTLTAFYAALNTLQSLEAFAPMYLVLGKGMAAGHALRLVSEIIESDRSVHSMIGGSDPGRCIGDIELQNITFAYLSNPLSAVLKKSSFHFRHGGLYFIIGRNGSGKSTLSDLLLKFYEPLRGEILVGGNTIRTLDTSWLRKNITLVQQSSVLFNDNFFMNVALGHPNPSRVSTLRVKAACEIALLQSTISNLSSGLDTYIGAGGHSLSDGEIQRLALARAKLRNTPVLILDEVTSGLDSVSRVLVMEATRRWHLPVR

SEQ ID NO: 38316 - DNA, 1052 bp, Muscodor strobelii
  misc_feature: SGI cDNA ID NO. 573311
  misc_feature: Encodes the peptide sequence at SEQ ID NO 38317
cctgcagaccaccctgatcgagctgcctgcttgaacaacctcggaagcttgctcggcaggcggttcgagtggacaggatccatcgacgacctaaatcgcaggctctcctcgtacgaagaaggctggcgttgtcgcacagcccccccagctattcgtattcgcctggctcggcaggccgctgagattcgagcctcgcagcccgactgggaaggctcaagtcatctgctgcagcaggcggttcacatcctccccgacatcagcccacggtggttgaggcatactgacaagcagcacgtgcttgcagactttgccggcttggcttccgctgccgctgctactgcccttaatgcgcggaaagatgtttatgatgctttacgatttctcgagcttggtcgcggcattattgagaatttgctgatcgaaactcgcggcgacatttccgatcttgcgcgcaagcaccctgatttggcagagaaattcatctctcttcgggacgagctagactcgccagagaaggaccctactgttctgagctctgctgatcagccgtctttttgggagtcactctcgagacgacgtcgcgaagcggtccaggaactggacaagcttcgatcgcggatccgtgctcagcccggattcgagaacttccatctcccgccgacttccgacgatctgaaggctgcagcagatccaggccctatcatcgtcgtcaacctaagcacctaccgctgcgatgcgttcttaatcgagcgcaatcaaattcgggtattagaactgcctaatataacggtagagaaaatagccggtcgaaccaaagagttgcaaatatcccgtcaacgggccactccccctatatcgctgcttgagtggctctgggacgtggtcgctcgtccggtcttgaacgcactcgggtttcaaaagcctatctccgacaccagttggcctcgtgtatggtggattcctacaggactcataagccagctaccactccatgctgcaggatattacgcaaagggcagctcggagactgtactcgatagggtcatgtcgtc

SEQ ID NO: 38317 - protein, 350 aa, Muscodor strobelii
  misc_feature: SGI Peptide ID NO. 573311
  misc_feature (1)..(350): NCBI GI: 46120502 Blast Desc: FG04898.1 [Gibberella zeae PH-1]
  misc_feature (4)..(350): NCBI GI: 240106932 Blast Desc: CPC735_017210 [Coccidioides posadasii C735 delta SOWgp]
  misc_feature (1)..(350): NCBI GI: 67516515 Blast Desc: AN0539.2 [Aspergillus nidulans FGSC A4] gi|40747482|gb|EAA66638.1| AN0539.2 [Aspergillus nidulans FGSC A4] gi|259489203|tpe|CBF89281.1| TPA: conserved [Aspergillus FGSC
  misc_feature (7)..(350): NCBI GI: 119474523 Blast Desc: NFIA_006040 [Neosartorya fischeri NRRL 181] gi|119407290|gb|EAW17240.1| conserved [Neosartorya fischeri NRRL 181]
  misc_feature (1)..(350): NCBI GI: 154310162 Blast Desc: BC1G_07001 [Botryotinia fuckeliana B05.10] gi|150851562|gb|EDN26755.1| BC1G_07001 [Botryotinia fuckeliana B05.10]
  misc_feature (1)..(350): NCBI GI: 67541931 Blast Desc: AN7129.2 [Aspergillus nidulans FGSC A4] gi|40741941|gb|EAA61131.1| AN7129.2 [Aspergillus nidulans FGSC A4] gi|259483542|tpe|CBF79016.1| TPA: conserved [Aspergillus FGSC
  misc_feature (1)..(346): NCBI GI: 67516399 Blast Desc: AN0481.2 [Aspergillus nidulans FGSC A4] gi|40747424|gb|EAA66580.1| AN0481.2 [Aspergillus nidulans FGSC A4] gi|259489269|tpe|CBF89401.1| TPA: conserved [Aspergillus FGSC
  misc_feature (1)..(349): NCBI GI: 46109676 Blast Desc: FG01720.1 [Gibberella zeae PH-1]
  misc_feature (52)..(350): NCBI GI: 46103765 Blast Desc: FG00104.1 [Gibberella zeae PH-1]
  misc_feature (1)..(350): NCBI GI: 256721670 Blast Desc: NECHADRAFT_44795 [Nectria haematococca mpVI 77-13-4]
PADHPDRAACLNNLGSLLGRRFEWTGSIDDLNRRLSSYEEGWRCRTAPPAIRIRLARQAAEIRASQPDWEGSSHLLQQAVHILPDISPRWLRHTDKQHVLADFAGLASAAAATALNARKDVYDALRFLELGRGIIENLLIETRGDISDLARKHPDLAEKFISLRDELDSPEKDPTVLSSADQPSFWESLSRRRREAVQELDKLRSRIRAQPGFENFHLPPTSDDLKAAADPGPIIVVNLSTYRCDAFLIERNQIRVLELPNITVEKIAGRTKELQISRQRATPPISLLEWLWDVVARPVLNALGFQKPISDTSWPRVWWIPTGLISQLPLHAAGYYAKGSSETVLDRVMS

SEQ ID NO: 38318 - DNA, 1158 bp, Muscodor strobelii
  misc_feature: SGI EST ID NO. CUFF.91993.0
  misc_feature: Variant of the nucleotide sequence at SEQ ID NO 38316
gcctgcagaccaccctgatcgagctgcctgcttgaacaacctcggaagcttgctcggcaggcggttcgagtggacaggatccatcgacgacctaaatcgcaggctctcctcgtacgaagaaggctggcgttgtcgcacagcccccccagctattcgtattcgcctggctcggcaggccgctgagattcgagcctcgcagcccgactgggaaggctcaagtcatctgctgcagcaggcggttcacatcctccccgacatcagcccacggtggttgaggcatactgacaagcagcacgtgcttgcagactttgccggcttggcttccgctgccgctgctactgcccttaatgcgcggaaagatgtttatgatgctttacgatttctcgagcttggtcgcggcattattgagaatttgctgatcgaaactcgcggcgacatttccgatcttgcgcgcaagcaccctgatttggcagagaaattcatctctcttcgggacgagctagactcgccagagaaggaccctactgttctgagctctgctgatcagccgtctttttgggagtcactctcgagacgacgtcgcgaagcggtccaggaactggacaagcttcgatcgcggatccgtgctcagcccggattcgagaacttccatctcccgccgacttccgacgatctgaaggctgcagcagatccaggccctatcatcgtcgtcaacctaagcacctaccgctgcgatgcgttcttaatcgagcgcaatcaaattcgggtattagaactgcctaatataacggtagagaaaatagccggtcgaaccaaagagttgcaaatatcccgtcaacgggccactccccctatatcgctgcttgagtggctctgggacgtggtcgctcgtccggtcttgaacgcactcgggtttcaaaagcctatctccgacaccagttggcctcgtgtatggtggattcctacaggactcataagccagctaccactccatgctgcaggatattacgcaaagggcagctcggagactgtactcgatagggtcatgtcgtcgtacgcctccacggtaaaggcattaatccatgggcgccaactccatctccgagagtctaccgggccaacctctaaccatgctctcttagtcgcgatgcacaaaac

SEQ ID NO: 38319 - DNA, 3618 bp, Muscodor strobelii
  misc_feature: SGI cDNA ID NO. 573312
  misc_feature: Encodes the peptide sequence at SEQ ID NO 38320
atggacgagggcagcagcagaagcccacggactgattggcttaccgtttccggttcctctgggatgcaagtcactagttcattcgcacacactgaggtcgatatgagaagcggcaccgcatcgggatgcgatactaatcttcccgatgatttcaatacccaggcagctcggcatataccgcgcgctactttcgaaaagttgagatcagacgagcgagccttgctttctgttcttgttttctgtgatccaagtagcatcccagacgcaatacttcatgtcgaaaagggcgagaatgctgtccgtactggccgagcccggagaaacctcatccgtcgtcgattgatacgcttcactgaaaacaatcagtcattagcgatggatcaatatgtaacagacgcgtatctcgcatttcttccgctagagttccgagagcgagggtttcagaatgcttcacagcagatttggaatggcttgtgtaaaagtgacattgctgccgacttcaccggaagaaaatggcagatttggggaccacatatcttgaacctacgaaagatatacatgatggaatatgagactcacggacggttccacgttcctgctaaagctcttcaattgtggcaagcatacatggtacatctctcggacaacagcgacgaaaaatcagcttctgagttcgaaacaacaattaaaaccgcttctaggacgggaagtgtcggtttcattgaatacaatggaccgttaaatgaatctcgagacgaatccatggccttttttgacgatatattgactccggttggcggagtccaagccaacctcaatcaaagggaagccatggaagatgttgcgcaattgttaactcgagatcaagcatctacagctatttaccattcggtcatactcaaaatggggccgtctcatttttctaagtgtcacgatgagctactgagagatgttctgacggaactttgcgaaaatattatcgaccgggaactgctcggtattatacaacagatcagtgggcagaaccaacgtcgagagctgacaaggagaatttgcgagcattttgatccaataggaaacattttcgccgagcccacagaaaaaaagaatcggatagtataccacaatatggaagcacaaggaaatgaaatgagtcaactcttaagaagtctataccaggacctcacaataaacagcgtagctccaagttacgacatttcgaaattcgaggaccttgtgtatactaatccatcctaccaaacctacctagatcgactcgacaacattcctcatcccgctccaagtatccaaatagcgcttgagagcaagaactatcgcgctctacgattacttatccacacgcaatttcatgatgttgctataggagagtttgactggcttaaagaccttgttgaaataggttactcttctactcaaattgctgatttactattcgaagaaagtcaggaatcgccctggatctgctttgagcgtggaccgcatgagccacttccagttctgatcgggtgtcatcaactacaatgcgcacacgagctttggtctgcttccggaaaagcagattctgttcagctaagacacgctgaacagccttctcaccaaggagaagggatagggaatatgattcagcagttttgtggcctcgcagggattattccatgctctaaagaaaagagctcgtggaggggcaacgtgatcttcgaatcggaagcgggaaaagccacagtaacatacgcgagccccgagaaagatcgagatcttctcactacgcacctcgtgaaaaagactcgcgacgcattagcagatttctgcaccatagttgctagactacaacgattcggattgttttgcgattcttttaccatactcgtacggtcagacacaagcagcaaagagcgaaatacgttgaaattggaaagtatcgagttaatctgggcttctgaaatgctacattgtctggaacactacttgaacccgaaaaggcttagaagtaatcctggactggggccagcagcggcttctgcgcgttgcatagtagcattggtgacgccagtgcactcttgctcccttattcagctttgtactctcgccacgcagattttatgcctaggtctactagcatactctcaggcgcatgttgggccatttcgtctctttttcctcgagttagagctaaagactgtagttctactcggatgtggtgactctggcgaggtatctaaaagcattacagcggagatagtagacttagcatgccttggggacatgatagatggcccggctatttcattccgctctacctggaacgtagccgaaacgcactcgcgtttctatgttcaatcatctccttgtggcttattggacacttggggtcccggccagatttgtgctctcgcagatgacaatacttttgtcacggccatccttattgggggtggtatgctatggtgctcggatcccgataacgatgtctatcattggagcgaaactattcccgaaggctcaacgtcgataccaaaaaagcttcaaccgaatgctttgatgacgataggatcactcgtgtctctgaaccagacttgtcaaatggatgaggatcaacagtacattcgatgttgtaactacctcgaacaaatcggtccatacaagccgacttgggagttggcagagaagacacttggggcacaagcgggtaattatgtgttgctgcaggctgcatccaattggaacaaactaccggggaaaacgttaaaacaatttcggctgcagcaagatgatgaatcattgatcacctttttggaccacttatggggcttgcaggtcagttactgcaccggaattgcgcggagagtcagcctcctacaagtagttgcggatgtgttacaagtctttataatgttttttgtcacatcgaaagaagaacttcaaatatggactatactactagataacctaggcatcgagcaacacttccgtcgtgggacaatcaggtccctgctcctgaaagttaagccaatccaacactcaatagttatcagaatggttcgaagaatcttgggagtactggaacacaccggagtcgacaggagtggcgaacaaatcattgtagcttggccccggtcaacagatgtgtatagctgtgtcaagatcccgtgtgaacagaaccgcactttggcaaggatcttagctgaatctggcgattgcgcaacttttgcgtacgtctcaccagtctgcctccaaaccgacgagattaaatgcaacagtcggagcgcatggggaaatgcaatttctctactagaaacatctgtcattctgtgcaggtcttcggaagtgtctgaagctaaggctattcatcaaaatggactacaacacaaagagacgtactttttccagaagatggacggactgttcttcgttaccgtctcgcagcccgacaagtctcgaccgcccaatctcttggcaatgctgagtcgaacgcctaaaggtatccagcaacgaattatagtcaagctaatggaagaaaaacagcggagacaactgagagttcgagagagagccaagtactcagagcagggtgagagagttattatcacctctagctag

SEQ ID NO: 38320 - protein, 1205 aa, Muscodor strobelii
  misc_feature: SGI Peptide ID NO. 573312
  misc_feature (254)..(1205): NCBI GI: 259481856 Blast Desc: TPA: TPR domain protein (AFU_orthologue; AFUA_3G01710) [Aspergillus nidulans FGSC A4]
  misc_feature (254)..(1190): NCBI GI: 67526319 Blast Desc: AN3617.2 [Aspergillus nidulans FGSC A4] gi|40740635|gb|EAA59825.1| AN3617.2 [Aspergillus nidulans FGSC A4]
  misc_feature (411)..(1204): NCBI GI: 46118594 Blast Desc: FG04718.1 [Gibberella zeae PH-1]
  misc_feature (460)..(779): NCBI GI: 159123460 Blast Desc: AFUB_080140 [Aspergillus fumigatus A1163]
  misc_feature (464)..(770): NCBI GI: 169781446 Blast Desc: [Aspergillus oryzae RIB40] gi|83773928|dbj|BAE64053.1| protein product [Aspergillus oryzae]
  misc_feature (942)..(1205): NCBI GI: 169781448 Blast Desc: [Aspergillus oryzae RIB40] gi|83773929|dbj|BAE64054.1| protein product [Aspergillus oryzae]
  misc_feature (464)..(770): NCBI GI: 238501304 Blast Desc: conserved [Aspergillus flavus NRRL3357] gi|220692123|gb|EED48470.1| conserved [Aspergillus flavus NRRL3357]
  misc_feature (702)..(1189): NCBI GI: 256720147 Blast Desc: NECHADRAFT_89312 [Nectria haematococca mpVI 77-13-4]
  misc_feature (463)..(647): NCBI GI: 115492287 Blast Desc: [Aspergillus terreus NIH2624] gi|114197631|gb|EAU39331.1| [Aspergillus terreus NIH2624]
  misc_feature (694)..(1088): NCBI GI: 255941310 Blast Desc: Pc16g11190 [Penicillium chrysogenum Wisconsin 54-1255] gi|211586047|emb|CAP93789.1| Pc16g11190 [Penicillium chrysogenum Wisconsin 54-1255]
MDEGSSRSPRTDWLTVSGSSGMQVTSSFAHTEVDMRSGTASGCDTNLPDDFNTQAARHIPRATFEKLRSDERALLSVLVFCDPSSIPDAILHVEKGENAVRTGRARRNLIRRRLIRFTENNQSLAMDQYVTDAYLAFLPLEFRERGFQNASQQIWNGLCKSDIAADFTGRKWQIWGPHILNLRKIYMMEYETHGRFHVPAKALQLWQAYMVHLSDNSDEKSASEFETTIKTASRTGSVGFIEYNGPLNESRDESMAFFDDILTPVGGVQANLNQREAMEDVAQLLTRDQASTAIYHSVILKMGPSHFSKCHDELLRDVLTELCENIIDRELLGIIQQISGQNQRRELTRRICEHFDPIGNIFAEPTEKKNRIVYHNMEAQGNEMSQLLRSLYQDLTINSVAPSYDISKFEDLVYTNPSYQTYLDRLDNIPHPAPSIQIALESKNYRALRLLIHTQFHDVAIGEFDWLKDLVEIGYSSTQIADLLFEESQESPWICFERGPHEPLPVLIGCHQLQCAHELWSASGKADSVQLRHAEQPSHQGEGIGNMIQQFCGLAGIIPCSKEKSSWRGNVIFESEAGKATVTYASPEKDRDLLTTHLVKKTRDALADFCTIVARLQRFGLFCDSFTILVRSDTSSKERNTLKLESIELIWASEMLHCLEHYLNPKRLRSNPGLGPAAASARCIVALVTPVHSCSLIQLCTLATQILCLGLLAYSQAHVGPFRLFFLELELKTVVLLGCGDSGEVSKSITAEIVDLACLGDMIDGPAISFRSTWNVAETHSRFYVQSSPCGLLDTWGPGQICALADDNTFVTAILIGGGMLWCSDPDNDVYHWSETIPEGSTSIPKKLQPNALMTIGSLVSLNQTCQMDEDQQYIRCCNYLEQIGPYKPTWELAEKTLGAQAGNYVLLQAASNWNKLPGKTLKQFRLQQDDESLITFLDHLWGLQVSYCTGIARRVSLLQVVADVLQVFIMFFVTSKEELQIWTILLDNLGIEQHFRRGTIRSLLLKVKPIQHSIVIRMVRRILGVLEHTGVDRSGEQIIVAWPRSTDVYSCVKIPCEQNRTLARILAESGDCATFAYVSPVCLQTDEIKCNSRSAWGNAISLLETSVILCRSSEVSEAKAIHQNGLQHKETYFFQKMDGLFFVTVSQPDKSRPPNLLAMLSRTPKGIQQRIIVKLMEEKQRRQLRVRERAKYSEQGERVIITSS

SEQ ID NO: 38321 - DNA, 1035 bp, Muscodor strobelii
  misc_feature: SGI EST ID NO. CUFF.91977.0
  misc_feature: Variant of the nucleotide sequence at SEQ ID NO 38319
taggatgcgaggtatttgttgtttcggggtggtgtgtcttcgattgtaagagggatgacccccacctctccagacgaggcgttcatcgaggcagatagatatgaggctgcgcgggtcaagcaccaattttcaacctacgtttttcaggctcgagtaggaaacaacaacttaccatctaagaagattatctttgagccatggacgagggcagcagcagaagcccacggactgattggcttaccgtttccggttcctctgggatgcaagtcactagttcattcgcacacactgaggtcgatatgagaagcggcaccgcatcgggatgcgatactaatcttcccgatgatttcaatacccaggcagctcggcatataccgcgcgctactttcgaaaagttgagatcagacgagcgagccttgctttctgttcttgttttctgtgatccaagtagcatcccagacgcaatacttcatgtcgaaaagggcgagaatgctgtccgcacttgatcagtagtgataacgtatattagtactggccgagcccggagaaacctcatccgtcgtcgattgatacgcttcactgaaaacaatcagtcattagcgatggatcaatatgtaacagacgcgtatctcgcatttcttccgctagagttccgagagcgagggtttcagaatgcttcacagcagatttggaatggcttgtgtaaaagtgacattgctgccgacttcaccggaagaaaatggcagatttggggaccacatatcttgaacctacgaaagatatacatgatggaatatgagactcacggacggttccacgttcctgctaaagctcttcaattgtggcaagcatacatggtacatctctcggacaacagcgacgaaaaatcagcttctgagttcgaaacaacaattaaaaccgcttctaggacgggaagtgtcggtttcattgaatacaatggaccgttaaatgaatctcgagacgaatccatggccttttttgacgatatattgactccggttggcggagtccaag

SEQ ID NO: 38322 - DNA, 717 bp, Muscodor strobelii
  misc_feature: SGI cDNA ID NO. 573313
  misc_feature: Encodes the peptide sequence at SEQ ID NO 38323
atgtttgaaaacatcgaaatgcccgatagtatgatcgtgatcggccaagagggggcccctcaacttttgaaagttcggctcccatttccgcaccggctcaactgcttcatcagactttggatactcaagattgtagcctcgattgcatttgcagtcgacagacttcttcatccaccaagtcattctcctactctcgtcaagatttatcaatgccgtcctacactacctgttcaaattttttaccctccagattacaaggccggagacttgctaccactgtacctcaacatccatggtggtggcttcgcaatatgcgacgcacggcaagatgacgacttttgcatacaatgggctaaacgcactggtatgctaattgtatctctcaattactccaaggcccctttaaacccattcccgacacctgttatggatatagctgccgttgcagagggcgtaatcttcgacaaaaccttgcctattgataagaataggatcgttatgggagggtttagtgctggaggcacacttgcactaggggcctgtcagttagcgtcgctgaagagcaagataaaaggaatcttggccttttatcctatcgtcgattggagtcacccccctaacgaaaagctcgacagccgaccttataaaggcggtccaccagactctctagaatcctcaagctactggttcgactggggcttcgtttctcccggataa

SEQ ID NO: 38323 - protein, 238 aa, Muscodor strobelii
  misc_feature: SGI Peptide ID NO. 573313
  misc_feature (94)..(205): Pfam Id: PF07859 Pfam Desc: alpha/beta hydrolase fold
  misc_feature (5)..(238): NCBI GI: 121701097 Blast Desc: alpha/beta hydrolase fold protein [Aspergillus clavatus NRRL 1] gi|119396956|gb|EAW07387.1| alpha/beta hydrolase fold protein [Aspergillus clavatus NRRL 1]
  misc_feature (20)..(238): NCBI GI: 255931359 Blast Desc: Pc12g03510 [Penicillium chrysogenum Wisconsin 54-1255] gi|211581855|emb|CAP79978.1| Pc12g03510 [Penicillium chrysogenum Wisconsin 54-1255]
  misc_feature (27)..(238): NCBI GI: 145259324 Blast Desc: An04g09770 [Aspergillus niger] gi|134074956|emb|CAK39036.1| protein product [Aspergillus niger]
  misc_feature (36)..(238): NCBI GI: 154303327 Blast Desc: BC1G_09412 [Botryotinia fuckeliana B05.10] gi|150854975|gb|EDN30167.1| BC1G_09412 [Botryotinia fuckeliana B05.10]
  misc_feature (21)..(238): NCBI GI: 156054284 Blast Desc: SS1G_05990 [Sclerotinia sclerotiorum 1980] gi|154703770|gb|EDO03509.1| SS1G_05990 [Sclerotinia sclerotiorum 1980]
  misc_feature (32)..(238): NCBI GI: 156064067 Blast Desc: SS1G_00041 [Sclerotinia sclerotiorum 1980] gi|154690903|gb|EDN90641.1| SS1G_00041 [Sclerotinia sclerotiorum 1980]
  misc_feature (7)..(216): NCBI GI: 46115886 Blast Desc: FG03785.1 [Gibberella zeae PH-1]
  misc_feature (18)..(238): NCBI GI: 145603701 Blast Desc: MGG_13284 [Magnaporthe grisea 70-15] gi|145011877|gb|EDJ96533.1| MGG_13284 [Magnaporthe grisea 70-15]
  misc_feature (46)..(238): NCBI GI: 171688218 Blast Desc: protein product [Podospora anserina] gi|170944071|emb|CAP70181.1| protein product [Podospora anserina]
  misc_feature (7)..(238): NCBI GI: 116197014 Blast Desc: CHGG_05105 [Chaetomium globosum CBS 148.51] gi|88181018|gb|EAQ88486.1| CHGG_05105 [Chaetomium globosum CBS 148.51]
MFENIEMPDSMIVIGQEGAPQLLKVRLPFPHRLNCFIRLWILKIVASIAFAVDRLLHPPSHSPTLVKIYQCRPTLPVQIFYPPDYKAGDLLPLYLNIHGGGFAICDARQDDDFCIQWAKRTGMLIVSLNYSKAPLNPFPTPVMDIAAVAEGVIFDKTLPIDKNRIVMGGFSAGGTLALGACQLASLKSKIKGILAFYPIVDWSHPPNEKLDSRPYKGGPPDSLESSSYWFDWGFVSPG

SEQ ID NO: 38324 - DNA, 175 bp, Muscodor strobelii
  misc_feature: SGI EST ID NO. CUFF.92002.0
  misc_feature: Variant of the nucleotide sequence at SEQ ID NO 38322
ttcggctcccatttccgcaccggctcaactgcttcatcagactttggatactcaagattgtagcctcgattgcatttgcagtcgacagacttcttcatccaccaagtcattctcctactctcgtcaagatttatcaatgccgtcctacactacctgttcaaattttttaccctcc

SEQ ID NO: 38325 - DNA, 1377 bp, Muscodor strobelii
  misc_feature: SGI cDNA ID NO. 573314
  misc_feature: Encodes the peptide sequence at SEQ ID NO 38326
atgacccctaccccgttcttcaaagacgcttcgtccccatcgacgaaagctctcggcgagacagcaatggacaccgaaggtagtgggcacgaagaggaaaagacgcccccaaaatcgttgcgtttcaaactcagcgtcttcttcctttgcctcgttactgtcgtgggtgcgatggatgctgtgattgtaggagcatgcctggaggcaattgccacagatctcaagggcagcagtgtggagtccttctgggtgggcacttcttttcttcttagtcaaacagtcacgattccaatatacggtacaacaagcgaagtatttggacgcaaatggcccatacttattgccgtttccatcttcacctttggtagcatcctatgtgccacagcaaaaacaatcacatggctgatcggtgcgagagtggtgcaaggtgttggtgctggcggtatgatccagttagtgcaagttattctgtcagatatcactactatgagcgagcgaggcttatacctcgcttttgcggctattgcatggagtctaggaacaaacattgggtatgttgccgttctcttcccaggactgacttctggtggagtatcccacccatgggactccgctagtattcttgcgcctttgatcgtgggctttctactctatccagtgtacatatacgtcgaatggaggttccttggcgcagaacaacacggtctgctacattcagcacttgaaactctgacaacgctggcctattcggccccagccggcctcgtagctagcattatcgtgaagaagacccaaagattcaaatatcttatcattgttggatgggctctcttacttgcaggagttggctcaaatgtaacaatgcacccaaatagcagtaaggctgtcctttacggtcctcgggtcctcacatctattggagctggcatcttatttccaatgcctctgttcgctgtccaagctcgacaaagaggcaaagatatcggaatagcgactagcgtccaagtctttgctcgtagtctcggcacagccttcggcgtcggactaggcggtgttattttccagaatgaatggacaaaactcgtctcggaacacgtcaaagaaggtgaaattccggaaagcttaacgattccaagcagactggccgagatcgcgtatcagatcatcaagcaatttccagagtctgtacaacacgcataccgctgggtttactctgatagcttgcagacggtctggtgggtgatggttggcttatcagccgtaggtttcttgataagcttcactgcaagaaacgatgagataaggggtggactatccgggtcgcaaaattttcaggagaaaggcatttcagctcctttgcacgaaacatcgacttga

SEQ ID NO: 38326 - protein, 458 aa, Muscodor strobelii
  misc_feature: SGI Peptide ID NO. 573314
  misc_feature (49)..(347): Pfam Id: PF07690 Pfam Desc: Major Facilitator Superfamily
  misc_feature (77)..(153): Pfam Id: PF00083 Pfam Desc: Sugar (and other) transporter
  misc_feature (22)..(457): NCBI GI: 239613292 Blast Desc: MFS multidrug transporter [Ajellomyces dermatitidis ER-3]
  misc_feature (192)..(447): NCBI GI: 255931357 Blast Desc: Pc12g03500 [Penicillium chrysogenum Wisconsin 54-1255] gi|211581854|emb|CAP79977.1| Pc12g03500 [Penicillium chrysogenum Wisconsin 54-1255]
  misc_feature (22)..(457): NCBI GI: 261188477 Blast Desc: MFS multidrug transporter [Ajellomyces dermatitidis SLH14081] gi|239593137|gb|EEQ75718.1| MFS multidrug transporter [Ajellomyces dermatitidis SLH14081]
  misc_feature (24)..(454): NCBI GI: 225559585 Blast Desc: conserved [Ajellomyces capsulatus G186AR]
  misc_feature (30)..(454): NCBI GI: 154281099 Blast Desc: [Ajellomyces capsulatus NAm1] gi|150411541|gb|EDN06929.1| [Ajellomyces capsulatus NAm1]
  misc_feature (13)..(182): NCBI GI: 255931357 Blast Desc: Pc12g03500 [Penicillium chrysogenum Wisconsin 54-1255] gi|211581854|emb|CAP79977.1| Pc12g03500 [Penicillium chrysogenum Wisconsin 54-1255]
  misc_feature (161)..(448): NCBI GI: 226279409 Blast Desc: conserved [Paracoccidioides brasiliensis Pb01]
  misc_feature (161)..(448): NCBI GI: 225685154 Blast Desc: drug resistance transporter [Paracoccidioides brasiliensis Pb03]
  misc_feature (192)..(448): NCBI GI: 226294479 Blast Desc: conserved [Paracoccidioides brasiliensis Pb18]
  misc_feature (161)..(454): NCBI GI: 240279320 Blast Desc: conserved [Ajellomyces capsulatus H143]
MTPTPFFKDASSPSTKALGETAMDTEGSGHEEEKTPPKSLRFKLSVFFLCLVTVVGAMDAVIVGACLEAIATDLKGSSVESFWVGTSFLLSQTVTIPIYGTTSEVFGRKWPILIAVSIFTFGSILCATAKTITWLIGARVVQGVGAGGMIQLVQVILSDITTMSERGLYLAFAAIAWSLGTNIGYVAVLFPGLTSGGVSHPWDSASILAPLIVGFLLYPVYIYVEWRFLGAEQHGLLHSALETLTTLAYSAPAGLVASIIVKKTQRFKYLIIVGWALLLAGVGSNVTMHPNSSKAVLYGPRVLTSIGAGILFPMPLFAVQARQRGKDIGIATSVQVFARSLGTAFGVGLGGVIFQNEWTKLVSEHVKEGEIPESLTIPSRLAEIAYQIIKQFPESVQHAYRWVYSDSLQTVWWVMVGLSAVGFLISFTARNDEIRGGLSGSQNFQEKGISAPLHETST

SEQ ID NO: 38327 - DNA, 687 bp, Muscodor strobelii
  misc_feature: SGI cDNA ID NO. 573315
  misc_feature: Elevated expression when VOC is produced
  misc_feature: Encodes the peptide sequence at SEQ ID NO 38328
atgtgttccaccgacagttcaactgagcaacatgaactgaatgtcaacaaggccactgattccacgttgactaatgacgctatatctggccttgcggatggccccgaagatcttcgctatttgacaggatggagattctacgtcgtcgccgctgtgcttcaacttgctttattcttagtcaacttcgaaatcaccatcgtgagtaccgcgctggtatccatatcgaatgatctcaatgatttcagcaaaacaagttgggttgtcaccgcctatttaatcacatacacagcgagtctagttatcgttgctaagctaagcgacatattcggacggaagaaaacatacctatcgatgcttctgctgttcagcgctttctctggcggctgcggtggctctcaaacgattgcccaactcatcatcctccgagccttccaaggtgtcggaggaggtggcctttacgcagtcgcctttgtcatgttatatgagcttgttccgaagaacaagtatccggttctacttgttacttcaattggcctggcggtgcttggtaatgcacttgggcctatatttggaggactcatcaccgagcgctctacatggaggctcccaaaacacctcgacgagcagaaaacctggctgcaaggcgtcattactaactctcaatgtgaaggtggatttttcttctaa

SEQ ID NO: 38328 - protein, 228 aa, Muscodor strobelii
  misc_feature: SGI Peptide ID NO. 573315
  misc_feature (53)..(203): Pfam Id: PF07690 Pfam Desc: Major Facilitator Superfamily
  misc_feature (49)..(156): Pfam Id: PF00083 Pfam Desc: Sugar (and other) transporter
  misc_feature (53)..(201): NCBI GI: 212533541 Blast Desc: multidrug resistance protein fnx1, [Penicillium marneffei ATCC 18224] gi|210072291|gb|EEA26380.1| multidrug resistance protein fnx1, [Penicillium marneffei ATCC 18224]
  misc_feature (20)..(201): NCBI GI: 154293481 Blast Desc: BC1G_13892 [Botryotinia fuckeliana B05.10] gi|150845273|gb|EDN20466.1| BC1G_13892 [Botryotinia fuckeliana B05.10]
  misc_feature (3)..(201): NCBI GI: 225557520 Blast Desc: drug resistance transporter [Ajellomyces capsulatus G186AR]
  misc_feature (3)..(201): NCBI GI: 242773497 Blast Desc: efflux pump antibiotic resistance protein, [Talaromyces stipitatus ATCC 10500] gi|218721871|gb|EED21289.1| efflux pump antibiotic resistance protein, [Talaromyces ATCC
  misc_feature (3)..(201): NCBI GI: 240278164 Blast Desc: MFS multidrug transporter [Ajellomyces capsulatus H143]
  misc_feature (36)..(201): NCBI GI: 255932603 Blast Desc: Pc12g10360 [Penicillium chrysogenum Wisconsin 54-1255] gi|211582477|emb|CAP80663.1| Pc12g10360 [Penicillium chrysogenum Wisconsin 54-1255]
  misc_feature (5)..(201): NCBI GI: 225556984 Blast Desc: drug resistance transporter EmrB/QacA subfamily [Ajellomyces capsulatus G186AR]
  misc_feature (26)..(170): NCBI GI: 154294994 Blast Desc: BC1G_13363 [Botryotinia fuckeliana B05.10] gi|150844492|gb|EDN19685.1| BC1G_13363 [Botryotinia fuckeliana B05.10]
  misc_feature (35)..(201): NCBI GI: 242816096 Blast Desc: MFS multidrug transporter, [Talaromyces stipitatus ATCC 10500] gi|218715041|gb|EED14464.1| MFS multidrug transporter, [Talaromyces stipitatus ATCC 10500]
  misc_feature (9)..(201): NCBI GI: 256728111 Blast Desc: NECHADRAFT_53897 [Nectria haematococca mpVI 77-13-4]
  misc_feature: Useful for introducing or modulating the production of volatile compounds
MCSTDSSTEQHELNVNKATDSTLTNDAISGLADGPEDLRYLTGWRFYVVAAVLQLALFLVNFEITIVSTALVSISNDLNDFSKTSWVVTAYLITYTASLVIVAKLSDIFGRKKTYLSMLLLFSAFSGGCGGSQTIAQLIILRAFQGVGGGGLYAVAFVMLYELVPKNKYPVLLVTSIGLAVLGNALGPIFGGLITERSTWRLPKHLDEQKTWLQGVITNSQCEGGFFF

SEQ ID NO: 38329 - DNA, 493 bp, Muscodor strobelii
  misc_feature: SGI EST ID NO. CUFF.92021.0
  misc_feature: Variant of the nucleotide sequence at SEQ ID NO 38327
ctaagcgacatattcggacggaagaaaacatacctatcgatgcttctgctgttcagcgctttctctggcggctgcggtggctctcaaacgattgcccaactcatcatcctccgagccttccaaggtgtcggaggaggtggcctttacgcagtcgcctttgtcatgttatatgagcttgttccgaagaacaagtatccggttctacttgttacttcaattggcctggcggtgcttggtaatgcacttgggcctatatttggaggactcatcaccgagcgctctacatggagtgtccccgttggtgtcgtagccatagtctgtgcgtttctagcagtcccggatgactacccttatcaaggccgaagtcatagaagagtatcctccaagccaaaactatctagcattgacttcttaggggcctttctcgtgttcttgggattggcgcttctaattgcaggcctgaatgaagccgcgaccattctatgtgtggtgg

SEQ ID NO: 38330 - DNA, 1182 bp, Muscodor strobelii
  misc_feature: SGI cDNA ID NO. 573316
  misc_feature: Encodes the peptide sequence at SEQ ID NO 38331
atggcgccgaaatttcgcgctgatcatgtcggctctttcattcgcccccaggcgctactcgatgcgtatgaatctccggagggcaaagagcatcaattagcggcgaccaaagccgcaatagcttatgtcgcaaagaaacagctggagttggacattcgcccaatcactagcggcgaatacgaacgtatgatattcttcgatggcttcttcgagaagctacaaggaatggaagttcgggatgacgttccgcttcatggcggattgcggaccaacctcccgctgatcaagatcttcgagcgctttggcagggaaaatgcgacagccgttgttgcaaccggtaagatcaagcgcgtctctcctgcatatctaggagcgtgggaaatgctccgtgccaacgtgcccgaggagaactggaaagactgcaagattgcgctgccctctccgacctggcagcacctttggcttgctaatggtcgcgcttatgaagctggagcatacctctcagatcgggagtactttatcgatctgatagctgcgtaccgagaagagttgaaggacctgtacgatgcaggattgcgatcggtacaaattgatgatcctcagcttctgtacttcattttggatgcgttcacggatggtatgcgagatgatgcgatcgaccccaccgagctccttgacgaatacctctgggcgctcaacgagatcgtcagagataagccggctgatctatatgtcggcattcatatctgtcgtgggaacatggctggcgtgagtgaaggatttcactcgggctcgtacgagaagattgccgagaaactattcaaggagctgaactacgacaccttctatctcgagttcgacgacgagcggtctgggagcttcgagcctctgcgtttcttgccgaagggcaagagcgtgacgctaggtctcgttactactaaacatccagaacttgaagatctagacaaactcaaggcaagggtgcatcaggcagcggaggttatcgctgctggacagaagaggccagtagtggaggtgttgaatgactcactggctgtaagtccccaatgcggatttgcgagtgcgcatacggcgaagaacgttggatcggaagatcgtatgtgggagaaattagttcttgtacgtgatttagcccgaggtatctggaaggatgcagtataa

SEQ ID NO: 38331 - protein, 393 aa, Muscodor strobelii
  misc_feature: SGI Peptide ID NO. 573316
  misc_feature (10)..(387): Pfam Id: PF01717 Pfam Desc: Cobalamin-independent synthase, Catalytic domain
  misc_feature (1)..(390): NCBI GI: 145249102 Blast Desc: An14g02640 [Aspergillus niger] gi|134081566|emb|CAK46512.1| protein product [Aspergillus niger]
  misc_feature (1)..(389): NCBI GI: 115401912 Blast Desc: [Aspergillus terreus NIH2624] gi|114190485|gb|EAU32185.1| [Aspergillus terreus NIH2624]
  misc_feature (5)..(389): NCBI GI: 256733398 Blast Desc: [Nectria haematococca mpVI 77-13-4]
  misc_feature (5)..(389): NCBI GI: 46127865 Blast Desc: FG08310.1 [Gibberella zeae PH-1]
  misc_feature (3)..(389): NCBI GI: 154294238 Blast Desc: BC1G_13805 [Botryotinia fuckeliana B05.10] gi|150844815|gb|EDN20008.1| BC1G_13805 [Botryotinia fuckeliana B05.10]
  misc_feature (3)..(389): NCBI GI: 156066077 Blast Desc: SS1G_01050 [Sclerotinia sclerotiorum 1980] gi|154691908|gb|EDN91646.1| SS1G_01050 [Sclerotinia sclerotiorum 1980]
  misc_feature (3)..(389): NCBI GI: 115396582 Blast Desc: conserved [Aspergillus terreus NIH2624] gi|114193499|gb|EAU35199.1| conserved [Aspergillus terreus NIH2624]
  misc_feature (1)..(392): NCBI GI: 242210455 Blast Desc: [Postia placenta Mad-698-R] gi|220729860|gb|EED83727.1| [Postia placenta Mad-698-R]
  misc_feature (3)..(389): NCBI GI: 169770881 Blast Desc: [Aspergillus oryzae RIB40] gi|238486638|ref|XP_002374557.1| Methionine synthase, vitamin-B12 independent, [Aspergillus flavus NRRL3357] protein product flavus
  misc_feature (1)..(392): NCBI GI: 170085103 Blast Desc: [Laccaria bicolor S238N-H82] gi|164651327|gb|EDR15567.1| [Laccaria bicolor S238N-H82]
MAPKFRADHVGSFIRPQALLDAYESPEGKEHQLAATKAAIAYVAKKQLELDIRPITSGEYERMIFFDGFFEKLQGMEVRDDVPLHGGLRTNLPLIKIFERFGRENATAVVATGKIKRVSPAYLGAWEMLRANVPEENWKDCKIALPSPTWQHLWLANGRAYEAGAYLSDREYFIDLIAAYREELKDLYDAGLRSVQIDDPQLLYFILDAFTDGMRDDAIDPTELLDEYLWALNEIVRDKPADLYVGIHICRGNMAGVSEGFHSGSYEKIAEKLFKELNYDTFYLEFDDERSGSFEPLRFLPKGKSVTLGLVTTKHPELEDLDKLKARVHQAAEVIAAGQKRPVVEVLNDSLAVSPQCGFASAHTAKNVGSEDRMWEKLVLVRDLARGIWKDAV

SEQ ID NO: 38332 - DNA, 1590 bp, Muscodor strobelii
  misc_feature: SGI EST ID NO. CUFF.92030.0
  misc_feature: Variant of the nucleotide sequence at SEQ ID NO 38330
gacggttctcagggtccgacgactcaagcagggtcttggaaattattagctacgcggccctcccccaaacccaatatcggcagtatttcccggctcgtttcttaattgcccacagtttggaaaacatacgtctgtctcagagtattcttcgttacaatagtagaaggaagtgagcggattcgctatggcgccgaaatttcgcgctgatcatgtcggctctttcattcgcccccaggcgctactcgatgcgtatgaatctccggagggcaaagagcatcaattagcggcgaccaaagccgcaatagcttatgtcgcaaagaaacagctggagttggacattcgcccaatcactagcggcgaatacgaacgtatgatattcttcgatggcttcttcgagaagctacaaggaatggaagttcgggatgacgttccgcttcatggcggattgcggaccaacctcccgctgatcaagatcttcgagcgctttggcagggaaaatgcgacagccgttgttgcaaccggtaagatcaagcgcgtctctcctgcatatctaggagcgtgggaaatgctccgtgccaacgtgcccgaggagaactggaaagactgcaagattgcgctgccctctccgacctggcagcacctttggcttgctaatggtcgcgcttatgaagctggagcatacctctcagatcgggagtactttatcgatctgatagctgcgtaccgagaagagttgaaggacctgtacgatgcaggattgcgatcggtacaaattgatgatcctcagcttctgtacttcattttggatgcgttcacggatggtatgcgagatgatgcgatcgaccccaccgagctccttgacgaatacctctgggcgctcaacgagatcgtcagagataagccggctgatctatatgtcggcattcatatctgtcgtgggaacatggctggcgtgagtgaaggatttcactcgggctcgtacgagaagattgccgagaaactattcaaggagctgaactacgacaccttctatctcgagttcgacgacgagcggtctgggagcttcgagcctctgcgtttcttgccgaagggcaagagcgtgacgctaggtctcgttactactaaacatccagaacttgaagatctagacaaactcaaggcaagggtgcatcaggcagcggaggttatcgctgctggacagaagaggccagtagtggaggtgttgaatgactcactggctgtaagtccccaatgcggatttgcgagtgcgcatacggcgaagaacgttggatcggaagatcgtatgtgggagaaattagttcttgtacgtgatttagcccgaggtatctggaaggatgcagtataagatctgaggcgtagttacgtcaccattcggcttttcgatgatgagggagctaagtcgacgcctataaatgaatacatgatgcgacgtgatattgaatggagaagatcatgataggtcatttgtgaagagtgatcgacataaaggtagaggcatctatatatgaaggtcaagatagtggtgatcattagcctctcactttcctctgggcaatagctcgctcgcgg

SEQ ID NO: 38333 - DNA, 1695 bp, Muscodor strobelii
  misc_feature: SGI cDNA ID NO. 573317
  misc_feature: Elevated expression when VOC is produced
  misc_feature: Encodes the peptide sequence at SEQ ID NO 38334
atgtttctgtctaccactgctcccgccattttggcgttcgccagtgttatcttggctatgccctcttctgtgccaatggcattgttcgaatccgtgagttcggcccccactggctggaacatggacggtcctgcagccaaagatgccgtgatggaactccgtatccatcttgccaagcaaaacgtagccgaattccaagacttagcactcaagatcgccacacctggtaatgaccaatatggcaaacacttgaccgtggagcagatcgatgcgattgtcagtcccaaagcggaatcaaaagatcttgtcttccaatggttaagtaaccacagtcttgctgattccgccttcctcaacgctcgtggaaatattgtgaaggtgaaaacaacgatcagccaagcagaagctcttttgggggcgaagtataacgcttacaccaatgccgaaactggcaaaactgcttcaagaacactggatgtatacgttcctaaggctcttctcagtcacattgacgttatacaacctacaaccttcttcggattcaagaaattaacgccggcttttcatgaacgatctgatctgagccgtcgggctacggttaccactccttcagcactagcttcgttatatcagttcactggtatctcgaccttgacgaagggcataatgggcatcgctggtttcattgagcaatggccaagcaaaactgatttgaccactttcatgaacagattcactatttcgggcttcggaaactctggccagagctatacttgcgtcactgtcaatggcggttcgtgcccaacgaaccctaccggcaacaacattggtatagaggccaacttggatgtccaatacgctcgcgctatcacaagtgacatacctaatgtattctattccactggtggggaggatgattcaatctatgaggatctatcagagtaccttctaggtctctcagcaagttctcgaccaaatgttctctcagtctcttacggtggtgacgagtatgaagtttcgttgagtatcgcagatgctacttgcaacttgtttgcagagcttggatcggctggaatctctgttttattcgcttcaggtgactctggtgttggttcttcttgcactattaatggcaagaaggcatatactcccgactttccgggtggttgcccgtgggtcacgatggtcggcggaactactggtcctacaactacgactgagcaagcttgggttgacggtggtggtggcttttctaactactttgggcgtccttcgtggcagaatacggccgtcacatcatggttgtctaccaacaaagacggtaatacagcatattataatagttctggccgcgcctatcccgatgttgctgccggcgctgtggactttgatatcgtctacggcggttcggttggtgccgttgatggaacatcgtgtgctgctccgacattcgccagtatcattcaacttgtcaactcccagagaatcgctgcaggaaaggctgcgctaggtttcttaaacccttggctgtattctacagcgtcaactgctttaaatgacatcaagagcggtaagattactggttgtagcactatttcaaatgcaggcttcactgctatcaccggatgggaccctgcgaccggatggggcagtccaaactatcccaaactcctgtccgccggaatgtcagtttag

SEQ ID NO: 38334 - protein, 564 aa, Muscodor strobelii
  misc_feature: SGI Peptide ID NO. 573317
  misc_feature (36)..(179): Pfam Id: PF09286 Pfam Desc: Pro-kumamolisin, activation domain
  misc_feature (14)..(559): NCBI GI: 156050137 Blast Desc: SS1G_07655 [Sclerotinia sclerotiorum 1980] gi|154692056|gb|EDN91794.1| SS1G_07655 [Sclerotinia sclerotiorum 1980]
  misc_feature (14)..(559): NCBI GI: 154317922 Blast Desc: BC1G_02944 [Botryotinia fuckeliana B05.10] gi|150843602|gb|EDN18795.1| BC1G_02944 [Botryotinia fuckeliana B05.10]
  misc_feature (9)..(559): NCBI GI: 169619485 Blast Desc: SNOG_12941 [Phaeosphaeria nodorum SN15] gi|160703835|gb|EAT79741.2| SNOG_12941 [Phaeosphaeria nodorum SN15]
  misc_feature (27)..(528): NCBI GI: 189190588 Blast Desc: tripeptidyl-peptidase 1 precursor [Pyrenophora tritici-repentis Pt-1C-BFP] gi|187973239|gb|EDU40738.1| tripeptidyl-peptidase 1 precursor [Pyrenophora tritici-repentis
  misc_feature (10)..(560): NCBI GI: 242222330 Blast Desc: family S53 protease-like protein [Postia placenta Mad-698-R] gi|220723798|gb|EED77904.1| family S53 protease-like protein [Postia placenta Mad-698-R]
  misc_feature (1)..(560): NCBI GI: 242209238 Blast Desc: [Postia placenta Mad-698-R] gi|220730500|gb|EED84356.1| [Postia placenta Mad-698-R]
  misc_feature (12)..(560): NCBI GI: 82408360 Blast Desc: family S53 protease [Phanerochaete chrysosporium]
  misc_feature (36)..(557): NCBI GI: 170104922 Blast Desc: [Laccaria bicolor S238N-H82] gi|164641309|gb|EDR05570.1| [Laccaria bicolor S238N-H82]
  misc_feature (26)..(560): NCBI GI: 242209595 Blast Desc: [Postia placenta Mad-698-R] gi|220730323|gb|EED84182.1| [Postia placenta Mad-698-R]
  misc_feature (29)..(557): NCBI GI: 67541991 Blast Desc: AN7159.2 [Aspergillus nidulans FGSC A4] gi|40742221|gb|EAA61411.1| AN7159.2 [Aspergillus nidulans FGSC A4] gi|259483510|tpe|CBF78959.1| TPA: tripeptidyl-peptidase FGSC
  misc_feature (36)..(558): SWISSPROT Homolog: EC 3.4.14.9 Tripeptidyl-peptidase I
  misc_feature: Useful for introducing or modulating the production of volatile compounds
MFLSTTAPAILAFASVILAMPSSVPMALFESVSSAPTGWNMDGPAAKDAVMELRIHLAKQNVAEFQDLALKIATPGNDQYGKHLTVEQIDAIVSPKAESKDLVFQWLSNHSLADSAFLNARGNIVKVKTTISQAEALLGAKYNAYTNAETGKTASRTLDVYVPKALLSHIDVIQPTTFFGFKKLTPAFHERSDLSRRATVTTPSALASLYQFTGISTLTKGIMGIAGFIEQWPSKTDLTTFMNRFTISGFGNSGQSYTCVTVNGGSCPTNPTGNNIGIEANLDVQYARAITSDIPNVFYSTGGEDDSIYEDLSEYLLGLSASSRPNVLSVSYGGDEYEVSLSIADATCNLFAELGSAGISVLFASGDSGVGSSCTINGKKAYTPDFPGGCPWVTMVGGTTGPTTTTEQAWVDGGGGFSNYFGRPSWQNTAVTSWLSTNKDGNTAYYNSSGRAYPDVAAGAVDFDIVYGGSVGAVDGTSCAAPTFASIIQLVNSQRIAAGKAALGFLNPWLYSTASTALNDIKSGKITGCSTISNAGFTAITGWDPATGWGSPNYPKLLSAGMSV

SEQ ID NO: 38335 - DNA, 2066 bp, Muscodor strobelii
  misc_feature: SGI EST ID NO. CUFF.92098.0
  misc_feature: Variant of the nucleotide sequence at SEQ ID NO 38333
ctgaaattctcaaccactttccaatgacagttagatctcgagacggcgacatggtcaaacaacactatatagagccaagaggccaagacatgccaatgtcttgtcgttgtgtccatcattcatagaaccagcagattcattgtggtcaaacttggaggcttaaagtctagacccaacatgtttctgtctaccactgctcccgccattttggcgttcgccagtgttatcttggctatgccctcttctgtgccaatggcattgttcgaatccgtgagttcggcccccactggctggaacatggacggtcctgcagccaaagatgccgtgatggaactccgtatccatcttgccaagcaaaacgtagccgaattccaagacttagcactcaagatcgccacacctggtaatgaccaatatggcaaacacttgaccgtggagcagatcgatgcgattgtcagtcccaaagcggaatcaaaagatcttgtcttccaatggttaagtaaccacagtcttgctgattccgccttcctcaacgctcgtggaaatattgtgaaggtgaaaacaacgatcagccaagcagaagctcttttgggggcgaagtataacgcttacaccaatgccgaaactggcaaaactgcttcaagaacactggatgtatacgttcctaaggctcttctcagtcacattgacgttatacaacctacaaccttcttcggattcaagaaattaacgccggcttttcatgaacgatctgatctgagccgtcgggctacggttaccactccttcagcactagcttcgttatatcagttcactggtatctcgaccttgacgaagggcataatgggcatcgctggtttcattgagcaatggccaagcaaaactgatttgaccactttcatgaacagattcactatttcgggcttcggaaactctggccagagctatacttgcgtcactgtcaatggcggttcgtgcccaacgaaccctaccggcaacaacattggtatagaggccaacttggatgtccaatacgctcgcgctatcacaagtgacatacctaatgtattctattccactggtggggaggatgattcaatctatgaggatctatcagagtaccttctaggtctctcagcaagttctcgaccaaatgttctctcagtctcttacggtggtgacgagtatgaagtttcgttgagtatcgcagatgctacttgcaacttgtttgcagagcttggatcggctggaatctctgttttattcgcttcaggtgactctggtgttggttcttcttgcactattaatggcaagaaggcatatactcccgactttccgggtggttgcccgtgggtcacgatggtcggcggaactactggtcctacaactacgactgagcaagcttgggttgacggtggtggtggcttttctaactactttgggcgtccttcgtggcagaatacggccgtcacatcatggttgtctaccaacaaagacggtaatacagcatattataatagttctggccgcgcctatcccgatgttgctgccggcgctgtggactttgatatcgtctacggcggttcggttggtgccgttgatggaacatcgtgtgctgctccgacattcgccagtatcattcaacttgtcaactcccagagaatcgctgcaggaaaggctgcgctaggtttcttaaacccttggctgtattctacagcgtcaactgctttaaatgacatcaagagcggtaagattactggttgtagcactatttcaaatgcaggcttcactgctatcaccggatgggaccctgcgaccggatggggcagtccaaactatcccaaactcctgtccgccggaatgtcagtttagaaagccgatgatccttcacaaaattgaaatgcataaaggagcatctgagtcaattaggttatggacccagtgcgtgtagtcatcaagtgtggtgaagcttagagatgtacaaatacagctcttatgaggtcataagtagaaccacagtactgttacaacgtgcaattcatagaaatgaatgccgccattcgcgg

SEQ ID NO: 38336 - DNA, 1371 bp, Muscodor strobelii
  misc_feature: SGI cDNA ID NO. 573318
  misc_feature: Encodes the peptide sequence at SEQ ID NO 38337
atgtcgaaagcattgggaacctttggcgccttctacgttgtggcactctgttgcatcgggtcttttgcatttttctcttgtttcttcatctggccattcactgccaaatatggtcgccgctacgcactatccttggcttctgcgctgtttaccgtaggtgctgttatacagacaatcaacacgcattcgctcgccgccttctatgttgctcgcgttgtcagtggagtaggagtgggtatggcgactgtgctcattcccatgtattccgcggaaatggcaccgaaagaaattcgcggcatgcttggatctggattccagttctttttcactcttggtgtgatgatatcctactgggtagactatggcgtcaagattcatctcccttcgatcactagacagtggcaaatccctgttggcttacaacttgcccccggtgctgctttaggccttggcatgctgctgtgcaaagaaagccctagatggcttgcaaaggttggccggagagaagaggctttgcaagcccttgcttgggtccgtgggggtgaaacgcctgaagttaaaaaggaattcgctgagatcatttcaagcctcgaagaagagcagagattgacaaacggcgttacatggaaagaatgtcttcttcccatcaatcgttatcgtattattctaatcgtggtcctccaaattggtgtccaattaacgggaaacacatctcttgcatattacgcgccgcaaatattctctctcgtcggagcaggaaataacagcctccttcttactggcttctttggactggtgaagactgtcgcatgtctgtttttcctactgtttctcgtcgagcgcattggacgtcgtggatcattactgttaggagccttgatcatgggtatatacttcatcattatcgcggttttgactaaaatttaccccccgatgccttctcaagggcttacttcaagttcaattgccgctttgacattgatctacctagaggcaatgacttataatatctcttggggaccagttccatgggtctacaccagcgagatattcccctctcggattagagaggcgggaatcgcgataggaacagccacgcaatggctcttcaacttcgtcttctctcaggtgacaccacgtgccgttgagaatctgggttggaggacatttttgatgttcggcatctttaacttctctcttgtcgtattcacgttcttctttattaaggagacgaagggcagatcgcttgaggacatggaagaaatatttgccaagcgacttggagtaaagcacgatgccggccctcaactcgacgaagaaaaaaacgatgcattgcaagaggaagttgtgcaagcagaagtgaaagtctga

SEQ ID NO: 38337 - protein, 456 aa, Muscodor strobelii
  misc_feature: SGI Peptide ID NO. 573318
  misc_feature (1)..(423): Pfam Id: PF00083 Pfam Desc: Sugar (and other) transporter
  misc_feature (32)..(375): Pfam Id: PF07690 Pfam Desc: Major Facilitator Superfamily
  misc_feature (23)..(423): Pfam Id: PF00083 Pfam Desc: Sugar (and other) transporter
  misc_feature (1)..(448): NCBI GI: 115443156 Blast Desc: conserved [Aspergillus terreus NIH2624] gi|114188254|gb|EAU29954.1| conserved [Aspergillus terreus NIH2624]
  misc_feature (23)..(425): NCBI GI: 256731551 Blast Desc: NECHADRAFT_48911 [Nectria haematococca mpVI 77-13-4]
  misc_feature (2)..(432): NCBI GI: 242790022 Blast Desc: MFS sugar transporter, [Talaromyces stipitatus ATCC 10500] gi|218718069|gb|EED17489.1| MFS sugar transporter, [Talaromyces stipitatus ATCC 10500]
  misc_feature (1)..(448): NCBI GI: 169763550 Blast Desc: [Aspergillus oryzae RIB40] gi|83770703|dbj|BAE60836.1| protein product [Aspergillus oryzae]
  misc_feature (23)..(443): NCBI GI: 67902194 Blast Desc: AN8084.2 [Aspergillus nidulans FGSC A4] gi|40740516|gb|EAA59706.1| AN8084.2 [Aspergillus nidulans FGSC A4] gi|259480843|tpe|CBF73852.1| TPA: conserved [Aspergillus FGSC
  misc_feature (4)..(451): NCBI GI: 115388952 Blast Desc: conserved [Aspergillus terreus NIH2624] gi|114194377|gb|EAU36077.1| conserved [Aspergillus terreus NIH2624]
  misc_feature (1)..(421): NCBI GI: 238489481 Blast Desc: sugar transporter, [Aspergillus flavus NRRL3357] gi|220698366|gb|EED54706.1| sugar transporter, [Aspergillus flavus NRRL3357]
  misc_feature (23)..(423): NCBI GI: 115399272 Blast Desc: conserved [Aspergillus terreus NIH2624] gi|114192108|gb|EAU33808.1| conserved [Aspergillus terreus NIH2624]
  misc_feature (15)..(442): NCBI GI: 67522817 Blast Desc: AN1865.2 [Aspergillus nidulans FGSC A4] gi|40745874|gb|EAA65030.1| AN1865.2 [Aspergillus nidulans FGSC A4] gi|259487218|tpe|CBF85717.1| TPA: MFS sugar transporter, FGSC
  misc_feature (15)..(432): NCBI GI: 145243702 Blast Desc: An11g03700 [Aspergillus niger] gi|134079049|emb|CAK48358.1| protein product [Aspergillus niger]
MSKALGTFGAFYVVALCCIGSFAFFSCFFIWPFTAKYGRRYALSLASALFTVGAVIQTINTHSLAAFYVARVVSGVGVGMATVLIPMYSAEMAPKEIRGMLGSGFQFFFTLGVMISYWVDYGVKIHLPSITRQWQIPVGLQLAPGAALGLGMLLCKESPRWLAKVGRREEALQALAWVRGGETPEVKKEFAEIISSLEEEQRLTNGVTWKECLLPINRYRIILIVVLQIGVQLTGNTSLAYYAPQIFSLVGAGNNSLLLTGFFGLVKTVACLFFLLFLVERIGRRGSLLLGALIMGIYFIIIAVLTKIYPPMPSQGLTSSSIAALTLIYLEAMTYNISWGPVPWVYTSEIFPSRIREAGIAIGTATQWLFNFVFSQVTPRAVENLGWRTFLMFGIFNFSLVVFTFFFIKETKGRSLEDMEEIFAKRLGVKHDAGPQLDEEKNDALQEEVVQAEVKV

SEQ ID NO: 38338 - DNA, 1809 bp, Muscodor strobelii
  misc_feature: SGI cDNA ID NO. 573319
  misc_feature: Encodes the peptide sequence at SEQ ID NO 38339
atggccagcgctgcttgggtgaagtgttcttcgctcaagaaaccaaacatcgtggttgtcatgtcggatgaccaggactaccgccttggctccaccgattatcagcaagtgcttcgacgccatgtcaattccaaaggcgttgaattcgtcaaccactttgggacaacggcaaactgctgtccaagccgagtgtcgttcatgcgtggtcaatttgtccacaacacaaacatcacgcatgtaaatgcgcccgggggcaattacgataaattcgtgatcagcggacaggatcaagactacctacccttttggatgaaaagggcaggctaccggacagagtacgttgggaaattcttgaatggctatagtcagaagaactataatatcacaccaaagggctgggaccacgtcgatgctctttctgatgttgttcgggctatggcaatcgatcgtgtcgagaagctcaccgcacagaaggatcctttctttctaatgattgctccgtcttcaccacatgtcgaaaatgaattataccagacgattcctcttgagagacattctcaggacttcgcagacattcaggcgccccgaaaccccaactggaatcctcccgacatgatccagcaacagaagggcagctggctttcttcgctgcccctgatgaacaaatccgtacaggtatatgctgatcattcataccgccaacgtatccgcgccctccagggagtagatgagatcatggaggatgtcattgcacttttggagacgaaaggggtcatggacaacacttatttcatctatacaacagataacggatataaagtaggaactcatcgtataccagcaggaaaagctactttttatgctgaagacacaaatttgccgttcagtgtccgtggacctggaatcccacatggtataaagtcgaagattcctggcgcgcacgtggatatggtccccacgtttttagatatcgccggactaccagaggaccaatggccacctcaacttgatggatctagtcttcttaagcaatggcatcatccttatgggtccaacgggttgcagactggacagggcaatgctaaggagatcatcaacatcgaattctggggcctatgcattgttgaggcgcccaacgcggcggaactcggtgtcccgttcacgactaacagttataagacattgcgtgtcgtggcagacgatcaatcttggctttactcttattggtgtacaggggatattgagctttacaacaccgcagttgatccatacgagctcaataatctggcgctaaacatgacgacagagacaagacaactagttaatcgcctaaacgccatcttgcttgtcactaagtcatgcgacacgaacacgtgccgtcagccttggcagtggctccagcctggtaaaaacgcgcatgagatcgtgtccttgtcccaggcgatggacccaaaatatgacgagcacttcgcttcattccccaaagttgcgtttaaggagtgtctacaaattcaagacattgacaatgagggcccgtattatccaccactatcacaaacaggcaacttaggacaagactaccggggacctactgacaactaccagtcacaaggtgaaggaggtacacgatatattgacagtggcgctagttatggaacatgggcgcaacgacgcgccacgttaaccgagattcgtcaaattgagcatgtcgtgaccgatgatgagaattacggaaccgattctatgaatttgcgcagaagagatctcgatatccaggataatcctgagtggtttcaatggattggctag

SEQ ID NO: 38339 - protein, 602 aa, Muscodor strobelii
  misc_feature: SGI Peptide ID NO. 573319
  misc_feature (13)..(428): Pfam Id: PF00884 Pfam Desc: Sulfatase
  misc_feature (1)..(575): NCBI GI: 145615374 Blast Desc: MGG_05540 [Magnaporthe grisea 70-15] gi|145022215|gb|EDK06235.1| MGG_05540 [Magnaporthe grisea 70-15]
  misc_feature (7)..(575): NCBI GI: 145604811 Blast Desc: MGG_07920 [Magnaporthe grisea 70-15] gi|145012735|gb|EDJ97389.1| MGG_07920 [Magnaporthe grisea 70-15]
  misc_feature (13)..(512): NCBI GI: 119483994 Blast Desc: arylsulfatase, [Neosartorya fischeri NRRL 181] gi|119410056|gb|EAW20003.1| arylsulfatase, [Neosartorya fischeri NRRL 181]
  misc_feature (4)..(512): NCBI GI: 119488189 Blast Desc: arylsulfatase [Neosartorya fischeri NRRL 181] gi|119410795|gb|EAW20740.1| arylsulfatase [Neosartorya fischeri NRRL 181]
  misc_feature (13)..(512): NCBI GI: 115388119 Blast Desc: ATEG_02387 [Aspergillus terreus NIH2624] gi|114195649|gb|EAU37349.1| ATEG_02387 [Aspergillus terreus NIH2624]
  misc_feature (14)..(512): NCBI GI: 70982853 Blast Desc: arylsulfatase [Aspergillus fumigatus Af293] gi|66844579|gb|EAL84916.1| arylsulfatase, [Aspergillus fumigatus Af293] gi|159123838|gb|EDP48957.1| arylsulfatase, [Aspergillus
  misc_feature (13)..(512): NCBI GI: 238507485 Blast Desc: arylsulfatase, [Aspergillus flavus NRRL3357] gi|220689657|gb|EED46008.1| arylsulfatase, [Aspergillus flavus NRRL3357]
  misc_feature (13)..(512): NCBI GI: 169786467 Blast Desc: [Aspergillus oryzae RIB40] gi|83776442|dbj|BAE66561.1| protein product [Aspergillus oryzae]
  misc_feature (11)..(512): NCBI GI: 145235761 Blast Desc: An03g06540 [Aspergillus niger] gi|134058218|emb|CAK38410.1| protein product [Aspergillus niger]
  misc_feature (16)..(512): NCBI GI: 121714837 Blast Desc: arylsulfatase, [Aspergillus clavatus NRRL 1] gi|119403184|gb|EAW13602.1| arylsulfatase, [Aspergillus clavatus NRRL 1]
  misc_feature (13)..(510): SWISSPROT Homolog: EC 3.1.6.1 Arylsulfatase
MASAAWVKCSSLKKPNIVVVMSDDQDYRLGSTDYQQVLRRHVNSKGVEFVNHFGTTANCCPSRVSFMRGQFVHNTNITHVNAPGGNYDKFVISGQDQDYLPFWMKRAGYRTEYVGKFLNGYSQKNYNITPKGWDHVDALSDVVRAMAIDRVEKLTAQKDPFFLMIAPSSPHVENELYQTIPLERHSQDFADIQAPRNPNWNPPDMIQQQKGSWLSSLPLMNKSVQVYADHSYRQRIRALQGVDEIMEDVIALLETKGVMDNTYFIYTTDNGYKVGTHRIPAGKATFYAEDTNLPFSVRGPGIPHGIKSKIPGAHVDMVPTFLDIAGLPEDQWPPQLDGSSLLKQWHHPYGSNGLQTGQGNAKEIINIEFWGLCIVEAPNAAELGVPFTTNSYKTLRVVADDQSWLYSYWCTGDIELYNTAVDPYELNNLALNMTTETRQLVNRLNAILLVTKSCDTNTCRQPWQWLQPGKNAHEIVSLSQAMDPKYDEHFASFPKVAFKECLQIQDIDNEGPYYPPLSQTGNLGQDYRGPTDNYQSQGEGGTRYIDSGASYGTWAQRRATLTEIRQIEHVVTDDENYGTDSMNLRRRDLDIQDNPEWFQWIG

SEQ ID NO: 38340 - DNA, 233 bp, Muscodor strobelii
  misc_feature: SGI EST ID NO. CUFF.92051.0
  misc_feature: Variant of the nucleotide sequence at SEQ ID NO 38338
ggaccacgtcgatgctcttgtaagtttcgacgaagaaggtgtctgtctagaagctgactaactcaaattcttattctggatcgatccttatacatatgtattcaatacacctgtattctcaaccaacggcgcgcgaccgatatggtacaagggttatcatcagtctgatgttgttcgggctatggcaatcgatcgtgtcgagaagctcaccgcacagaaggatcctttctttc

SEQ ID NO: 38341 - DNA, 1140 bp, Muscodor strobelii
  misc_feature: SGI cDNA ID NO. 573320
  misc_feature: Encodes the peptide sequence at SEQ ID NO 38342
atggcctggtttgataaaagcaagcgcgctgccgtggagttcgtcaaagatctgccaaaaaatctcaacatcatcaccgacagcagcctcaaaaagggctgcattaaagacgtagacgacaatgagctgctccagtaccaaagtaagacgcgcacctcgctagccagcaccgtcaccggcatcgtgatctcgggaaccttaaccgccatatgtccgctgtacgccgtcggcgccgggatcagcgtctatcagaccgtcgtggcgggtgtcaaccggcaccgtgtcaagaaggagatcaggcgacgcagccaagacatcagcgagtccgagaaacaccacccaaacacgaacaagaacaacccgcgcacgcaagaagacgtcgaggcgttcaggaagcgcctcaagcaagatgatacgaagctgcgcaagatagttgacgtcggtgttggcgtcgtactcaagggggcactctcggcggccaccgtgggtattgtcggcttcgaccagattggcaatgcatttcacgacctggccgtgcatcctgtcgtgcatgagggcgtcacatcggcagtggcgcaccacaccgcgtccggtgcggcagacggcgctgcagcatctggcacgattaacaactcaagcggtgcagacgccggcgccgtccagccgacctttaaggagactctgaaggccacacacccgcacattgcagccgcgaaccaagccatgaagtcgacattcggcggtattggcgatagcatcgccgccgccctcaaggcccagacgggcctcgccatcgacgaaaccacgagctgggcccaggtgctgtccatgtggaatcagtccgacatcaagacctctgtactggcccaggtcgtggtacagggcgtcacggccgaggtcctacagccggcaacaatcgccattgaacatgtcttcggcgcggcgcgggcccgtttactcaggcgggcgcagcggaacatccaagcgcaggacagcatgagcggacttgtgagcaagcaggagcaggagcaggttgcgagacagagtgtgcgtgtgtacgaggacttgctgaagagtcccctgtttcggaatcgggcagcacaggtacgacgggccggtgttgacgatggcgtgatgtag

SEQ ID NO: 38342 - protein, 379 aa, Muscodor strobelii
  misc_feature: SGI Peptide ID NO. 573320
MAWFDKSKRAAVEFVKDLPKNLNIITDSSLKKGCIKDVDDNELLQYQSKTRTSLASTVTGIVISGTLTAICPLYAVGAGISVYQTVVAGVNRHRVKKEIRRRSQDISESEKHHPNTNKNNPRTQEDVEAFRKRLKQDDTKLRKIVDVGVGVVLKGALSAATVGIVGFDQIGNAFHDLAVHPVVHEGVTSAVAHHTASGAADGAAASGTINNSSGADAGAVQPTFKETLKATHPHIAAANQAMKSTFGGIGDSIAAALKAQTGLAIDETTSWAQVLSMWNQSDIKTSVLAQVVVQGVTAEVLQPATIAIEHVFGAARARLLRRAQRNIQAQDSMSGLVSKQEQEQVARQSVRVYEDLLKSPLFRNRAAQVRRAGVDDGVM

SEQ ID NO: 38343 - DNA, 1367 bp, Muscodor strobelii
  misc_feature: SGI EST ID NO. CUFF.92059.0
  misc_feature: Variant of the nucleotide sequence at SEQ ID NO 38341
agaataacagacgattcataagtttctttcaatactgtcgggaaactggaacaatgcgtagttgttcgcaatggtcttctctgatgggtagaaactctgacttatcacttgaacacttggatcaaggaagttatgaacgcgatgctgccaaaatttcgtccatgcctactgggggatatgcgaagtctacaccctccttcttcaagtctccaccgaccaggccactgccgccacttgctcccacatatatgaacgttttttcgttaatgatattgtgcgctgtgttcccctacatggtcttgatgcgcaagctcgacaatgcattatatcaactagactaacttctcttggtgaaatattatccatcagacgtttctgttgccttcatgtgcattctgaagaatgctaaggggcttatttcgaccgtcaacgccaccgtttcgaaatgctgcaatccagcgcgccacctatgtacactgcctagtcatttgtctcaaactaaaagcacagccgggcggcggattgaccgctatagctttctaggcacttcagccgcacaaggcatccttcaggcgattatttaaggatgaggtggttaggtagggcgaccaactttacaagtacgtcagcgttcccctccagatttgactgccagcaaaaagcaatccgtccacgatggcctggtttgataaaagcaagcgcgctgccgtggagttcgtcaaagatctgccaaaaaatctcaacatcatcaccgacagcagcctcaaaaagggctgcattaaagacgtagacgacaatgagctgctccagtaccaaagtaagacgcgcacctcgctagccagcaccgtcaccggcatcgtgatctcgggaaccttaaccgccatatgtccgctgtacgccgtcggcgccgggatcagcgtctatcagaccgtcgtggcgggtgtcaaccggcaccgtgtcaagaaggagatcaggcgacgcagccaagacatcagcgagtccgagaaacaccacccaaacacgaacaagaacaacccgcgcacgcaagaagacgtcgaggcgttcaggaagcgcctcaagcaagatgatacgaagctgcgcaagatagttgacgtcggtgttggcgtcgtactcaagggggcactctcggcggccaccgtgggtattgtcggcttcgaccagattggcaatgcatttcacgacctggccgtgcatcctgtcgtgcatgagggcgtcacatcggcagtggcgcaccacaccgcgtccggtgcggcagacggcgctgcagcatctggcacgattaacaactcaagcggtgcagacgccggcgccgtccagccgacctttaaggagactctgaaggccac

SEQ ID NO: 38344 - DNA, 1554 bp, Muscodor strobelii
  misc_feature: SGI cDNA ID NO. 573321
  misc_feature: Encodes the peptide sequence at SEQ ID NO 38345
atggcggcgaaacgaccaaacttcatttttattatggcagacgaccatgctgcgaaagccataagctgttacggagcaggaattaacaaaactcctcatatcgaccgtcttgcaaacgaaggcatgcgctttgaacactgctatgttactaattcaatttgcacaccctcacgcgctgctatcctgactggtacgcacaaccatgtcaacggcgtgatgacattgaatgacagcatcaacaagcacatcccaaatgttgcaaaacatctcagaaccggaggataccgcactgcaatggttggcaagtggcacttgggtgaaggtattgcccacgaacctactggcttcgatcattggtctgttcttccaggtcaaggcgactactgggatcctacatttattgacgcctctggcgaaacggttgagtccggttacgtcactgacataattaccgacaaatgtctcaattggattgaggaagcaaaaggccatggcgaaccctttttcgtcatgtgccatcacaaagccccccatcgctcgtgggaatgtgatgacaaacataagcacctctataccgatcctgtccgagtcccggaaacctacgacgatgattacaaaaaccgagcgaaggcagcaaaggcagctaagatgcgcgtggcagaggatcttacctaccaagatctgggcctcgtacaacctgatggcggaaacagaattggggagcgtgtgacgcaagaatcagggtctgcacaacgcaaaataccggtgaatgcgaagaaactcattgacaaggacgacggcacagtctttactttcagcaacgaggagcagttatcccaatttaagttccagaggtatatgcaacgttatctccgcgttatccaatctgtggatgataatgttggtcggatgcttgattatctagaccggaatggtctcgctgagaatacagttgtcatctacacgtcggaccaaggattcttccttggcgagcacggctggtttgacaagcgcttcatgtacgaagaatcatttcagatgccattcctcattaggcatcctgcaagcatcaaagctggaacaacatgtagcgatatcatatgcaatgtggacttcgcgccaacctttctggactatgcgcagcttcctgtcccaagctacatgcagggcttcacgttccgatctttgctagaagggaatacacctcacgactggcagcaggtggcttatcacagatattggatgcacaacgacatcatccaccatgcgtatgcgcactacggcgttagagatcagcggtttaagctcatttattggtataacgacgatatgggggtaaatggagcgcgtccgggggctgaggagcatcgcgaatgggagctttttgattgtgagaaggatcctcttgaactattcaacgtttatcacgatgcaaagtacagagagacaatcgagcggatgcaacgattgttggaaatgaagatgctgcaaataggcgacacacctgcacatagtctcaaacaaataccagtagctagggcagcaaaactttag

SEQ ID NO: 38345 - protein, 517 aa, Muscodor strobelii
  misc_feature: SGI Peptide ID NO. 573321
  misc_feature (4)..(473): Pfam Id: PF00884 Pfam Desc: Sulfatase
  misc_feature (1)..(504): NCBI GI: 261354738 Blast Desc: arylsulfatase B [Verticillium albo-atrum VaMs.102]
  misc_feature (4)..(508): NCBI GI: 238488153 Blast Desc: sulfatase, [Aspergillus flavus NRRL3357] gi|220697702|gb|EED54042.1| sulfatase, [Aspergillus flavus NRRL3357]
  misc_feature (2)..(510): NCBI GI: 242790011 Blast Desc: mucin-desulfating sulfatase, [Talaromyces stipitatus ATCC 10500] gi|218718067|gb|EED17487.1| mucin-desulfating sulfatase, [Talaromyces stipitatus ATCC 10500]
  misc_feature (2)..(505): NCBI GI: 255931037 Blast Desc: Pc12g01800 [Penicillium chrysogenum Wisconsin 54-1255] gi|211581694|emb|CAP79807.1| Pc12g01800 [Penicillium chrysogenum Wisconsin 54-1255]
  misc_feature (5)..(505): NCBI GI: 261355872 Blast Desc: N-acetylglucosamine-6-sulfatase [Verticillium albo-atrum VaMs.102]
  misc_feature (1)..(504): NCBI GI: 115388954 Blast Desc: conserved [Aspergillus terreus NIH2624] gi|114194378|gb|EAU36078.1| conserved [Aspergillus terreus NIH2624]
  misc_feature (3)..(504): NCBI GI: 242776690 Blast Desc: arylsulfatase A, [Talaromyces stipitatus ATCC 10500] gi|218722502|gb|EED21920.1| arylsulfatase A, [Talaromyces stipitatus ATCC 10500]
  misc_feature (3)..(504): NCBI GI: 145230505 Blast Desc: An01g11510 [Aspergillus niger] gi|134055679|emb|CAK44053.1| protein product [Aspergillus niger]
  misc_feature (27)..(506): NCBI GI: 46102662 Blast Desc: FG00035.1 [Gibberella zeae PH-1]
  misc_feature (5)..(504): NCBI GI: 212541142 Blast Desc: arylsulfatase, [Penicillium marneffei ATCC 18224] gi|210068025|gb|EEA22117.1| arylsulfatase, [Penicillium marneffei ATCC 18224]
  misc_feature (3)..(502): SWISSPROT Homolog: EC 3.1.6.1 Arylsulfatase
MAAKRPNFIFIMADDHAAKAISCYGAGINKTPHIDRLANEGMRFEHCYVTNSICTPSRAAILTGTHNHVNGVMTLNDSINKHIPNVAKHLRTGGYRTAMVGKWHLGEGIAHEPTGFDHWSVLPGQGDYWDPTFIDASGETVESGYVTDIITDKCLNWIEEAKGHGEPFFVMCHHKAPHRSWECDDKHKHLYTDPVRVPETYDDDYKNRAKAAKAAKMRVAEDLTYQDLGLVQPDGGNRIGERVTQESGSAQRKIPVNAKKLIDKDDGTVFTFSNEEQLSQFKFQRYMQRYLRVIQSVDDNVGRMLDYLDRNGLAENTVVIYTSDQGFFLGEHGWFDKRFMYEESFQMPFLIRHPASIKAGTTCSDIICNVDFAPTFLDYAQLPVPSYMQGFTFRSLLEGNTPHDWQQVAYHRYWMHNDIIHHAYAHYGVRDQRFKLIYWYNDDMGVNGARPGAEEHREWELFDCEKDPLELFNVYHDAKYRETIERMQRLLEMKMLQIGDTPAHSLKQIPVARAAKL

SEQ ID NO: 38346 - DNA, 1266 bp, Muscodor strobelii
  misc_feature: SGI EST ID NO. CUFF.92068.0
  misc_feature: Variant of the nucleotide sequence at SEQ ID NO 38344
ttcgatcattggtctgttcttccaggtcaaggcgactactgggatcctacatttattgacgcctctggcgaaacggttgagtccggttacgtcactgacataattaccgacaaatgtctcaattggattgaggaagcaaaaggccatggcgaaccctttttcgtcatgtgccatcacaaagccccccatcgctcgtgggaatgtgatgacaaacataagcacctctataccgatcctgtccgagtcccggaaacctacgacgatgattacaaaaaccgagcgaaggcagcaaaggcagctaagatgcgcgtggcagaggatcttacctaccaagatctgggcctcgtacaacctgatggcggaaacagaattggggagcgtgtgacgcaagaatcagggtctgcacaacgcaaaataccggtgaatgcgaagaaactcattgacaaggacgacggcacagtctttactttcagcaacgaggagcagttatcccaatttaagttccagaggtatatgcaacgttatctccgcgttatccaatctgtggatgataatgttggtcggatgcttgattatctagaccggaatggtctcgctgagaatacagttgtcatctacacgtcggaccaaggattcttccttggcgagcacggctggtttgacaagcgcttcatgtacgaagaatcatttcagatgccattcctcattaggcatcctgcaagcatcaaagctggaacaacatgtagcgatatcatatgcaatgtggacttcgcgccaacctttctggactatgcgcagcttcctgtcccaagctacatgcagggcttcacgttccgatctttgctagaagggaatacacctcacgactggcagcaggtggcttatcacagatattggatgcacaacgacatcatccaccatgcgtatgcgcactacggcgttagagatcagcggtttaagctcatttattggtataacgacgatatgggggtaaatggagcgcgtccgggggctgaggagcatcgcgaatgggagctttttgattgtgagaaggatcctcttgaactattcaacgtttatcacgatgcaaagtacagagagacaatcgagcggatgcaacgattgttggaaatgaagatgctgcaaataggcgacacacctgcacatagtctcaaacaaataccagtagctagggcagcaaaactttagataagaagttaaaggttttgcgcaagcagtcaatctagttcgatccttctgagtttg

SEQ ID NO: 38347 - DNA, 924 bp, Muscodor strobelii
  misc_feature: SGI cDNA ID NO. 573322
  misc_feature: Encodes the peptide sequence at SEQ ID NO 38348
atggcatctcttgtatggcttgtgacaggagcctcggcgggaattggagctgcactcgtcgaggaaatcgtccgtcgaggagataaagtgattgctgctaacagacaggtcgatcagatggccgatcgcgcttcggagaatgtgtcgcttcttgagctcgacatcacgtctggttccaaagtcattgcgagcaaagtcaaggaggcctggcagattttcggacacatcgatgttcttgtcaacaatgccggcacgttcttgtttgcccccttcgaggatatcagcgatgacgacgcagaacgcatcttccaaaccaacgtcttcggtcagcttcacatgacgcgggctatcctcccattcttccgccaacagggatcagggacaatcactttcacgggctcaaatcaactctggggcaacatgccctacacgacgtattataacatgaccaagtggacaaacagctgtcttgccgaatcgcttcacaaagaggtctcctctctcggaattcgctgcgttgcctttgagtgcggcggtgttgccacgcgcctgttcgaaccgcgcgagaaagacaaagtcgcgtcgaagcagagcaaggaagacaagaatcccatcgacgcctacgtgccagggtttaccgctgtctcgcaggagctggctgaatggggaatgcctccgggagaccctgccaaggtcgcaatggtaatggctgatgttgtcaagggcgagggtatggcggctaacagagtttggtcttcacgaattgctctgggctctgattcccttggatggtggaggatcaagagacaacaggaggccgtagtgatgaaccggtgggaggacgtcaccctcagcacggatcgcggcgatgcagtactctccgacaagctggatcattttgctctgatagctggagctgagtaa

SEQ ID NO: 38348 - protein, 307 aa, Muscodor strobelii
  misc_feature: SGI Peptide ID NO. 573322
  misc_feature (4)..(166): Pfam Id: PF00106 Pfam Desc: short chain dehydrogenase
  misc_feature (4)..(134): Pfam Id: PF00106 Pfam Desc: short chain dehydrogenase
  misc_feature (1)..(288): NCBI GI: 256724405 Blast Desc: NECHADRAFT_88187 [Nectria haematococca mpVI 77-13-4]
  misc_feature (1)..(283): NCBI GI: 242801116 Blast Desc: 3-oxoacyl-[acyl-carrier-protein] reductase, [Talaromyces stipitatus ATCC 10500] gi|218717041|gb|EED16462.1| 3-oxoacyl-[acyl-carrier-protein] reductase, [Talaromyces ATCC
  misc_feature (1)..(301): NCBI GI: 256730349 Blast Desc: NECHADRAFT_82746 [Nectria haematococca mpVI 77-13-4]
  misc_feature (1)..(288): NCBI GI: 46115474 Blast Desc: FG03579.1 [Gibberella zeae PH-1]
  misc_feature (1)..(287): NCBI GI: 261194551 Blast Desc: short-chain oxidoreductase [Ajellomyces dermatitidis SLH14081] gi|239588218|gb|EEQ70861.1| short-chain oxidoreductase [Ajellomyces dermatitidis SLH14081] gi|239613502|gb|EEQ90489.1|
  misc_feature (1)..(287): NCBI GI: 242801488 Blast Desc: hydroxybutyrate dehydrogenase, [Talaromyces stipitatus ATCC 10500] gi|218717123|gb|EED16544.1| hydroxybutyrate dehydrogenase, [Talaromyces stipitatus ATCC 10500]
  misc_feature (4)..(287): NCBI GI: 67904782 Blast Desc: AN9378.2 [Aspergillus nidulans FGSC A4] gi|40747289|gb|EAA66445.1| AN9378.2 [Aspergillus nidulans FGSC A4] gi|259488220|tpe|CBF87502.1| TPA: conserved [Aspergillus FGSC
  misc_feature (1)..(287): NCBI GI: 256731864 Blast Desc: NECHADRAFT_41660 [Nectria haematococca mpVI 77-13-4]
  misc_feature (3)..(287): NCBI GI: 121711988 Blast Desc: short-chain oxidoreductase, [Aspergillus clavatus NRRL 1] gi|119401761|gb|EAW12183.1| short-chain oxidoreductase, [Aspergillus clavatus NRRL 1]
  misc_feature (1)..(290): NCBI GI: 119183427 Blast Desc: CIMG_06649 [Coccidioides immitis RS]
  misc_feature (5)..(188): SWISSPROT Homolog: EC 1.1.1.101 Acylglycerone-phosphate reductase
MASLVWLVTGASAGIGAALVEEIVRRGDKVIAANRQVDQMADRASENVSLLELDITSGSKVIASKVKEAWQIFGHIDVLVNNAGTFLFAPFEDISDDDAERIFQTNVFGQLHMTRAILPFFRQQGSGTITFTGSNQLWGNMPYTTYYNMTKWTNSCLAESLHKEVSSLGIRCVAFECGGVATRLFEPREKDKVASKQSKEDKNPIDAYVPGFTAVSQELAEWGMPPGDPAKVAMVMADVVKGEGMAANRVWSSRIALGSDSLGWWRIKRQQEAVVMNRWEDVTLSTDRGDAVLSDKLDHFALIAGAE

SEQ ID NO: 38349 - DNA, 1065 bp, Muscodor strobelii
  misc_feature: SGI EST ID NO. CUFF.92087.0
  misc_feature: Variant of the nucleotide sequence at SEQ ID NO 38347
cggcgggaattggagctgcactcgtcgaggaaatcgtccgtcgaggagataaagtgattgctgctaacagacaggtcgatcagatggccgatcgcgcttcggagaatgtgtcgcttcttgagctcgacatcacgtctggttccaaagtcattgcgagcaaagtcaaggaggcctggcagattttcggacacatcgatgttcttgtcaacaatgccggcacgttcttgtttgcccccttcgaggatatcagcgatgacgacgcagaacgcatcttccaaaccaacgtcttcggtcagcttcacatgacgcgggctatcctcccattcttccgccaacagggatcagggacaatcactttcacgggctcaaatcaactctggggcaacatgccctacacgacgtattataacatgaccaagtggacaaacagctgtcttgccgaatcgcttcacaaagaggtctcctctctcggaattcgctgcgttgcctttgagtgcggcggtgttgccacgcgcctgttcgaaccgcgcgagaaagacaaagtcgcgtcgaagcagagcaaggaagacaagaatcccatcgacgcctacgtgccagggtttaccgctgtctcgcaggagctggctgaatggggaatgcctccgggagaccctgccaaggtcgcaatggtaatggctgatgttgtcaagggcgagggtatggcggctaacagagtttggtcttcacgaattgctctgggctctgattcccttggatggtggaggatcaagagacaacaggaggccgtagtgatgaaccggtgggaggacgtcaccctcagcacggatcgcggcgatgcagtactctccgacaagctggatcattttgctctgatagctggagctgagtaacataattatgttgcgtatgttttgggggtggaccacgtcgctcgattggagaagctcatatgcccatcccccgtcggcgttcatgcctatatccttatatggtgcctaagtcacgtctagcatatctatattcgcttattttggcctgttcgtacaacgatcttagtttgattac

SEQ ID NO: 38350 - DNA, 1833 bp, Muscodor strobelii
  misc_feature: SGI cDNA ID NO. 573323
  misc_feature: Encodes the peptide sequence at SEQ ID NO 38351
atgagctatccatccttacgcctcaagcatggtgcgcggctccacgaggacgtctgcgtctgcatctgcgtcctcgacctcgacgccgacacccagagcggtgatggcgcgagactacagttacgtcggcgcccagaatccgactatccgagaaacaacagtagtgaggaccctgcattggcggcgagaagtccaggcgtgctggaaaacagtatcacagatcagcgagcacccttcctcgcggtactggacccgtctggactttccgaatttccaaagacggacggtgccaatgtgtcatcccagtcacctttggccagggacagcagtatgtctcgcttgtcgacaggtgacgtattaccgtcctacgattctatcatgaaagttgcattagcgcacaaaggctggtgggttcgaatacatagagctgttcgcggcatgtatgacgacacgattgagtctttcccagatttcgtcaggcgagcatacacgagcgattgtccctcagaactgggtaagatggcgattgcgtttgctttcgcttctgatgatgatgggttccatgtctacaccttggtcgaccgcttcgttgtctctgacatggcatatacgtctactgtggaaggcatagagtgcctgatcctgctggccgttctctatgcggatgagggccagcccagaagatcatggatgatatatcgcaggggagtaatggtcgcgcaattaacggacctgtaccaggccggcctccgatcgacagctaagagacggctctggctgtccatctaccaagcagaccgcatgatgagcatgttcctcgggctgccgtacggctttgtcgacatgcaccatcagcaaatcctagaggtgaagcccgaaaatgattacttagattcgaccatgaccatccgctgtgcgatgatagccgggagagtcattgaccgaaaccactcgcgtacaacggcttccatctccaagacactggaactagatgaggagatgaatgagcttgcagcgtctttcccagaaacctggtgggagcttcctgaccagatccaagccgatggccgcgatttcgatgaagttcatgtccggctgcaccagcaacttttcttcttccacctgcgactctacatttacctaccgtttctcagtgacttcgaagaaagctttgtgcacagttcaatcatgcgcgtcgcctgcacggaggctgcaagacagctgctgaggcgctacctaagtctgcatagtgacgcggaggggctcagcccgtctgagtgcaagctcgtggacttcatggcatttactggcgccattgtcttacttataagttgctcaagctcctccggcacaaggatgtcaagtgatgagaatgacatcgaggctgtgctgtctttgattcggtgtttgcaacgccaggagaatcaagaaaattgtcccattgcggcgcaatgtcgcaagacgcttacggtgctactttcgagaacgagcacagacgaagaagttcgcattccattctttggcacagtcgtcagaaagggcgaccaagccgtagagcagaccactcaggcagatcaaagcttcgaaacaaactcgaatacaagagacagtcatgctttgccggctgaccaaccatcctcgtcgacgactgataccagttctactctcgcgagtgagggtatgtcgctgccaagttctgcgtattctgaggcaccgtgggggatggagcaactcagccacatgccagaactgggtttcttatcccatctggaagatgtgtcagcagatttcgattctggctgggagttcatcctggatctcgacagcttctga

SEQ ID NO: 38351 - protein, 610 aa, Muscodor strobelii
  misc_feature: SGI Peptide ID NO. 573323
  misc_feature (255)..(281): Pfam Id: PF04082 Pfam Desc: Fungal specific transcription factor domain
  misc_feature (42)..(539): NCBI GI: 256724525 Blast Desc: NECHADRAFT_88186 [Nectria haematococca mpVI 77-13-4]
  misc_feature (120)..(571): NCBI GI: 242801125 Blast Desc: TSTA_015490 [Talaromyces stipitatus ATCC 10500] gi|218717042|gb|EED16463.1| TSTA_015490 [Talaromyces stipitatus ATCC 10500]
  misc_feature (102)..(569): NCBI GI: 169601014 Blast Desc: SNOG_03361 [Phaeosphaeria nodorum SN15] gi|111067446|gb|EAT88566.1| SNOG_03361 [Phaeosphaeria nodorum SN15]
  misc_feature (119)..(520): NCBI GI: 189193691 Blast Desc: conserved [Pyrenophora tritici-repentis Pt-1C-BFP] gi|187978748|gb|EDU45374.1| conserved [Pyrenophora tritici-repentis Pt-1C-BFP]
  misc_feature (188)..(539): NCBI GI: 119174020 Blast Desc: CIMG_08992 [Coccidioides immitis RS]
  misc_feature (188)..(532): NCBI GI: 240106664 Blast Desc: Fungal specific transcription factor, [Coccidioides posadasii C735 delta SOWgp]
  misc_feature (39)..(519): NCBI GI: 212538453 Blast Desc: C6 finger domain protein, [Penicillium marneffei ATCC 18224] gi|210069124|gb|EEA23215.1| C6 finger domain protein, [Penicillium marneffei ATCC 18224]
  misc_feature (222)..(510): NCBI GI: 156044054 Blast Desc: SS1G_10130 [Sclerotinia sclerotiorum 1980] gi|154694519|gb|EDN94257.1| SS1G_10130 [Sclerotinia sclerotiorum 1980]
  misc_feature (75)..(519): NCBI GI: 242806675 Blast Desc: C6 finger domain protein, [Talaromyces stipitatus ATCC 10500] gi|218715418|gb|EED14840.1| C6 finger domain protein, [Talaromyces stipitatus ATCC 10500]
  misc_feature (26)..(600): NCBI GI: 258570115 Blast Desc: [Uncinocarpus reesii 1704] gi|237904131|gb|EEP78532.1| [Uncinocarpus reesii 1704]
MSYPSLRLKHGARLHEDVCVCICVLDLDADTQSGDGARLQLRRRPESDYPRNNSSEDPALAARSPGVLENSITDQRAPFLAVLDPSGLSEFPKTDGANVSSQSPLARDSSMSRLSTGDVLPSYDSIMKVALAHKGWWVRIHRAVRGMYDDTIESFPDFVRRAYTSDCPSELGKMAIAFAFASDDDGFHVYTLVDRFVVSDMAYTSTVEGIECLILLAVLYADEGQPRRSWMIYRRGVMVAQLTDLYQAGLRSTAKRRLWLSIYQADRMMSMFLGLPYGFVDMHHQQILEVKPENDYLDSTMTIRCAMIAGRVIDRNHSRTTASISKTLELDEEMNELAASFPETWWELPDQIQADGRDFDEVHVRLHQQLFFFHLRLYIYLPFLSDFEESFVHSSIMRVACTEAARQLLRRYLSLHSDAEGLSPSECKLVDFMAFTGAIVLLISCSSSSGTRMSSDENDIEAVLSLIRCLQRQENQENCPIAAQCRKTLTVLLSRTSTDEEVRIPFFGTVVRKGDQAVEQTTQADQSFETNSNTRDSHALPADQPSSSTTDTSSTLASEGMSLPSSAYSEAPWGMEQLSHMPELGFLSHLEDVSADFDSGWEFILDLDSF

SEQ ID NO: 38352 - DNA, 2942 bp, Muscodor strobelii
  misc_feature: SGI EST ID NO. CUFF.92095.0
  misc_feature: Variant of the nucleotide sequence at SEQ ID NO 38350
ccgcggcaacttacaagacttggtcgaccagcatcacttcgaccgcgcacagtgaactcgatgagctatccatccttacgcctcaagcatggtgcgcggctccacgaggacgtctgcgtctgcatctgcgtcctcgacctcgacgccgacacgtaagaccatgcggaaagggacacacagctgcacagaatgtcgccgtcgaaagatccggtgcgactcgataccaggatcttcagtctgttataattgcagatctcgtcgcacaccatgtattagccagagcggtgatggcgcgagactacagttacgtcggcgcccagaatccgactatccgagaaacaacagtagtgaggaccctgcattggcggcgagaagtccaggcgtgctggaaaacagtatcacagatcagcgagcacccttcctcgcggtactggacccgtctggactttccgaatttccaaagacggacggtgccaatgtgtcatcccagtcacctttggccagggacagcagtatgtctcgcttgtcgacaggtgacggtaggtcgtcacctatttccagcagattgcctgggccactctcaaccgggcaggaagaaaatatatgcgagacgatccgtgtagtattaccgtcctacgattctatcatgaaagttgcattagcgcacaaaggctggtgggttcgaatacatagagctgttcgcggcatgtatgacgacacgattgagtctttcccagatttcgtcaggcgagcatacacgagcgattgtccctcagaactgggtaagatggcgattgcgtttgctttcgcttctgatgatgatgggttccatgtctacaccttggtcgaccgcttcgttgtctctgacatggcatatacgtctactgtggaaggcatagagtgcctgatcctgctggccgttctctatgcggatgagggccagcccagaagatcatggatgatatatcgcaggggagtaatggtcgcgcaattaacggacctgtaccaggccggcctccgatcgacagctaagagacggctctggctgtccatctaccaagcagaccgcatgatgagcatgttcctcgggctgccgtacggctttgtcgacatgcaccatcagcaaatcctagaggtgaagcccgaaaatgattacttagattcgaccatgaccatccgctgtgcgatgatagccgggagagtcattgaccgaaaccactcgcgtacaacggcttccatctccaagacactggaactagatgaggagatgaatgagcttgcagcgtctttcccagaaacctggtgggagcttcctgaccagatccaagccgatggccgcgatttcgatgaagttcatgtccggctgcaccagcaacttttcttcttccacctgcgactctacatttacctaccgtttctcagtgacttcgaagaaagctttgtgcacagttcaatcatgcgcgtcgcctgcacggaggctgcaagacagctgctgaggcgctacctaagtctgcatagtgacgcggaggggctcagcccgtctgagtgcaagctcgtggacttcatggcatttactggcgccattgtcttacttataagttgctcaagctcctccggcacaaggatgtcaagtgatgagaatgacatcgaggctgtgctgtctttgattcggtgtttgcaacgccaggagaatcaagaaaattgtcccattgcggcgcaatgtcgcaagacgcttacggtgctactttcgagaacgagcacagacgaagaagttcgcattccattctttggcacagtcgtcagaaagggcgaccaagccgtagagcagaccactcaggcagatcaaagcttcgaaacaaactcgaatacaagagacagtcatgctttgccggctgaccaaccatcctcgtcgacgactgataccagttctactctcgcgagtgagggtatgtcgctgccaagttctgcgtattctgaggcaccgtgggggatggagcaactcagccacatgccagaactgggtttcttatcccatctggaagatgtgtcagcagatttcgattctggctgggagttcatcctggatctcgacagcttctgaatcagctcagattttgacggtactctgtagtttatctcactacagggtcgctcgatagatcaaagtgcggtcacgtcacgatcgtgtatttgaccagcttctctaggcagttgagccgacgatcgcgcatcgagctacacgtcactcagctaccctccttctctattgtgaattatacatatatgccttaggaactaagctcggatttgggatggcgaacatgtgtgtctatcaaccaaggattcgcagcgagtagacgggatcgaaggactacgatccgccgctgacctcggcaacagtcaggatccaatatgaacagtcttggcttgcatgtggctttactatcgtattgggtcatgcctcgatggcgttatcagatgcaaaattatgagaagtcccaaccctctttcgaattgtgtccgctctctgactgttgtcatcgtcgttgtgatctgcaaaaagcgcaaggctggctcgaatagctcgaatacgaagagatgaggatatcatgctcattttctggtgctcacgctgtcatctgccagccaatgtcttacaaggcagttcacgtcgtcgggttggaccatgcgtgggttcggcaagcgccagaaccggaaattcgcgaaacaaatgccaacgtcgaaaaggccgcaatgcgggcaaaaaattgcttcttaatgagaacagtatcgatacaagtactcaacttagaatagatagagcccaaagggaaagtaattagtttgccacttcacctcaaatttggcatattccaacagccttcacgaggataaccgcggtcttgaatatgattctcggaatttgaaatgagacaagtttc

SEQ ID NO: 38353 - DNA, 1095 bp, Muscodor strobelii
  misc_feature: SGI cDNA ID NO. 573324
  misc_feature: Elevated expression when VOC is produced
  misc_feature: Encodes the peptide sequence at SEQ ID NO 38354
atgagggccgcggacctggcccagcatgtgctggcgagtatggcagtactgaaagaccaagcccaagactggttattggacaaggcgttgggatggccggaacagccactggtcaacaagatcgacacacatcatcacatggtgccagctttctacgccgaggctatcgaggagaatggaggcgatccgactggatggtcgacgccaggctggtctcccacagcttcaaagctcttaatgaatcgaatgggtatcaagtccgcgatactttcggtcactgcccctggcgcgtgcattgtggaagatccgctgaagcaacaagatttggcacgaaggttgaatgagtatgccgctgccctccgcgatgaagacccgtattctttcggcttctttgcatctcttccggacatccggaacaccagcgccgctcttgctgaaatcaaatatgcttttgatgatttgggcgctgacggggtgacccttttcacccgatacggtcccggtcctatgtatctaggacaccgtgatttcgagccggtgtgggcggagctcaataggcgcgaggctgtcgtgtttgtccatcctagccacccaatcgacaacagccttgtcaatgccaaactactgccgcccgtcatcgattttcctcacgagacaactcggtcggctatggatatgatcatgagtcgaaccttactcaaatactccgagaccaaagtgattttgagccatgcgggaggaactttgccctatctgataacaaggatggccacaccacttagcaaatttcccgacatggcagcgagatggaaggtcggcgtagactatcaagacgccatgaggtcgttccggaagttctattatgatgtagcattatcctccgcgccgcaggttctctctacattgctttctatggtacctcatgatcatatcttatacgggagtgatttcccttatgcgccggcaccggcttatccggctttccttgaagcgctggaaactgccgatattccgaaagtggctcgagatcaactgaacttcatgaacgcagagaagttaatacctcgaatggcgaaagaggtctgtattgtctag

SEQ ID NO: 38354 - protein, 364 aa, Muscodor strobelii
  misc_feature: SGI Peptide ID NO. 573324
  misc_feature (41)..(356): Pfam Id: PF04909 Pfam Desc: Amidohydrolase
  misc_feature (15)..(361): NCBI GI: 145248824 Blast Desc: An14g01235 [Aspergillus niger] gi|134081422|emb|CAK41904.1| protein product [Aspergillus niger]
  misc_feature (17)..(358): NCBI GI: 169777657 Blast Desc: [Aspergillus oryzae RIB40] gi|238494842|ref|XP_002378657.1| 2-amino-3-carboxymuconate-6-semialdehyde decarboxylase, flavus
  misc_feature (17)..(359): NCBI GI: 115437270 Blast Desc: [Aspergillus terreus NIH2624] gi|114188583|gb|EAU30283.1| [Aspergillus terreus NIH2624]
  misc_feature (38)..(356): NCBI GI: 145230461 Blast Desc: An01g11270 [Aspergillus niger] gi|134055657|emb|CAK44031.1| protein product [Aspergillus niger]
  misc_feature (39)..(357): NCBI GI: 256724908 Blast Desc: NECHADRAFT_91485 [Nectria haematococca mpVI 77-13-4]
  misc_feature (35)..(317): NCBI GI: 145247608 Blast Desc: An12g10050 [Aspergillus niger] gi|134080792|emb|CAL00906.1| protein product [Aspergillus niger]
  misc_feature (40)..(357): NCBI GI: 121710946 Blast Desc: amidohydrolase family protein [Aspergillus clavatus NRRL 1] gi|119401239|gb|EAW11663.1| amidohydrolase family protein [Aspergillus clavatus NRRL 1]
  misc_feature (33)..(324): NCBI GI: 85089642 Blast Desc: NCU09844 [Neurospora crassa OR74A] gi|28919354|gb|EAA28806.1| [Neurospora crassa OR74A]
  misc_feature (38)..(357): NCBI GI: 145256042 Blast Desc: An10g00120 [Aspergillus niger CBS 513.88] gi|134078575|emb|CAK49103.1| protein product [Aspergillus niger]
  misc_feature (13)..(321): NCBI GI: 188501504 Blast Desc: amidohydrolase-like protein [Adineta vaga]
  misc_feature (40)..(316): SWISSPROT Homolog: EC 4.1.1.45 Aminocarboxymuconate-semialdehyde decarboxylase
  misc_feature: Useful for introducing or modulating the production of volatile compounds
MRAADLAQHVLASMAVLKDQAQDWLLDKALGWPEQPLVNKIDTHHHMVPAFYAEAIEENGGDPTGWSTPGWSPTASKLLMNRMGIKSAILSVTAPGACIVEDPLKQQDLARRLNEYAAALRDEDPYSFGFFASLPDIRNTSAALAEIKYAFDDLGADGVTLFTRYGPGPMYLGHRDFEPVWAELNRREAVVFVHPSHPIDNSLVNAKLLPPVIDFPHETTRSAMDMIMSRTLLKYSETKVILSHAGGTLPYLITRMATPLSKFPDMAARWKVGVDYQDAMRSFRKFYYDVALSSAPQVLSTLLSMVPHDHILYGSDFPYAPAPAYPAFLEALETADIPKVARDQLNFMNAEKLIPRMAKEVCIV

SEQ ID NO: 38355 - DNA, 1942 bp, Muscodor strobelii
  misc_feature: SGI EST ID NO. CUFF.92133.1
  misc_feature: Variant of the nucleotide sequence at SEQ ID NO 38353
ttgatctaatatagattcatttgctcttcaaagtctcatctcttagctaccttttttatgccttcgagatatcctgtgctcggatttacagctttgaaattgcaccatctcgcaattgacacgagcgtcctcgccagaagcgcgatctgatgaatacgctgatcaacatagatgttaagccggtcaatcttagcttggcggacccactgtatcgcggcgtctgtcttcttgatatcggccttgtcgtggttcaattcttgatgatagattctagtattgcttgtcggatgacggatgtggtaatgcccgaagagtcgaaaatgtgtgatttgtgaaacaacgtcgctccaatcagcggtgcaatgaagacggtccgcggaacaacataaattcccggcgtgggagaccatgcatgcgcactcaacgcatcgaagaagcttcccgagccccgcctgagcttatgcactgatacacgtcggaaatagttggcagtggtgatcaaagcctgttcactatcttgaacagttctagacgtcttttagacatcatcacatcttgtgagtatcctgaaacgtctgtgttcctttcaagatgagggccgcggacctggcccagcatgtgctggcgagtatggcagtactgaaagaccaagcccaagactggttattggacaaggcgttgggatggccggaacagccactggtcaacaagatcgacacacatcatcacatggtgccagctttctacgccgaggctatcgaggagaatggaggcgatccgactggatggtcgacgccaggctggtctcccacagcttcaaagctcttaatgaatcgaatgggtatcaagtccgcgatactttcggtcactgcccctggcgcgtgcattgtggaagatccgctgaagcaacaagatttggcacgaaggttgaatgagtatgccgctgccctccgcgatgaagacccgtattctttcggcttctttgcatctcttccggacatccggaacaccagcgccgctcttgctgaaatcaaatatgcttttgatgatttgggcgctgacggggtgacccttttcacccgatacggtcccggtcctatgtatctaggacaccgtgatttcgagccggtgtgggcggagctcaataggcgcgaggctgtcgtgtttgtccatcctagccacccaatcgacaacagccttgtcaatgccaaactactgccgcccgtcatcgattttcctcacgagacaactcggtcggctatggatatgatcatgagtcgaaccttactcaaatactccgagaccaaagtgattttgagccatgcgggaggaactttgccctatctgataacaaggatggccacaccacttagcaaatttcccgacatggcagcgagatggaaggtcggcgtagactatcaagacgccatgaggtcgttccggaagttctattatgatgtagcattatcctccgcgccgcaggttctctctacattgctttctatggtacctcatgatcatatcttatacgggagtgatttcccttatgcgccggcaccggcttatccggctttccttgaagcgctggaaactgccgatattccgaaagtggctcgagatcaactgaacttcatgaacgcagagaagttaatacctcgaatggcgaaagaggtctgtattgtctagctcataggtcatagatagttctgcttgcgcatcggagtttggacatgtagagacccgccgatcgttagcacaggcgcacttcatattccagttccgggaaagacgtcaattctatattgtgtcaataggttgctgatgagcaccctcttcgcgttaagaagagcctgtaaatagtaccataatctcatgtgtaccacaatcctgacgcttataggtcgccagtgctggtccatttgtcaagtgaactccatttcgc

SEQ ID NO: 38356 - DNA, 1101 bp, Muscodor strobelii
  misc_feature: SGI cDNA ID NO. 573325
  misc_feature: Encodes the peptide sequence at SEQ ID NO 38357
atgcgtcgtagactatggtggtctatggttctttttgacgcacgcatatctgagctgagcgacttctgcacgaccaacctcacaccagaatgggactgtaagcttccatcgaatgtaagcgactcggctcttcgcgtggatatcaaacagctcccaccacccgaaacgaaaccgacggaagcattgttctccgtcatacgttgcgaaatcgctcagctcgtacgaaccagctctttccacctggacctcacatgtccagcaatgaaagctcttgtcaagaatcgccatacagcgtcagatgcttcacaattccttgcgcttgagaagacccttcaagagaagtaccttaggttttgcgacgccgagaactcacttcagttcgtgaccatcgctattgcacgcgcttttcttgccaaataccaactgattgagcactacaccaaattcccatcatcttccatgcagcttacggtggcagagcgtaaagcaggtgtcggctacgcactcacgattcttgaatatgacaccaaaatgatgggttcgcctttgacaaaaggttacacatggctggcccgattctattttccaatgcccgcctatatccacctcacccaagatctgaaaaggtgcccgctagatggcgaaacggaccgtatctgggaagcgatgaatgaaaattacgaagccaggatcaacattttctttgacggaggtgccaatcctctgttgaatttcttcgctagtattgtccttgaggcctgggatgcctgcgaaacagcatctagagacattggatcgccttgcacaccaccgagcatagtggtcaagctgcgcgagagcatggcacgtgccgccgagatgcaaaagagtggcgaagagacgtctgttcccgagtcaatgcctccagtggagccgtcatttatgcggctggacgatgttgccatgtcggcacagccgctgaattttgggcagccaaacatgggccagacagacaacattgtttcgtggtccagctttatgccatccgtatctgccccgattccatttgatccccgctgggcaactatgagctggggtttgggaggacaccgtggctggtga

SEQ ID NO: 38357 - protein, 366 aa, Muscodor strobelii
  misc_feature: SGI Peptide ID NO. 573325
  misc_feature (1)..(303): NCBI GI: 255941246 Blast Desc: Pc16g10860 [Penicillium chrysogenum Wisconsin 54-1255] gi|211586015|emb|CAP93756.1| Pc16g10860 [Penicillium chrysogenum Wisconsin 54-1255]
  misc_feature (1)..(366): NCBI GI: 238482621 Blast Desc: C6 transcription factor, [Aspergillus flavus NRRL3357] gi|220700599|gb|EED56937.1| C6 transcription factor, [Aspergillus flavus NRRL3357]
  misc_feature (1)..(366): NCBI GI: 169765998 Blast Desc: [Aspergillus oryzae RIB40] gi|83765325|dbj|BAE55468.1| protein product [Aspergillus oryzae]
  misc_feature (1)..(366): NCBI GI: 119499231 Blast Desc: fungal specific transcription factor, [Neosartorya fischeri NRRL 181] gi|119414537|gb|EAW24476.1| fungal specific transcription factor, [Neosartorya fischeri NRRL 181]
  misc_feature (1)..(366): NCBI GI: 256732350 Blast Desc: NECHADRAFT_80838 [Nectria haematococca mpVI 77-13-4]
  misc_feature (1)..(330): NCBI GI: 121711681 Blast Desc: C6 zinc finger domain protein [Aspergillus clavatus NRRL 1] gi|119401607|gb|EAW12030.1| C6 zinc finger domain protein [Aspergillus clavatus NRRL 1]
  misc_feature (1)..(358): NCBI GI: 121706404 Blast Desc: fungal specific transcription factor domain protein [Aspergillus clavatus NRRL 1] gi|119399611|gb|EAW10039.1| fungal specific transcription factor domain protein [Aspergillus NRRL 1]
  misc_feature (1)..(366): NCBI GI: 70985362 Blast Desc: C6 transcription factor [Aspergillus fumigatus Af293] gi|66845815|gb|EAL86149.1| C6 transcription factor, [Aspergillus fumigatus Af293]
  misc_feature (1)..(359): NCBI GI: 154294640 Blast Desc: BC1G_13790 [Botryotinia fuckeliana B05.10] gi|150844669|gb|EDN19862.1| BC1G_13790 [Botryotinia fuckeliana B05.10]
  misc_feature (1)..(366): NCBI GI: 159125891 Blast Desc: C6 transcription factor, [Aspergillus fumigatus A1163]
MRRRLWWSMVLFDARISELSDFCTTNLTPEWDCKLPSNVSDSALRVDIKQLPPPETKPTEALFSVIRCEIAQLVRTSSFHLDLTCPAMKALVKNRHTASDASQFLALEKTLQEKYLRFCDAENSLQFVTIAIARAFLAKYQLIEHYTKFPSSSMQLTVAERKAGVGYALTILEYDTKMMGSPLTKGYTWLARFYFPMPAYIHLTQDLKRCPLDGETDRIWEAMNENYEARINIFFDGGANPLLNFFASIVLEAWDACETASRDIGSPCTPPSIVVKLRESMARAAEMQKSGEETSVPESMPPVEPSFMRLDDVAMSAQPLNFGQPNMGQTDNIVSWSSFMPSVSAPIPFDPRWATMSWGLGGHRGW

SEQ ID NO: 38358 - DNA, 2886 bp, Muscodor strobelii
  misc_feature: SGI EST ID NO. CUFF.92130.1
  misc_feature: Variant of the nucleotide sequence at SEQ ID NO 38356
cttggaaaggagtcaatcatccagatatgctctgtcttgggtacatcctaacttccatcttgatgaggctcaaaatgctgcgacacagccgtgacagccacatgggaacacccttccaagcccacttgcccaaactggttagagcatctttaaaatactaggtactccaaagtttcttgctgcaggcagacagacaggtgagacacgcaagcaggcagagtatggaggagggaatcggaaacctcgtcttggcatcatcctgtgtactagcatgggacctactcactgtcgcaacgcatgagtgctgagagatgacacatttccatacaattgccagtatagttcattaaagtaaaccatctcaagtggttgtgtaaattgcactcggtatcgaatttcatcgggatgcccccgacggctcctcaccaggtcatccaacctgccaagcctcaacgtgtgcttgcctgccaaccctgtcagcaacgtaaaataaaatgtgatcgtagatctccttgttccaattgtgtcaagtctggggctttgtgtgtggccgcctctttggctcctcgtagacgtcgctttcctgagcgccatctcctcgaccgcctccgtaagtatgaggctctcctccgtcagcatcatgtaccatttgagcctcttcatcagcacacgtcctcgggaatcgatgacataggccataccgaaggtgatgaagtgtacgaagaaggtcatgagcacgatgaccagtctcaggcagccgacggatcgagcctctcatcatcgagtatgaaaggccccaccggtccgagggacttgtggaaagcgttgtatctgctgtctaccgaccctgacgatgaggacgatgataatgctggctacgcctctttcgaaaagctcagagaccacgtcgtgaaaaagacatatgacgttctgtatgacaagagtgggcatctgatactcggagtgcgagctgattccgttgatcttgcttctctccacccggagcccgttcacatatttaagctctggcaagtttatcttgacaacgtagatcctctcctcaaagtcacgcacagtccgagcttgcagagtcgcattatcgaggccactggaaaaataggaaacattgacccgccgctggaagcactaatgttcagcatttactgcgtcgcactattgagtctgcccataaatgaatgcgaagtcatgtttggggttgccaagcaggagcttctggccaagaaccaccttgcttgtcaagaagccttactcaattgtggatatatgcgcactactgatcgtgactgcttgacggctatttatttatatctcatttctgctggccaggctgcagaccctaggtcgatatcctctatgctcagtgtggccatccgtataggaaaacgaatggggttgcattccgaggctgccaatgcgagccatccacctcatgaggccgagatgcgtcgtagactatggtggtctatggttctttttgacgcacgcatatctgagctgagcgacttctgcacgaccaacctcacaccagaatgggactgtaagcttccatcgaatgtaagcgactcggctcttcgcgtggatatcaaacagctcccaccacccgaaacgaaaccgacggaagcattgttctccgtcatacgttgcgaaatcgctcagctcgtacgaaccagctctttccacctggacctcacatgtccagcaatgaaagctcttgtcaagaatcgccatacagcgtcagatgcttcacaattccttgcgcttgagaagacccttcaagagaagtaccttaggttttgcgacgccgagaactcacttcagttcgtgaccatcgctattgcacgcgcttttcttgccaaataccaactgattgagcactacaccaaattcccatcatcttccatgcagcttacggtggcagagcgtaaagcaggtgtcggctacgcactcacgattcttgaatatgacaccaaaatgatgggttcgcctttgacaaaaggttacacatggctggcccgattctattttccaatgcccgcctatatccacctcacccaagatctgaaaaggtgcccgctagatggcgaaacggaccgtatctgggaagcgatgaatgaaaattacgaagccaggatcaacattttctttgacggaggtgccaatcctctgttgaatttcttcgctagtattgtccttgaggcctgggatgcctgcgaaacagcatctagagacattggatcgccttgcacaccaccgagcatagtggtcaagctgcgcgagagcatggcacgtgccgccgagatgcaaaagagtggcgaagagacgtctgttcccgagtcaatgcctccagtggagccgtcatttatgcggctggacgatgttgccatgtcggcacagccgctgaattttgggcagccaaacatgggccagacagacaacattgtttcgtggtccagctttatgccatccgtatctgccccgattccatttgatccccgctgggcaactatgagctggggtttgggaggacaccgtggctggtgatgaggttcaagaggtgctgcaagcagtatgctaccacatcacaccgcctatacaccgatgctgtcattgatgcttattgctctagcttcttgccttgttggcgttgttggatagcgagatacgtacgtgtttcattcatatcaggctccagtttcatgcttctctcgactatgatcaattgcaacgtttggttcaactgcagttcagcaaggcgttctggagattcctgttcaatctcctagtttaatttctctttattccttaggggggaaactccgaaaagacacattgcaacgaccagtgtctcagggtagactgtcgagg

SEQ ID NO: 38359 - DNA, 243 bp, Muscodor strobelii
  misc_feature: SGI cDNA ID NO. 573326
  misc_feature: Reduced expression when VOC is produced
  misc_feature: Encodes the peptide sequence at SEQ ID NO 38360
atgacatcggtagccactcagaccaaccccaaatgctgcggcaagggcaccggcggcgagtgcatctgtgccaacagtgccacttgctcgtgcggcaagcagccggctcagaagtgcgtctgtgagaaggctgcgcaggagaacaacgtgagcggtgccacttgcggatgtggccagcgtcccgccaacgcatgcacctgcggcaagaaccccaacgagaccgacttcaccacgcgcaagtga

SEQ ID NO: 38360 - protein, 80 aa, Muscodor strobelii
  misc_feature: SGI Peptide ID NO. 573326
  misc_feature (12)..(80): NCBI GI: 189204774 Blast Desc: conserved [Pyrenophora tritici-repentis Pt-1C-BFP] gi|187985821|gb|EDU51309.1| conserved [Pyrenophora tritici-repentis Pt-1C-BFP]
  misc_feature (12)..(80): NCBI GI: 169610079 Blast Desc: SNOG_08133 [Phaeosphaeria nodorum SN15] gi|111063289|gb|EAT84409.1| SNOG_08133 [Phaeosphaeria nodorum SN15]
  misc_feature (17)..(77): NCBI GI: 126274269 Blast Desc: PICST_86552 [Pichia stipitis CBS 6054] gi|126213366|gb|EAZ63473.1| PICST_86552 [Pichia stipitis CBS 6054]
  misc_feature (13)..(80): NCBI GI: 50556982 Blast Desc: YALI0F26213p [Yarrowia lipolytica] gi|49651769|emb|CAG78711.1| YALI0F26213p [Yarrowia lipolytica]
  misc_feature (4)..(73): NCBI GI: 261360653 Blast Desc: conserved [Verticillium albo-atrum VaMs.102]
  misc_feature (12)..(73): NCBI GI: 164425584 Blast Desc: NCU05512 [Neurospora crassa OR74A] gi|157070984|gb|EAA31238.2| conserved [Neurospora crassa OR74A]
  misc_feature (12)..(73): NCBI GI: 145248686 Blast Desc: An14g00530 [Aspergillus niger] gi|134081349|emb|CAK41852.1| protein product [Aspergillus niger]
  misc_feature (6)..(78): NCBI GI: 121714351 Blast Desc: conserved [Aspergillus clavatus NRRL 1] gi|119402940|gb|EAW13360.1| conserved [Aspergillus clavatus NRRL 1]
  misc_feature (21)..(79): NCBI GI: 261187825 Blast Desc: copper resistance protein Crd2 [Ajellomyces dermatitidis SLH14081] gi|239593447|gb|EEQ76028.1| copper resistance protein Crd2 [Ajellomyces dermatitidis SLH14081] Crd2
  misc_feature (12)..(80): NCBI GI: 256722490 Blast Desc: [Nectria haematococca mpVI 77-13-4]
  misc_feature: Useful for introducing or modulating the production of volatile compounds
MTSVATQTNPKCCGKGTGGECICANSATCSCGKQPAQKCVCEKAAQENNVSGATCGCGQRPANACTCGKNPNETDFTTRK

SEQ ID NO: 38361 - DNA, 918 bp, Muscodor strobelii
  misc_feature: SGI EST ID NO. CUFF.92104.0
  misc_feature: Variant of the nucleotide sequence at SEQ ID NO 38359
tctgagctggccagatcaattgcaagctgaatattgaatgcagacattgatcagtcgaccatccagcattgataattttctgcccactccaaggcacacaacggcagcttgatttcctccaaccctaagagtttctcactcacaatcaagtcacctaccacttacaccaacaccaactcatcacattcttcatcatctacaatcttacccattgcgacacgatgacatcggtagccactcagaccaaccccaaatgctgcggcaagggcaccggcggcgagtgcatctgtgccaacagtgccacttgctcgtgcggcaagcagccggctcagaagtgcgtctgtgagaaggctgcgcaggagaacaacgtgagcggtgccacttgcggatgtggccagcgtcccgccaacgcatgcacctgcggcaagaaccccaacgagaccgacttcaccacgcgcaagtgagcgcatcatcaccaatagaggacggtatctctctctctcacaagctcttgagaatggccacaggaatgatgatcggtttgtccagaggaatggcaatgggcagattgtgtactactatacaggcgtcaacggcatgggtggttgcaggttgcatggacccctctggggagggtgatgggcgttgagaggaatggatcgggtccggagactggcatgggtcgatggaggcctttgcgaattcatatccatactcgtactcaatcgcatctgagatcattaaaacaagctactgatttgcaacccatccgagtgaattcgaacataatcagcagtggatcgagcattactatcatttcagacgttgtcgcagtcacctagacaaggtgacgaatagagagaaattgtgtagcaaaaggtaataagagggttgcactgagtaagatgcaagggttag

SEQ ID NO: 38362 - DNA, 1782 bp, Muscodor strobelii
  misc_feature: SGI cDNA ID NO. 573327
  misc_feature: Reduced expression when VOC is produced
  misc_feature: Encodes the peptide sequence at SEQ ID NO 38363
atgcccggcagagtagcaagagccggcgcgggcactgccgccacatccaaggccaaggctcaagcatccaaagcagcccccaagaaacccgctgctgccaccaagaaagctgccacgaacaaggccgctgctcccaagaagcccaccaccaaagctgccgcgtccaagaagaaggccgagcccgtcaagaacaccaacggaaagcgaagcagagatgaggacgacgacgatgacgaccaacaagctcaccctacttccgacccaccttcttccgacgatgccaccgaagcgcgccccaagaagaagtcccgcgtcgagaaggaggtgaaagcaaagaagccccgtgccgccgccgccgccgccacatccaaggcggtcgcccctaccggctggcgcaagcatgtcgtcctcaagcgccgcaagcgcaccattgtcgatgccaacgtccccagcgacgccctcgacgtcttcgtattcggcgagggcagcgccggcgagctgggtctcggcagcaagaagtacgacggcagcaagaaggtcacggatgtcaagagaccccgcatcaaccacaacctcgacgccgccaaggtcaacgtcgtcgacgtggcctgcgggggcatgcacgccgtcgccctgacccacgacaaccgcatcctcacctggggcgttaacgacgacaaggccctcggccgcgacaccacctgggacggcggcctgcgtgacgtcgacgccgaagactccgactcggacgatgatgacgacgacagcggcctcaaccccctcgagagcactcccacccagatcgccgacggcgaacttctccctgacgaccgcatctgcaaggttgttgccaccgactcggcctcgttcgccctgaccaccgacggcttcgtcttcggctggggcacgttccgcggcgccgagggcatcattggctttgctgagggcatcaaagtccagcctactcccatgctcatcgagcccctccaggacatcaccgacattgcctgcggctccaaccacgttctcgcactcgatgttaatggcaaggtctggacctggggaagtgggggccagttccagcttggccgcaagcccctgacccgacacggcggtcccaccgctaccctccgccccgagccctgtggcatgtttggcaagcgacactacgccgtaggcatcgcggccggctcctaccacagtttctacatcgacaatgagcagcgcgtgtggtcgtggggcctcaacaactactcccagaccggccactacgacgacaccggcaaggatgacgccatggtcttgcagcccaagctcgtcgagtcgctccgagacgctaaggtcgagatgattgctggaggcgagcatcactcggttgcgcgcacggccgacggccagctgctgacctggggtcgcgtcgatggccaccaagtcggccagcctgcctctctctacaacgaggacaatgccgtcttcgatgagaccaagaagccacgcatcctgctggagcccactgctgttcccgatatcaaggccaaatttgttgccgccggtgtcgacacaagcttcgccatcgatgtcgagggcaaggcctactcgtggggcttctccaccaactaccagaccggacaaggcacgaccgacgacatcgaagttcccacgctgatcgacaacactgccgtccacgatcgagagctcatctgggctggagcgggtggccaatatgccatcctagcagccaagcaccactcgagccctccgccagcagtgaatgggcattag

SEQ ID NO: 38363 - protein, 593 aa, Muscodor strobelii
  misc_feature: SGI Peptide ID NO. 573327
  misc_feature (295)..(345): Pfam Id: PF00415 Pfam Desc: Regulator of chromosome condensation (RCC1)
  misc_feature (150)..(581): NCBI GI: 85097594 Blast Desc: NCU05513 [Neurospora crassa OR74A] gi|28921967|gb|EAA31239.1| NCU05513 [Neurospora crassa OR74A]
  misc_feature (150)..(592): NCBI GI: 256722489 Blast Desc: NECHADRAFT_35093 [Nectria haematococca mpVI 77-13-4]
  misc_feature (150)..(580): NCBI GI: 116201941 Blast Desc: CHGG_08855 [Chaetomium globosum CBS 148.51] gi|88177373|gb|EAQ84841.1| CHGG_08855 [Chaetomium globosum CBS 148.51]
  misc_feature (150)..(585): NCBI GI: 171681784 Blast Desc: protein product [Podospora anserina] gi|170940851|emb|CAP66501.1| protein product [Podospora anserina]
  misc_feature (54)..(580): NCBI GI: 39974891 Blast Desc: MGG_00408 [Magnaporthe grisea 70-15] gi|145018700|gb|EDK02979.1| MGG_00408 [Magnaporthe grisea 70-15]
  misc_feature (150)..(586): NCBI GI: 46127591 Blast Desc: FG08173.1 [Gibberella zeae PH-1]
  misc_feature (97)..(580): NCBI GI: 238840331 Blast Desc: RNA transport protein 2 [Microsporum canis CBS 113480]
  misc_feature (91)..(592): NCBI GI: 258577767 Blast Desc: conserved [Uncinocarpus reesii 1704] gi|237903331|gb|EEP77732.1| conserved [Uncinocarpus reesii 1704]
  misc_feature (91)..(592): NCBI GI: 119179563 Blast Desc: CIMG_08516 [Coccidioides immitis RS]
  misc_feature (91)..(592): NCBI GI: 240110146 Blast Desc: Regulator of chromosome condensation family protein [Coccidioides posadasii C735 delta SOWgp]
  misc_feature: Useful for introducing or modulating the production of volatile compounds
MPGRVARAGAGTAATSKAKAQASKAAPKKPAAATKKAATNKAAAPKKPTTKAAASKKKAEPVKNTNGKRSRDEDDDDDDQQAHPTSDPPSSDDATEARPKKKSRVEKEVKAKKPRAAAAAATSKAVAPTGWRKHVVLKRRKRTIVDANVPSDALDVFVFGEGSAGELGLGSKKYDGSKKVTDVKRPRINHNLDAAKVNVVDVACGGMHAVALTHDNRILTWGVNDDKALGRDTTWDGGLRDVDAEDSDSDDDDDDSGLNPLESTPTQIADGELLPDDRICKVVATDSASFALTTDGFVFGWGTFRGAEGIIGFAEGIKVQPTPMLIEPLQDITDIACGSNHVLALDVNGKVWTWGSGGQFQLGRKPLTRHGGPTATLRPEPCGMFGKRHYAVGIAAGSYHSFYIDNEQRVWSWGLNNYSQTGHYDDTGKDDAMVLQPKLVESLRDAKVEMIAGGEHHSVARTADGQLLTWGRVDGHQVGQPASLYNEDNAVFDETKKPRILLEPTAVPDIKAKFVAAGVDTSFAIDVEGKAYSWGFSTNYQTGQGTTDDIEVPTLIDNTAVHDRELIWAGAGGQYAILAAKHHSSPPPAVNGH

SEQ ID NO: 38364 - DNA, 2978 bp, Muscodor strobelii
  misc_feature: SGI EST ID NO. CUFF.92149.1
  misc_feature: Variant of the nucleotide sequence at SEQ ID NO 38362
agcagttgcaggttgcattccactctcacccactcgcccatcacacaacttacacatcacccaacactcgacatctggttctcacctcacgcacccaatcattcaatcatcatcttgacttgaggttttgcaggactgcatctctgtctttgcatgcaacaaagccacgcatcgactggcatccagcgtctgcctcagtgttctctactcggctgtctcgactaggagtaggtgcatttgtttgtgctcctgttagtcgtgcagctgcagcgcggcccaaagcattagtcttttttttcctctgcatcgggtctctctctctcttcatctctaggttgtccgtcgcgacttcctctgcacatccatcctcgagtacctacctcaggtacaactatttagtaattaccatcaatcaggtacctgcggtacttactaccttcctacataactcattcatcccccctctccatcgcatccgccatacctattcttttccgccgtcgcgctatccactcatccgcccacacacacatccgtcgatccatctcgcatcgaccaacattcatattcgacgccacagcattcgtcgttcctctcaaccgacctcaccacattccacactctcccatcgactcttccctcgtcgatcatcatcgccaccatcaacatgcccggcagagtagcaagagccggcgcgggcactgccgccacatccaaggccaaggctcaagcatccaaagcagcccccaagaaacccgctgctgccaccaagaaagctgccacgaacaaggccgctgctcccaagaagcccaccaccaaagctgccgcgtccaagaagaaggccgagcccgtcaagaacaccaacggaaagcgaagcagagatgaggacgacgacgatgacgaccaacaagctcaccctacttccgacccaccttcttccgacgatgccaccgaagcgcgccccaagaagaagtcccgcgtcgagaaggaggtgaaagcaaagaagccccgtgccgccgccgccgccgccacatccaaggcggtcgcccctaccggctggcgcaagcatgtcgtcctcaagcgccgcaagcgcaccattgtcgatgccaacgtccccagcgacgccctcgacgtcttcgtattcggcgagggcagcgccggcgagctgggtctcggcagcaagaagtacgacggcagcaagaaggtcacggatgtcaagagaccccgcatcaaccacaacctcgacgccgccaaggtcaacgtcgtcgacgtggcctgcgggggcatgcacgccgtcgccctgacccacgacaaccgcatcctcacctggggcgttaacgacgacaaggccctcggccgcgacaccacctgggacggcggcctgcgtgacgtcgacgccgaagactccgactcggacgatgatgacgacgacagcggcctcaaccccctcgagagcactcccacccagatcgccgacggcgaacttctccctgacgaccgcatctgcaaggttgttgccaccgactcggcctcgttcgccctgaccaccgacggcttcgtcttcggctggggcacgttccgcggcgccgagggcatcattggctttgctgagggcatcaaagtccagcctactcccatgctcatcgagcccctccaggacatcaccgacattgcctgcggctccaaccacgttctcgcactcgatgttaatggcaaggtctggacctggggaagtgggggccagttccagcttggccgcaagcccctgacccgacacggcggtcccaccgctaccctccgccccgagccctgtggcatgtttggcaagcgacactacgccgtaggcatcgcggccggctcctaccacagtttctacatcgacaatgagcagcgcgtgtggtcgtggggcctcaacaactactcccagaccggccactacgacgacaccggcaaggatgacgccatggtcttgcagcccaagctcgtcgagtcgctccgagacgctaaggtcgagatgattgctggaggcgagcatcactcggttgcgcgcacggccgacggccagctgctgacctggggtcgcgtcgatggccaccaagtcggccagcctgcctctctctacaacgaggacaatgccgtcttcgatgagaccaagaagccacgcatcctgctggagcccactgctgttcccgatatcaaggccaaatttgttgccgccggtgtcgacacaagcttcgccatcgatgtcgagggcaaggcctactcgtggggcttctccaccaactaccagaccggacaaggcacgaccgacgacatcgaagttcccacgctgatcgacaacactgccgtccacgatcgagagctcatctgggctggagcgggtggccaatatgccatcctagcagccaagcaccactcgagccctccgccagcagtgaatgggcattagaagtacagtacgactggagcacacgcgctgaccggtatggcctgcggttattgagacgacatgaatctgtatataatatcacttgcatttctttcacttcatgtctcagccgaggatttgtgttccttcgcaggctagccaggatggccagtggcatatttcatgggcgttcggggttttggcatgcatgtcagcggtatggtaaagatctcgacagaatagggtggatggataatagctcggctgcagttttgacggctcgcggtagtgattttgcgatgcaacgtggcattgtatgaaagggactggtagagcgaatatgacagagactgcgcagtgcactgaattgctcagacgcatactgaggagtaatagaagacaacatctaccgatgacaaacatgtatttagctaccaattgtttccacgacatgcatataaaatctgcttctgctgtcatcctattgctcaccaagactcgatgtgattcctaccggccatctcaaacaaattgctgcttagaattttca

SEQ ID NO: 38365 - DNA, 717 bp, Muscodor strobelii
  misc_feature: SGI cDNA ID NO. 573328
  misc_feature: Reduced expression when VOC is produced
  misc_feature: Encodes the peptide sequence at SEQ ID NO 38366
atggccgcgcccgaaggcaaaccgacactgcaacacttgaataactcacaatcgcaacatatcctctggctactcgaagaactcgagattccgtataatctcaatctctttgagcgcgtcaagtccggaccgagcaaaaatcgtgcacccgaaagcctcaaagagacgcacccacttggcaagtccccgcagctcattaccgcgtcggggcgcgtcatcattgagcgctccgctatcagcgcgtacttgattgacacgtacgataccgccggcaaattcaaggtctccggcgctgacgagaagcacgatgtcattgcggaggagcaactcatcagctttgccaatgccagtatcggcatgactattatgatcgcaaccatcttttactttctcaaggttatgtctccgttcttcatccgcccattggttagcgccgtcagcggcatggtatctatcggctttctcaacaaggaactcgatgcccaacttaagtatctggataatcagctcgaaggccaggaatattttctgagcaacgataatccgaccagagtcgatgttgtcatgttgttcttcatccaaacgctggatggcactaaagtgggcgacatctcgaagtatccaaatgtcaaggcttggcatgaacgctgtgtggctagaccggcttggaagagggcaatggagaagggtaatggataccagttgagcttcacgtaa

SEQ ID NO: 38366 - protein, 238 aa, Muscodor strobelii
  misc_feature: SGI Peptide ID NO. 573328
  misc_feature (130)..(221): Pfam Id: PF00043 Pfam Desc: Glutathione S-transferase, C-terminal domain
  misc_feature (157)..(221): Pfam Id: PF00043 Pfam Desc: Glutathione S-transferase, C-terminal domain
  misc_feature (6)..(235): NCBI GI: 156062726 Blast Desc: SS1G_01479 [Sclerotinia sclerotiorum 1980] gi|154696815|gb|EDN96553.1| SS1G_01479 [Sclerotinia sclerotiorum 1980]
  misc_feature (6)..(236): NCBI GI: 154313049 Blast Desc: glutathione S-transferase [Botryotinia fuckeliana B05.10] gi|150849611|gb|EDN24804.1| glutathione S-transferase [Botryotinia fuckeliana B05.10]
  misc_feature (9)..(236): NCBI GI: 86747148 Blast Desc: glutathione S-transferase-like protein [Rhodopseudomonas palustris HaA2] gi|86570176|gb|ABD04733.1| Glutathione S-transferase-like [Rhodopseudomonas palustris HaA2]
  misc_feature (9)..(236): NCBI GI: 192288457 Blast Desc: Glutathione S-transferase domain [Rhodopseudomonas palustris TIE-1] gi|192282206|gb|ACE98586.1| Glutathione S-transferase domain [Rhodopseudomonas palustris TIE-1]
  misc_feature (9)..(236): NCBI GI: 91975204 Blast Desc: glutathione S-transferase-like [Rhodopseudomonas palustris BisB5] gi|91681660|gb|ABE37962.1| glutathione S-transferase-like [Rhodopseudomonas palustris BisB5]
  misc_feature (9)..(235): NCBI GI: 259909906 Blast Desc: glutathione S-transferase [Erwinia pyrifoliae Ep1/96] gi|224965528|emb|CAX57060.1| glutathione S-transferase [Erwinia pyrifoliae Ep1/96]
  misc_feature (9)..(236): NCBI GI: 188535195 Blast Desc: glutathione S-transferase [Erwinia tasmaniensis Et1/99] gi|188030237|emb|CAO98123.1| glutathione S-transferase [Erwinia tasmaniensis Et1/99]
  misc_feature (9)..(235): NCBI GI: 283479997 Blast Desc: glutathione S-transferase [Erwinia pyrifoliae DSM 12163]
  misc_feature (9)..(235): NCBI GI: 39933103 Blast Desc: glutathione transferase [Rhodopseudomonas palustris CGA009] gi|39652728|emb|CAE25467.1| glutathione transferase [Rhodopseudomonas palustris CGA009]
  misc_feature (9)..(235): NCBI GI: 254253571 Blast Desc: Glutathione S-transferase [Burkholderia dolosa AUO158] gi|124898216|gb|EAY70059.1| Glutathione S-transferase [Burkholderia dolosa AUO158]
  misc_feature (24)..(229): SWISSPROT Homolog: EC 2.5.1.18 Glutathione transferase
  misc_feature: Useful for introducing or modulating the production of volatile compounds
MAAPEGKPTLQHLNNSQSQHILWLLEELEIPYNLNLFERVKSGPSKNRAPESLKETHPLGKSPQLITASGRVIIERSAISAYLIDTYDTAGKFKVSGADEKHDVIAEEQLISFANASIGMTIMIATIFYFLKVMSPFFIRPLVSAVSGMVSIGFLNKELDAQLKYLDNQLEGQEYFLSNDNPTRVDVVMLFFIQTLDGTKVGDISKYPNVKAWHERCVARPAWKRAMEKGNGYQLSFT

SEQ ID NO: 38367 - DNA, 2651 bp, Muscodor strobelii
  misc_feature: SGI EST ID NO. CUFF.92142.0
  misc_feature: Variant of the nucleotide sequence at SEQ ID NO 38365
gtccagaaaaggtgtaaattgtcaaatgataaaataacacagctagtcaggatcccgcgagacggcacgagcaagtcttcgcgcggaggtagcaagcaccaacgatctaacagcaggtattcaattatataccatccggagaggtcgaagagttatgctacctagatgatgagaaggaggcactctagacccagagctccatgaagacttatagctccgccgatttgaacctctacaaagagcttatgtgcaccgtcatcctgtcaagtcccatcagccactgccttaggttgcgcagcatccgcacgctcctcaacgcgcctaacacattctcattcgcgaagaggattaaggaagcgggctcggtgaggcaacgctaggcattttgggatgcgagagcacagcacaaggagaagacggcatgccaaataaacaggctgccgaagtaatacttgaagagtataccaacgacgacgatggggagggcaaagacctgagcaaatcatgggaaggctaggatcacgacctgacaaggtataaaacacaccgaagacagatatcaaaggatttgggaagacgagcatggggacgctccacagacgccccaacacatgtgggaagaggcatttccatatattgacgagaaaaccgatggggtcccaaggcgctgggtcttccttatcatgctgatgagctggagactgcgatggacgagaattggaacgcgccgcgcactggccgtattcgcgggaaggccgtatctgcgaagaagaggagagagtgtgtgctcgtgttggaatgggcggtgactgcacaattggagagcaagatggatgagttggtttaagcggccgctcgcatatggcccgattgcctgagattcaacccacacgagggataccgacttcatctcggtgcgggtcttctgtgaacctacgcgacacgactggctccttattatcgcgaataaagcagtttatttggaccgtggatctttccatcctgttgaagctggtgcaccgagaatactcctaaaagtcactattatcgagatcttcctggcttatatgaagtgatgcacaaatcatgcacgttgcgaggcatgatggtgacggccgcgtcgcgaaaatgccctgcgttcgtcagcaccaactccacggtgactttctccgcaacaaattctggcggtggacttggcggaggcggagttcgcattctcgtttacgatgaatttcttaatcacccgaagctggcgtatgaatagacaaatgaacgaaagtagtggtaggcgatggtttaatggtccacagaggaaaattcgatgacgtttttgcccgatcaggataatgacatagctgccgaggtcttctcaactgctcgaacccgtgtcctgagcgtatatgatatctcacgctcaattaccttaaatatcgtgacatattgtgcattagtcctcgttgctgttatttcaataacccgcaccctctgcttcgaacaaccatagtcgcaattgatcaagatggccgcgcccgaaggcaaaccgacactgcaacacttgaataactcacaatcgcaacatatcctctggctactcgaagaactcgagattccgtataatctcaatctctttgagcgcgtcaagtccggaccgagcaaaaatcgtgcacccgaaagcctcaaagagacgcacccacttggcaagtccccgcagctcattaccgcgtcggggcgcgtcatcattgagcgctccgctatcagcgcgtacttgattgacacgtacgataccgccggcaaattcaaggtctccggcgctgacgagaagcacgatgtcattgcggaggagcaactcatcagctttgccaatgccagtatcggcatgactattatgatcgcaaccatcttttactttctcaaggttatgtctccgttcttcatccgcccattggttagcgccgtcagcggcatggtatctatcggctttctcaacaaggaactcgatgcccaacttaagtatctggataatcagctcgaaggccaggaatattttctgagcaacgataatccgaccagagtcgatgttgtcatgttgttcttcatccaaacgctggatggcactaaagtgggcgacatctcgaagtatccaaatgtcaaggcttggcatgaacgctgtgtggctagaccggcttggaagagggcaatggagaagggtaatggataccagttgagcttcacgtaaatgttgctcaagctctgctgcattatgaaattgcactgcaggatcgataaggtcaactgaggttacactacttgtgtgtctgggataagcatcgtatgcctgccttcgtcctcatggggttgatatggaagactggagtaaagcttggagtcatggcatacttaccccattctcgagatagattgcaaatggcaatcgatagcaagcttttcgacatacggacttctacttcttctggcatagcttccgtctgattcagtgatgatgcatctagattggtgaagttcgggtgggaggacactgggcgcgcccgagtaattctaacacacagcactcgggtacacacaacctgggcaaatttggcatttacacattggccttgcgcggcaatgatcacgactatgtggcatgcagc

SEQ ID NO: 38368 - DNA, 1617 bp, Muscodor strobelii
  misc_feature: SGI cDNA ID NO. 573329
  misc_feature: Encodes the peptide sequence at SEQ ID NO 38369
atgctcgcattagctgcatcacagctaatacgtcgcattaaatgtgacttggcagagccgcactgccagagatgcatctcaacgggacgacactgtgacggataccccgttctgcctgacaaggatcaaaaggctgcaaatgtggctaaacctcatatccaaagcatcaacgacgagagtgatgggcgattgcgtctcttgggaagccgacgttatctacaggagtctaagcccgattatagtataaatagctccctgcttgccttaccaccagcgagtgccgaggagaacgatgcactacagtttttcgagctccgtactttgccctcgctgaacgcgtgccgtgccaatgtgtcttggaaccgaacaattaactttttctcacacacggtcggcgccgtgcgtcacgccgccatcgctctcggggccctccaccgatcgtacattcacagcgcatgcaccgcagacgatgactgcgatagtttgcagatcgctagtgattttgcgctcgctcactacaacttggcaatacagcacctgcttcggtcaacgggacgaactggtgataagtcaactgatactgctataactttacttgtgtgctggctctttacttcatatgatagcctcgccaggtactacccgcagacatttcagcatctacgaagcggtgttcagctcataaaagaattcggaaagaagatgaaagtagacaatatagagaagacttccgcctcggattgttgcgaaatcattgcagaaatcacagatcagttccggcgcttagaaactcaagcagttgtgtttctattcgattgggatccggtgttgtcgaacccacgtgaaggataccccgatgacgttctgaagggtgattggttggcagatgattatcggattacatctcccatccaagctgctaacgaattggttgatattgaggttgctttgaaccctttacgacaatgggcaacttttggcgtagagtcgagcgcgacgagtgacaagcgtaatcattatttgaagcgcctgaagaagtggctactagcattcaacgaccttctctattcggacccggcactaatgaaagaaactcttgtccaactgctcttgattcactacgatacctgttttgctttcttgtcatcaataaacggcaacggtgagatgggctacgattccctaacgccacaattccgatcaattagtcagaggattcaggatctgagtgcccagtctatgtcacctgagcagaacagcttcatattagaacttggagttgtaccaattctcttcgtgctcggaacgaaatgccgtgatcctaccgtgcggcgtcaagttatacaaacactgcggcataaacgtcgtcgcgaatcgatgtgggacagcttttcgaccgcgcgcattgtggagcgcgtcatgactatcgaggaagatggaataaagcgcgagtttaaggatgttgtgatcagcagctgcagcgatataccggttgaacgccgagttactactattacgtgggctcctgctggcaatgggcttgagtgcctcgctaccttcgaattgggctcgttggacgccgaaaggagattattctcggagacaatgagcgtctag

SEQ ID NO: 38369 - protein, 538 aa, Muscodor strobelii
  misc_feature: SGI Peptide ID NO. 573329
  misc_feature (11)..(42): Pfam Id: PF00172 Pfam Desc: Fungal Zn(2)-Cys(6) binuclear cluster domain
  misc_feature (10)..(478): NCBI GI: 238500209 Blast Desc: sugar transporter, [Aspergillus flavus NRRL3357] gi|220693092|gb|EED49438.1| sugar transporter, [Aspergillus flavus NRRL3357]
  misc_feature (10)..(507): NCBI GI: 242821201 Blast Desc: C6 transcription factor, [Talaromyces stipitatus ATCC 10500] gi|218712553|gb|EED11978.1| C6 transcription factor, [Talaromyces stipitatus ATCC 10500]
  misc_feature (12)..(538): NCBI GI: 46115762 Blast Desc: FG03723.1 [Gibberella zeae PH-1]
  misc_feature (30)..(513): NCBI GI: 119499604 Blast Desc: NFIA_101460 [Neosartorya fischeri NRRL 181] gi|119414724|gb|EAW24662.1| conserved [Neosartorya fischeri NRRL 181]
  misc_feature (84)..(507): NCBI GI: 169779547 Blast Desc: [Aspergillus oryzae RIB40] gi|83772977|dbj|BAE63105.1| protein product [Aspergillus oryzae]
  misc_feature (90)..(511): NCBI GI: 145611926 Blast Desc: MGG_00032 [Magnaporthe grisea 70-15] gi|145019138|gb|EDK03417.1| MGG_00032 [Magnaporthe grisea 70-15]
  misc_feature (10)..(481): NCBI GI: 145242388 Blast Desc: An09g04980 [Aspergillus niger] gi|134078359|emb|CAK40351.1| protein product [Aspergillus niger]
  misc_feature (11)..(513): NCBI GI: 145239523 Blast Desc: An08g02910 [Aspergillus niger] gi|134076919|emb|CAK45328.1| protein product [Aspergillus niger]
  misc_feature (9)..(502): NCBI GI: 169765161 Blast Desc: [Aspergillus oryzae RIB40] gi|83764906|dbj|BAE55050.1| protein product [Aspergillus oryzae]
  misc_feature (15)..(499): NCBI GI: 242805729 Blast Desc: conserved [Talaromyces stipitatus ATCC 10500] gi|218715217|gb|EED14639.1| conserved [Talaromyces stipitatus ATCC 10500]
MLALAASQLIRRIKCDLAEPHCQRCISTGRHCDGYPVLPDKDQKAANVAKPHIQSINDESDGRLRLLGSRRYLQESKPDYSINSSLLALPPASAEENDALQFFELRTLPSLNACRANVSWNRTINFFSHTVGAVRHAAIALGALHRSYIHSACTADDDCDSLQIASDFALAHYNLAIQHLLRSTGRTGDKSTDTAITLLVCWLFTSYDSLARYYPQTFQHLRSGVQLIKEFGKKMKVDNIEKTSASDCCEIIAEITDQFRRLETQAVVFLFDWDPVLSNPREGYPDDVLKGDWLADDYRITSPIQAANELVDIEVALNPLRQWATFGVESSATSDKRNHYLKRLKKWLLAFNDLLYSDPALMKETLVQLLLIHYDTCFAFLSSINGNGEMGYDSLTPQFRSISQRIQDLSAQSMSPEQNSFILELGVVPILFVLGTKCRDPTVRRQVIQTLRHKRRRESMWDSFSTARIVERVMTIEEDGIKREFKDVVISSCSDIPVERRVTTITWAPAGNGLECLATFELGSLDAERRLFSETMSV

SEQ ID NO: 38370 - DNA, 2395 bp, Muscodor strobelii
  misc_feature: SGI EST ID NO. CUFF.92113.0
  misc_feature: Variant of the nucleotide sequence at SEQ ID NO 38368
aaaggctgcaaatgtggctaaacctcatatccaaagcatcaacgacgagagtgatgggcgattgcgtctcttgggaagccgacgttatctacaggagtctaagcccgattatagtataaatagctccctgcttgccttaccaccagcgagtgccgaggagaacgatgcactacagtttttcgagctccgtactttgccctcgctgaacgcgtgccgtgccaatgtgtcttggaaccgaacaattaactttttctcacacacggtcggcgccgtgcgtcacgccgccatcgctctcggggccctccaccgatcgtacattcacagcgcatgcaccgcagacgatgactgcgatagtttgcagatcgctagtgattttgcgctcgctcactacaacttggcaatacagcacctgcttcggtcaacgggacgaactggtgataagtcaactgatactgctataactttacttgtgtgctggctctttacttcatatgatagcctcgccaggtactacccgcagacatttcagcatctacgaagcggtgttcagctcataaaagaattcggaaagaagatgaaagtagacaatatagagaagacttccgcctcggattgttgcgaaatcattgcagaaatcacagatcagttccggcgcttagaaactcaagcagttgtgtttctattcgattgggatccggtgttgtcgaacccacgtgaaggataccccgatgacgttctgaagggtgattggttggcagatgattatcggattacatctcccatccaagctgctaacgaattggttgatattgaggttgctttgaaccctttacgacaatgggcaacttttggcgtagagtcgagcgcgacgagtgacaagcgtaatcattatttgaagcgcctgaagaagtggctactagcattcaacgaccttctctattcggacccggcactaatgaaagaaactcttgtccaactgctcttgattcactacgatacctgttttgctttcttgtcatcaataaacggcaacggtgagatgggctacgattccctaacgccacaattccgatcaattagtcagaggattcaggatctgagtgcccagtctatgtcacctgagcagaacagcttcatattagaacttggagttgtaccaattctcttcgtgctcggaacgaaatgccgtgatcctaccgtgcggcgtcaagttatacaaacactgcggcataaacgtcgtcgcgaatcgatgtgggacagcttttcgaccgcgcgcattgtggagcgcgtcatgactatcgaggaagatggaataaagcgcgagtttaaggatgttgtgatcagcagctgcagcgatataccggttgaacgccgagttactactattacgtgggctcctgctggcaatgggcttgagtgcctcgctaccttcgaattgggctcgttggacgccgaaaggagattattctcggagacaatgagcgtctagctacaggcagctaccttaatactcttgtagttaccctcctgagaaaacattgtgcagcggcgtctgtagacgatactagcttcggcttcttttccccccgctctcttatgttgcgaacaggcggcttcggccacttacctatccttgaattgatgaagagtatcatgtggagatgagaacatggtattatatgtagccatcgcgagattgctggtatggaagggacaacgaagggcaacggagatttcccaatcaattgctttgatgatagaggcgagttgagtctagactctcagttgaaggcgggactcgtttggtactacgaagtatgtgttggtaattgaataactgcatgggaaatggtggaaggaaacgagggtatccatgaacagttctttctaggcctgtaggtgcgatgcagatttcaaacgacatcgtgacaaattcaccggtcgccagtcaggtccagcacctacagaaaatttaatgcaacaccagctgctgcgatagcgttgtttctgaaaaccacgtggtaattaaacttgggagctaggcgagctgtctctgttgaactacctagtactgtcaagcctgctatccccgcagtacgtgccatggtctgggatggtcggggtcatctcgaaggtcgttgacgtggccgatgacaccaatgctaaactaattggatcttggaaatgcttaaagtgcatcgggttgcatcggaactggactgtgaggcgagcaggctcttgcgcttccgataagaaaacggctgatcgggacactagcgaatctgaacaacagtaaggcgtggatgtgttgagtggtcgtagttgtacttgctttcagcttctgtagcggaagtgacgccgactataagctccatactcatgattaatggcccgg

SEQ ID NO: 38371 - DNA, 492 bp, Muscodor strobelii
  misc_feature: SGI cDNA ID NO. 573330
  misc_feature: Reduced expression when VOC is produced
  misc_feature: Encodes the peptide sequence at SEQ ID NO 38372
atgaagaccacacttttcgccgtgttcgccctgggcgggtggatcgccacgacgatcgccaaccccatcgccatcgccaacggtgttgagaagcgccaggacgacgaagactacaccgagctcaacgacagcttgctgtctctgctggccgacatccagaagcagacgggtgccatcaacgccaccctcgacaccgtgcccgatggtcgggccccggcgaagcgagacctctcggctcgccacatcggcaagccagacctgttcaagacggtgtccctcatcatcttcgagttgctcttcaccgtcaagaagatcatcttcaagctcggtctcggcaaggtcctcatctacctcacgcctctcgtcctctcgctcaagggcctgctcttcagcctcgacaaggtcgtcgcgggactgttgctcgccgtcaagctcatcgccaacgagctcctcaaggccgtcggtctgggtctcatcggcatcgtcccctaa

SEQ ID NO: 38372 - protein, 163 aa, Muscodor strobelii
  misc_feature: SGI Peptide ID NO. 573330
  misc_feature (1)..(162): NCBI GI: 171681676 Blast Desc: protein product [Podospora anserina] gi|170940797|emb|CAP66446.1| protein product [Podospora anserina]
  misc_feature (1)..(161): NCBI GI: 169597997 Blast Desc: SNOG_01796 [Phaeosphaeria nodorum SN15] gi|160707636|gb|EAT91445.2| SNOG_01796 [Phaeosphaeria nodorum SN15]
  misc_feature (1)..(146): NCBI GI: 145616810 Blast Desc: MGG_14388 [Magnaporthe grisea 70-15] gi|145022838|gb|EDK06595.1| [Magnaporthe grisea 70-15]
  misc_feature: Useful for introducing or modulating the production of volatile compounds
MKTTLFAVFALGGWIATTIANPIAIANGVEKRQDDEDYTELNDSLLSLLADIQKQTGAINATLDTVPDGRAPAKRDLSARHIGKPDLFKTVSLIIFELLFTVKKIIFKLGLGKVLIYLTPLVLSLKGLLFSLDKVVAGLLLAVKLIANELLKAVGLGLIGIVP

SEQ ID NO: 38373 - DNA, 996 bp, Muscodor strobelii
  misc_feature: SGI cDNA ID NO. 573331
  misc_feature: Reduced expression when VOC is produced
  misc_feature: Encodes the peptide sequence at SEQ ID NO 38374
gccgccaacctcgccaagttccgcaagaacttcaagcaccgcgccaccgcctggttccccttcccctatctcgagttcaccacgcgccaggtcctgatcgaagagttcgcccagggcatccccttgtccgacttcctcgagaacggcggcggctccttccagaaggacattgccaacgaagggctcgacgctttcctgcgcatgctgctgatcgacaactttgtgcatgccgatctgcacccgggcaacatcatggtccgcttctacaagacccgacagcccgacctcaaccttcgcggccaccacggccaccacggccacgagacgccccaggagcaacccgacgtcaccgaggaggtcttggctcgcctgcgaccctatcgaaagaagaaggacaacgccgcatgggaagccgaactgaacaagatcgatgccgagggcttccggccccagctcatcttcatcgacacgggactgtgcaccgagctcaatgccacgaatcgcaagaacttcctcgatctcttccgagccgtcgccgagttcgacgggtacagggcgggacatctgatgtgcgagcgctgccgccagcccgacgccgtcctggacgaggaagtcttcgccctcaagatgcagcatctcgtgctgagcgtcaagagtcgaactctcgccctcggcaacgtcaaaatcggagacatcctgcagcaggtcctggacatggtcaggagccatcatgtgagaatggagggcgactttgtcaatgtcgtcattagcatcctactactagagggcatagggcgcagtctggatcccgatcttgatctgctcagcaggtctctgcccattctgagacagcttggcgggcaaggaggctggaccgtgggcgacatacccatggtattcatctgggctgggctcgaggcgcgtaggttcatgcaggccagtatagaggatgttgaacgatgtgtcaagtatgacttgttatcgcctaatgtatag

SEQ ID NO: 38374 - protein, 331 aa, Muscodor strobelii
  misc_feature: SGI Peptide ID NO. 573331
  misc_feature (1)..(331): NCBI GI: 154299011 Blast Desc: conserved [Botryotinia fuckeliana B05.10] gi|150857521|gb|EDN32713.1| conserved [Botryotinia fuckeliana B05.10]
  misc_feature (1)..(331): NCBI GI: 156058087 Blast Desc: conserved [Sclerotinia sclerotiorum 1980] gi|154702560|gb|EDO02299.1| conserved [Sclerotinia sclerotiorum 1980]
  misc_feature (1)..(331): NCBI GI: 46128015 Blast Desc: FG08385.1 [Gibberella zeae PH-1]
  misc_feature (1)..(331): NCBI GI: 256733934 Blast Desc: [Nectria haematococca mpVI 77-13-4]
  misc_feature (1)..(331): NCBI GI: 171678052 Blast Desc: protein product [Podospora anserina] gi|170937095|emb|CAP61753.1| protein product [Podospora anserina]
  misc_feature (1)..(331): NCBI GI: 145615472 Blast Desc: MGG_13137 [Magnaporthe grisea 70-15] gi|145022289|gb|EDK06309.1| MGG_13137 [Magnaporthe grisea 70-15]
  misc_feature (1)..(331): NCBI GI: 116201687 Blast Desc: CHGG_08728 [Chaetomium globosum CBS 148.51] gi|88177246|gb|EAQ84714.1| CHGG_08728 [Chaetomium globosum CBS 148.51]
  misc_feature (1)..(321): NCBI GI: 261361042 Blast Desc: ABC1 family protein [Verticillium albo-atrum VaMs.102]
  misc_feature (1)..(331): NCBI GI: 164425527 Blast Desc: NCU05600 [Neurospora crassa OR74A] gi|157070962|gb|EAA31326.2| NCU05600 [Neurospora crassa OR74A]
  misc_feature (1)..(331): NCBI GI: 189204978 Blast Desc: PTRG_08492 [Pyrenophora tritici-repentis Pt-1C-BFP] gi|187985923|gb|EDU51411.1| PTRG_08492 [Pyrenophora tritici-repentis Pt-1C-BFP]
  misc_feature: Useful for introducing or modulating the production of volatile compounds
AANLAKFRKNFKHRATAWFPFPYLEFTTRQVLIEEFAQGIPLSDFLENGGGSFQKDIANEGLDAFLRMLLIDNFVHADLHPGNIMVRFYKTRQPDLNLRGHHGHHGHETPQEQPDVTEEVLARLRPYRKKKDNAAWEAELNKIDAEGFRPQLIFIDTGLCTELNATNRKNFLDLFRAVAEFDGYRAGHLMCERCRQPDAVLDEEVFALKMQHLVLSVKSRTLALGNVKIGDILQQVLDMVRSHHVRMEGDFVNVVISILLLEGIGRSLDPDLDLLSRSLPILRQLGGQGGWTVGDIPMVFIWAGLEARRFMQASIEDVERCVKYDLLSPNV

SEQ ID NO: 38375 - DNA, 5152 bp, Muscodor strobelii
  misc_feature: SGI EST ID NO. CUFF.92123.0
  misc_feature: Variant of the nucleotide sequence at SEQ ID NO 38373
gccaacctcgccaagttccgcaagaacttcaagcaccgcgccaccgcctggttccccttcccctatctcgagttcaccacgcgccaggtcctgatcgaagagttcgcccagggcatccccttgtccgacttcctcgagaacggcggcggctccttccagaaggacattgccaacgaagggctcgacgctttcctgcgcatgctgctgatcgacaactttgtgcatgccgatctgcacccgggcaacatcatggtccgcttctacaagacccgacagcccgacctcaaccttcgcggccaccacggccaccacggccacgagacgccccaggagcaacccgacgtcaccgaggaggtcttggctcgcctgcgaccctatcgaaagaagaaggacaacgccgcatgggaagccgaactgaacaagatcgatgccgagggcttccggccccagctcatcttcatcgacacgggactgtgcaccgagctcaatgccacgaatcgcaagaacttcctcgatctcttccgagccgtcgccgagttcgacgggtacagggcgggacatctgatgtgcgagcgctgccgccagcccgacgccgtcctggacgaggaagtcttcgccctcaagatgcagcatctcgtgctgagcgtcaagagtcgaactctcgccctcggcaacgtcaaaatcggagacatcctgcagcaggtcctggacatggtcaggagccatcatgtgagaatggagggcgactttgtcaatgtcgtcattagcatcctactactagagggcatagggcgcagtctggatcccgatcttgatctgctcagcaggtctctgcccattctgagacagcttggcgggcaaggaggctggaccgtgggcgacatacccatggtattcatctgggctgggctcgaggcgcgtaggttcatgcaggccagtatagaggatgttgaacgatgtgtcaagtatgacttgttatcgcctaatgtatagttgatattatgtaccggggagcgatctagcattacaccggcgtttggaagggtcatggtttaggatggcgtctacaccactcatagaggctacgatagaaagaggttgttcagtcacatatttttgatactacgggcattccataattgttcagttttgaagctgagtattgctcattcaccacgtatagatttccgcgaattgatgcgcagctcaaatttcatcgcggcctcgtcgttctatcccccgttatgcttgttggaaatctacttgggacaacgaatcgatctattgtatgagattcatcaggttttgggccgcgtccgagacgataaatcaaggcatccgactcagaaacaaggttctactaagccgcgacagttaccacgtggaaaatagcacgccaaggtcggagaatttctgggatggatatacccgaaccgaggaacccacagagccacgatgcgaccagccaagagggtatcaccgcaggatattagtgttatcttgggaagcaacgacaagagtatccattatggcatctgactacgaaagttttccggctgagtgcacgccagctatctttcgatagtacaataaaacattagccaacatcaattcccagctccgattcatttcacctcccttaaatcaaagtccactcagtgccggacggccgaaatccagaataccgcgacccgaatcccacagccaatcttccagcacatactagcatttcgcttcccttgccaacttaggggacgatgccgatgagacccagaccgacggccttgaggagctcgttggcgatgagcttgacggcgagcaacagtcccgcgacgaccttgtcgaggctgaagagcaggcccttgagcgagaggacgagaggcgtgaggtagatgaggaccttgcctattgtggccatcagcaccatacttcacttcgatcgcgcactgaaacaggaagcaagataaagaaagggggtcagacataccgagaccgagcttgaagatgatcttcttgacggtgaagagcaactcgaagatgatgagggacaccgtcttgaacaggtctggcttgccgatgtggcgagccgagaggtctcgcttcgccggggcccgaccttggtgtggccgcgtccagcaggctcgtgatggccgagagctgcgtggcgatggcggccgcgtcagccgtggtgtcggcatcgggcgcaccatcgggcacggtgtcgagggtggcgtctgagggcatgtcagtctgggaaacgcgtgctgtctttcgaagtggatgactcactgatggcacccgtctgcttctggatgtcggccagcagagacagcaagctgtcgttgagctcggtgtagtcttcgtcgtcctggcgcttctcaacaccgttggcgatggcgatggggttggcgatcgtcgtggcgatccacccgcccagggcgaacacggcgaaaagtgtggtcttcatcttgatggagagatagaaagaaggtcaagctgagaagcgaagatgtgctggaaagactggactttgttgctgttgctgtgatgcctgagagagaaacgttgggagttgacgggagcgaacagctctatttatctttttttccctactctctcatttctctctacgacctgtcctcttgtttctaaatctggatgacttcttcgtcgccaccgggactatgctcaaaggtccatcttaccaccaggtcgccggcaaaggtcagacagtgaggcatcctctcatcgcttaactctggtgccggatacacgcgtgtggcttgcgaaagtttcgatgtcgacaatatgcacgatgatgtcgatctttccccaatttctcgatggctgcgaatatttccttgatctctgtctgatttcgctatctagccggcgactaacatgccctccgccctcctactcgatcgtatgtcgccaagctctgatagattaatggcgatatcttgcgacttccgttctcccactgtgcgacatccgaatcttgggaaaagattgcattgtaaccgttagtcgaacaagcacttgctcaggggctacgccggattcttggtcaacgttccggatgaggagcacaggctcatgccggcatttttaatgcggaggtcccctgatggtggtggtcgagtgtgtcttattggatatcgatctgaattgggtattcgacccctttccttaccccgaagcatatgtcgaaacccttctaagtgctagattgctatagcacctcaattaggagccggtagtagaagtatgttcgatgatgtcgaaagaagctattttcaaggttctaggagaagcaaagtatacaacaacaccatcatcgtagaatcgtgcttattactagtctaccacgatcctaagctacctgtcttcatcacgcctgcgtccttcttcgacgggccctgacgatcagaaccagtgcagatgtggaccatggccctccgcgcagatcgaggagatcacgcttgaagatctttcagctgcgtcccaacaactatacacttcaagacatatctatttctggagtcatgtcgacctggtgttcggcatttccattagtaaagatcatcttgtaatgccgaataatccgttcatcgtgtcttaccaattcagcattgtcccgacgttccataccgatattctataatatgctcgttataccttgcccttaaagagcatttctgaaatgcccccataaggcgacatggacacatttaccgcgtcgtgcctggcggctaaccaggctccaatgtcaatgcaacctaatatcgtgacgagcaatgtgacggagattgccggctgcggctcattgggcagcgtcgcactagcacctctacacgtcggcatttatccaaaccgcacgaacaaacacgcgggggagaccgatcgcagggctacctcactctgtatgaaatgcatctacagctgagaatcctgatttccgaggacattatcaatgattattcattttctatatatttctcgtacatgagttgttcaatcacgagtgtcttcgttgccaccatgtgacatcattgcaatcatggccgctgacgtagcctgcttgccatcatagacacggcgaggctgttttccacacggaaatattcgaaattccgggtcggtgattcacgtggaacgcgttgaggtctacaaacctgggcatctagtcgtccttgaattactgggaatgtgcaatttcggctcatatgacaagcatctggcttacagggacgttgcccgggacttcggctaacaatttgacagaacagttttgataatgagattatttttcgccattctcacgtttgatgaggcaatgtatgctgccgatcgactcgcgagatgtcgatctcgtctcgactaggcattaagacttgggatatctgatcgtctagaaatgtctgggactgtcgatcagcagttccgatgactatttttatctgatcgacgcctacatacttccattctgctctcacggctgagtgtatgatattgctattgccgactttatccagtgttcaccgggactcctcgttgtcacgcaggacacaatcacacaaacaaccagggcaagtcagcatcttctctagaaacattgtgagcttaggcggtccgagtctgcttcgcaataggtcttcgagttcgaatggcaaacctgtcttctttggcccagttcacaggacactctagtcggcacttattcgcgttattgaacagtcagtattcgtcgaactctattttcaaatgctgccgaacagtccatgacggaatagcaagtgaatttcaaaatctttcctttgcatttttcaggctgtgatgagctagtgtatctcgtcgagaagattcaatatgtcgtcgacaagtagctcctagcttacgacacctcctgggcacatcgctcttctaaactatcacgccctcgacctttcctcgcgaatttcaggatatccaaaatatccagtttccttcactgctcattactcagacaagtttgcgattagctccttatgaattttcaccccttccctcacatcgtcgatgttgccttgcgcgggcctgccagcatttcgttaacgaccaatactccgggctgatagacatgtctcgtgtgaatatgctgagcttacgc

SEQ ID NO: 38376 - DNA, 585 bp, Muscodor strobelii
  misc_feature: SGI cDNA ID NO. 573332
  misc_feature: Reduced expression when VOC is produced
  misc_feature: Encodes the peptide sequence at SEQ ID NO 38377
atgcgctccttcgctgtcctcgctcttgcctcggccgtttcggcccaatacgctgttggcggtggctaccccgtctcttccagctccagctctgccggttatcccgttgagactccttcctacccggtcgagagctcttcgtaccctgccgagactcccagctcttacagcgctgtccccaccaccgtctcgtaccctgtgaccactccggtttacccaacttccgtggtttaccctaccacttctgaggctccctcgacctaccccgttgagactcccagctaccctgttgagagctcttcttaccccgttgagactccctctacttcttaccctgccggcacgcccacaacttaccctgttggaactccttcttcctacagccaggctcccaccactgccccaggctatcctaccagtgcttacccgacttaccccgtaagcactttgaccacttccgttggtaccaccagtgtccctggcacttctccctaccccactggtagccccattcccaccgctggtgccggccgcgttgccgcttctttcggtgtcatgggcgctgttgccgctctcctcttctaa

SEQ ID NO: 38377 - protein, 194 aa, Muscodor strobelii
  misc_feature: SGI Peptide ID NO. 573332
  misc_feature (22)..(145): NCBI GI: 229207640 Blast Desc: NdasDRAFT_3190 [Nocardiopsis dassonvillei subsp. dassonvillei DSM 43111] gi|228569823|gb|EEK34343.1| NdasDRAFT_3190 [Nocardiopsis dassonvillei subsp. dassonvillei DSM
  misc_feature (34)..(185): NCBI GI: 226291341 Blast Desc: PADG_02867 [Paracoccidioides brasiliensis Pb18]
  misc_feature (1)..(185): NCBI GI: 225679608 Blast Desc: PABG_00455 [Paracoccidioides brasiliensis Pb03]
  misc_feature (34)..(149): NCBI GI: 229207640 Blast Desc: NdasDRAFT_3190 [Nocardiopsis dassonvillei subsp. dassonvillei DSM 43111] gi|228569823|gb|EEK34343.1| NdasDRAFT_3190 [Nocardiopsis dassonvillei subsp. dassonvillei DSM
  misc_feature: Useful for introducing or modulating the production of volatile compounds
MRSFAVLALASAVSAQYAVGGGYPVSSSSSSAGYPVETPSYPVESSSYPAETPSSYSAVPTTVSYPVTTPVYPTSVVYPTTSEAPSTYPVETPSYPVESSSYPVETPSTSYPAGTPTTYPVGTPSSYSQAPTTAPGYPTSAYPTYPVSTLTTSVGTTSVPGTSPYPTGSPIPTAGAGRVAASFGVMGAVAALLF

SEQ ID NO: 38378 - DNA, 1169 bp, Muscodor strobelii
  misc_feature: SGI EST ID NO. CUFF.92895.1
  misc_feature: Variant of the nucleotide sequence at SEQ ID NO 38376
ctttgagccatggggcaaatgaaaaggagggcgctaggatatataagcagatgatcactcctccgttccaatttccctctcttttcttcctcacccaccaacaactgtaaatacagtccgtcactcgcttcggtatcaaattgtcgttctctcaacctcagtctttcgcttcagacaaattaatacctttacaaccacatcttaagtaatatctaatacttttaaacccaaccaaatctatcaaaatgcgctccttcgctgtcctcgctcttgcctcggccgtttcggcccaatacgctgttggcggtggctaccccgtctcttccagctccagctctgccggttatcccgttgagactccttcctacccggtcgagagctcttcgtaccctgccgagactcccagctcttacagcgctgtccccaccaccgtctcgtaccctgtgaccactccggtttacccaacttccgtggtttaccctaccacttctgaggctccctcgacctaccccgttgagactcccagctaccctgttgagagctcttcttaccccgttgagactccctctacttcttaccctgccggcacgcccacaacttaccctgttggaactccttcttcctacagccaggctcccaccactgccccaggctatcctaccagtgcttacccgacttaccccgtaagcactttgaccacttccgttggtaccaccagtgtccctggcacttctccctaccccactggtagccccattcccaccgctggtgccggccgcgttgccgcttctttcggtgtcatgggcgctgttgccgctctcctcttctaagtggtttctcgtctcggacgtgagctgcattggatttgagcctggggccatggcgtagtgggaattcactctcgaggatagagccgtctcttcgacgcttcgcggccgaagggcggtaggggttgatatataaagttggtttgaatgtattctaattcttgactcgtcgatcatgattcatgatgatgacgatagatattttataatgatatttttaagatgtgtatagatctgctgcctgttcagtgttgtcttctgtgttcgtgtcttctaggtttctattgcatgatcaattatttgttcatgattcttagtccgtgttgaatttctcgaggtcag

SEQ ID NO: 38379 - DNA, 1164 bp, Muscodor strobelii
  misc_feature: SGI cDNA ID NO. 573333
  misc_feature: Reduced expression when VOC is produced
  misc_feature: Encodes the peptide sequence at SEQ ID NO 38380
atgtcgcaaccacagggaaccactcccatgctcatcaacatccccccacccccttctaatcccgagaccccaagcgacatgccgggcactcccacgagcaccaccacttctctgtcggctctgtctaccaccgccatcaaggacggccatcgcggccacgcccatcttgccctcggcggcccacgtggccacggccaccatccttccacccacagcctcgaggccgaacgcgcagaccgcatcagccgtcttgccgggctggagcgtgtctctactgtccgcgccccgaaccagccgccgggcgcccacgccggctcgccccagaccacgcccacctccaccggcttcccgcccaatgctgccctcgcccccgcctacttcgactccaacggacagcccacccagcggaccaagatgagcaccgtcggcacggcctcggccaccggcagcgtcggtgcccgcaccaccaccgagcccggcgagcacctggacatggacgcagacctgaccgaggtcgacgaggacggcatgagcacggataccaactatcggaccatggatgtcgactcgacctcgggcgccgtcgacgccatggacgaagacatgacgaaccgatccgtcggcggcttcgaggaccgcatgagcgacgacggcaccgcgagtctggtcggctttggagagggcgctaacagcactgttagtggccccatctaccatcgcagaccgctgcctggcgccgccggtgctgccggggcgtggggcctcgagagaagcgcctcgggactgagtcaggaagcaatgctccgaaaccgcgagatgcgcgatgcccctggcagcgaaacccctgtctcctcttcagccctggccgagagggagcgccgtgaagccaagtatgtcgatggcgtggccatggacggcggtgggcacgtcggcactgcagatgacgacatgttcgtcgataccaccacccgcggacccgtgcccatcccaggtcaaccccacaccagtgctcttcgagagggtgtcggcggtccggccactcgagaggctgctgagcgtatcatccgagaacgcctcgagcagggcgacggtcagggacccgtcatgagtcaagtgcaaggtgacgagaagctcggcaagttctacttcgaggacaagaaataa

SEQ ID NO: 38380 - protein, 387 aa, Muscodor strobelii
  misc_feature: SGI Peptide ID NO. 573333
  misc_feature (1)..(387): NCBI GI: 46138593 Blast Desc: FG10811.1 [Gibberella zeae PH-1]
  misc_feature (1)..(384): NCBI GI: 39969637 Blast Desc: MGG_10428 [Magnaporthe grisea 70-15] gi|145015100|gb|EDJ99668.1| MGG_10428 [Magnaporthe grisea 70-15]
  misc_feature (46)..(365): NCBI GI: 116203417 Blast Desc: CHGG_09592 [Chaetomium globosum CBS 148.51] gi|88175720|gb|EAQ83188.1| CHGG_09592 [Chaetomium globosum CBS 148.51]
  misc_feature (7)..(387): NCBI GI: 154301234 Blast Desc: BC1G_10287 [Botryotinia fuckeliana B05.10] gi|150856188|gb|EDN31380.1| BC1G_10287 [Botryotinia fuckeliana B05.10]
  misc_feature (7)..(387): NCBI GI: 156039529 Blast Desc: SS1G_11901 [Sclerotinia sclerotiorum 1980] gi|154697638|gb|EDN97376.1| SS1G_11901 [Sclerotinia sclerotiorum 1980]
  misc_feature (1)..(330): NCBI GI: 85092612 Blast Desc: NCU02318 [Neurospora crassa OR74A] gi|28920913|gb|EAA30245.1| conserved [Neurospora crassa OR74A]
  misc_feature (7)..(326): NCBI GI: 67524637 Blast Desc: AN2776.2 [Aspergillus nidulans FGSC A4] gi|40744028|gb|EAA63210.1| AN2776.2 [Aspergillus nidulans FGSC A4] gi|259486304|tpe|CBF84036.1| TPA: conserved [Aspergillus FGSC
  misc_feature (9)..(231): NCBI GI: 189200747 Blast Desc: conserved [Pyrenophora tritici-repentis Pt-1C-BFP] gi|187983809|gb|EDU49297.1| conserved [Pyrenophora tritici-repentis Pt-1C-BFP]
  misc_feature (7)..(237): NCBI GI: 242814055 Blast Desc: conserved [Talaromyces stipitatus ATCC 10500] gi|218714632|gb|EED14055.1| conserved [Talaromyces stipitatus ATCC 10500]
  misc_feature (7)..(326): NCBI GI: 145245503 Blast Desc: An11g10620 [Aspergillus niger] gi|134079721|emb|CAK40860.1| protein product [Aspergillus niger]
  misc_feature: Useful for introducing or modulating the production of volatile compounds
MSQPQGTTPMLINIPPPPSNPETPSDMPGTPTSTTTSLSALSTTAIKDGHRGHAHLALGGPRGHGHHPSTHSLEAERADRISRLAGLERVSTVRAPNQPPGAHAGSPQTTPTSTGFPPNAALAPAYFDSNGQPTQRTKMSTVGTASATGSVGARTTTEPGEHLDMDADLTEVDEDGMSTDTNYRTMDVDSTSGAVDAMDEDMTNRSVGGFEDRMSDDGTASLVGFGEGANSTVSGPIYHRRPLPGAAGAAGAWGLERSASGLSQEAMLRNREMRDAPGSETPVSSSALAERERREAKYVDGVAMDGGGHVGTADDDMFVDTTTRGPVPIPGQPHTSALREGVGGPATREAAERIIRERLEQGDGQGPVMSQVQGDEKLGKFYFEDKK

SEQ ID NO: 38381 - DNA, 2219 bp, Muscodor strobelii
  misc_feature: SGI EST ID NO. CUFF.92249.1
  misc_feature: Variant of the nucleotide sequence at SEQ ID NO 38379
actactaatgtttgcaattacctctaggtatatggccatagttcatagtggagtcgataaggcacctgcagctagctacctacgtcatttccagggtagacccgtcccgcatctcgaggacgaggagtcaaagcaatggcgggggacatgtgatgccaaccgaccacttcgtctttacgcctctcgcagtcacattctcatctttatcacaattgtactgccgaaccatccaagaatcattgcgagaccgcgggtagttgagcattggtcttgcgcatcgatcccagacggtttcacaatcaaccaacacgccacacgacgggttctcactggacacaaggtactggaagacacgctggatgcgcttctcccacctcgagcgccgccgcgacagccgtagctagctgcagacgccagccctgaggtcgcccacctgaacaccaaacattcaactcgttgttcctgctttgttgtaaaccgtcccgctgttgacactttgttccggaccgtcccaccatccgaccatcccgcgtaaagacagctgctgtcacccatagcttgcgacaacctaccgcatccatctacgcatccacatcaccagcgacttgcgcctcccgcgaatcccatcaggcaccatgtcgcaaccacagggaaccactcccatgctcatcaacatccccccacccccttctaatcccgagaccccaagcgacatgccgggcactcccacgagcaccaccacttctctgtcggctctgtctaccaccgccatcaaggacggccatcgcggccacgcccatcttgccctcggcggcccacgtggccacggccaccatccttccacccacagcctcgaggccgaacgcgcagaccgcatcagccgtcttgccgggctggagcgtgtctctactgtccgcgccccgaaccagccgccgggcgcccacgccggctcgccccagaccacgcccacctccaccggcttcccgcccaatgctgccctcgcccccgcctacttcgactccaacggacagcccacccagcggaccaagatgagcaccgtcggcacggcctcggccaccggcagcgtcggtgcccgcaccaccaccgagcccggcgagcacctggacatggacgcagacctgaccgaggtcgacgaggacggcatgagcacggataccaactatcggaccatggatgtcgactcgacctcgggcgccgtcgacgccatggacgaagacatgacgaaccgatccgtcggcggcttcgaggaccgcatgagcgacgacggcaccgcgagtctggtcggctttggagagggcgctaacagcactgttagtggccccatctaccatcgcagaccgctgcctggcgccgccggtgctgccggggcgtggggcctcgagagaagcgcctcgggactgagtcaggaagcaatgctccgaaaccgcgagatgcgcgatgcccctggcagcgaaacccctgtctcctcttcagccctggccgagagggagcgccgtgaagccaagtatgtcgatggcgtggccatggacggcggtgggcacgtcggcactgcagatgacgacatgttcgtcgataccaccacccgcggacccgtgcccatcccaggtcaaccccacaccagtgctcttcgagagggtgtcggcggtccggccactcgagaggctgctgagcgtatcatccgagaacgcctcgagcagggcgacggtcagggacccgtcatgagtcaagtgcaaggtgacgagaagctcggcaagttctacttcgaggacaagaaataagtccaatttcggttcttatctttgggccaagatgttgtcttacacggttgtctggaggctgggtgctttacttttgaggcttattttgtgcaacggcgttccggtctggcgggttttgagtttgactacgatatggtagaaatgcggcacactcgctcgctttaatgacatggagcttggcgttagggtccagatttgcacaaaccgccctctgcctgacctgactatcctgtacaattactatgatttgctggtgtgctctcgatcaaatgcgacgaatgatatccttgagaaagacgcagcttgctagcccatccgaagtgtcgagtgtgaaaaagatgcgtctactgtagaataggtacattgcgaaggaatcacgagagacactttatggcacgtatgaataaaatgattttccac

SEQ ID NO: 38382 - DNA, 933 bp, Muscodor strobelii
  misc_feature: SGI cDNA ID NO. 573334
  misc_feature: Reduced expression when VOC is produced
  misc_feature: Encodes the peptide sequence at SEQ ID NO 38383
atgtcatttaaccgtatcgcaatcttcggccataatggatgggcgggctctgctgtgctccgggccctcgcctccaccggcgctccggtcagagtgctccatcgcgccggttccgacctatctcacctccctgcgggtgtcacatcggccgaaatcgacttggatgacccgaagacactcattccagctctcaagaatatcgatattactttatcattcgcggcgcgagaaggcgtgccaaagcaaaaggctttcatccaagccattccgagcacagacgtcaagctgttcgtgccgtcggaccttggcttcaaggtcgacgagcaaggactgcaggtcgccgcgaacaagacgaagaaggaagtggaggatgccgcaaaagccgcaggcgtgcctatcacggtcgtctgggtggggtgcttcaccgaatccgcactggcttttcctatcatgggtgtcgacgtgaagggcaatagactgatcgtcacaggcgacagtctcaagcaacagctgtcatttgcaacacgggactacgtagcagcggcgtatgcgtccatctttgcgcaaacacctcctaaacagcttgcgggccgtcacatagggatctcggagttcaaggccacgggcgaggagatcgctgcagccatgcgggagagaaacggggccgagccgcaggaattctcacacagcttcgacaaggttgacgacgagttaacacgctgtgttgctgccggttccccaaacgctatgagctggcacctacggaaagcttggggcatgggcgagattgtaccaggtattgggaatgatatatgggaagttgatggttacaagaagactacgttgcgtgagctcgtggttgagaataagcttggcacgtacaaggagattccaccccaggtcgagcagctgttctactctgctttccagtag

SEQ ID NO: 38383 - protein, 310 aa, Muscodor strobelii
  misc_feature: SGI Peptide ID NO. 573334
  misc_feature (6)..(231): Pfam Id: PF05368 Pfam Desc: NmrA-like family
  misc_feature (7)..(310): NCBI GI: 119499473 Blast Desc: NmrA-like family protein [Neosartorya fischeri NRRL 181] gi|119414658|gb|EAW24597.1| NmrA-like family protein [Neosartorya fischeri NRRL 181]
  misc_feature (1)..(305): NCBI GI: 238502133 Blast Desc: conserved [Aspergillus flavus NRRL3357] gi|220691110|gb|EED47458.1| conserved [Aspergillus flavus NRRL3357]
  misc_feature (1)..(301): NCBI GI: 255941092 Blast Desc: Pc16g10050 [Penicillium chrysogenum Wisconsin 54-1255] gi|211585938|emb|CAP93675.1| Pc16g10050 [Penicillium chrysogenum Wisconsin 54-1255]
  misc_feature (1)..(297): NCBI GI: 261352990 Blast Desc: conserved [Verticillium albo-atrum VaMs.102]
  misc_feature (1)..(301): NCBI GI: 145242954 Blast Desc: An11g00240 [Aspergillus niger] gi|134078695|emb|CAK48257.1| protein product [Aspergillus niger]
  misc_feature (6)..(259): NCBI GI: 58263470 Blast Desc: [Cryptococcus neoformans var. neoformans JEC21] gi|134108344|ref|XP_777123.1| CNBB3550 [Cryptococcus neoformans var. neoformans B-3501A] gi|50259808|gb|EAL22476.1| CNBB3550 var.
  misc_feature (6)..(252): NCBI GI: 58264160 Blast Desc: CIP1 protein [Cryptococcus neoformans var. neoformans JEC21] gi|134107958|ref|XP_777361.1| CNBB1630 [Cryptococcus neoformans var. neoformans B-3501A] gi|50260051|gb|EAL22714.1|
  misc_feature (3)..(151): NCBI GI: 115383826 Blast Desc: [Aspergillus terreus NIH2624] gi|114196152|gb|EAU37852.1| [Aspergillus terreus NIH2624]
  misc_feature (1)..(212): NCBI GI: 119470615 Blast Desc: NmrA-like family protein [Neosartorya fischeri NRRL 181] gi|119406210|gb|EAW16161.1| NmrA-like family protein [Neosartorya fischeri NRRL 181]
  misc_feature (5)..(151): NCBI GI: 255950178 Blast Desc: Pc22g19530 [Penicillium chrysogenum Wisconsin 54-1255] gi|211592873|emb|CAP99241.1| Pc22g19530 [Penicillium chrysogenum Wisconsin 54-1255]
  misc_feature (4)..(165): SWISSPROT Homolog: EC 1.3.1.45 2'-hydroxyisoflavone reductase
  misc_feature: Useful for introducing or modulating the production of volatile compounds
MSFNRIAIFGHNGWAGSAVLRALASTGAPVRVLHRAGSDLSHLPAGVTSAEIDLDDPKTLIPALKNIDITLSFAAREGVPKQKAFIQAIPSTDVKLFVPSDLGFKVDEQGLQVAANKTKKEVEDAAKAAGVPITVVWVGCFTESALAFPIMGVDVKGNRLIVTGDSLKQQLSFATRDYVAAAYASIFAQTPPKQLAGRHIGISEFKATGEEIAAAMRERNGAEPQEFSHSFDKVDDELTRCVAAGSPNAMSWHLRKAWGMGEIVPGIGNDIWEVDGYKKTTLRELVVENKLGTYKEIPPQVEQLFYSAFQ

SEQ ID NO: 38384 - DNA, 1340 bp, Muscodor strobelii
  misc_feature: SGI EST ID NO. CUFF.92236.0
  misc_feature: Variant of the nucleotide sequence at SEQ ID NO 38382
gtttaataactccgttgtatcacgggtagacgatagtgttcccgaatcttatgcgaggtgcgagtccgaaataggcgtggccttcttcgaagttatataaaacgccaagagtgggaacaagatggacagttattcaagacagacacgaattcttcgaggatctagacatatatatctctcattttcaacattcatacttgaataatagtaaagtaagcagctaggtaccatgtcatttaaccgtatcgcaatcttcggccataatggatgggcgggctctgctgtgctccgggccctcgcctccaccggcgctccggtcagagtgctccatcgcgccggttccgacctatctcacctccctgcgggtgtcacatcggccgaaatcgacttggatgacccgaagacactcattccagctctcaagaatatcgatattactttatcattcgcggcgcgagaaggcgtgccaaagcaaaaggctttcatccaagccattccgagcacagacgtcaagctgttcgtgccgtcggaccttggcttcaaggtcgacgagcaaggactgcaggtcgccgcgaacaagacgaagaaggaagtggaggatgccgcaaaagccgcaggcgtgcctatcacggtcgtctgggtggggtgcttcaccgaatccgcactggcttttccgtaagtcttgctatcaacgcaactttgtaactaccgaagtgctgatcatccctcattttagtatcatgggtgtcgacgtgaagggcaatagactgatcgtcacaggcgacagtctcaagcaacagctgtcatttgcaacacgggactacgtagcagcggcgtatgcgtccatctttgcgcaaacacctcctaaacagcttgcgggccgtcacatagggatctcggagttcaaggccacgggcgaggagatcgctgcagccatgcgggagagaaacggggccgagccgcaggaattctcacacagcttcgacaaggttgacgacgagttaacacgctgtgttgctgccggttccccaaacgctatgagctggcacctacggaaagcttggggcatgggcgagattgtaccaggtattgggaatgatatatgggaagttgatggttacaagaagactacgttgcgtgagctcgtggttgagaataagcttggcacgtacaaggagattccaccccaggtcgagcagctgttctactctgctttccagtagtctagacgataacgtagcgatcttgtataatagacgggacatcaacgtcaatatcagcagttcgcaacccacttctagaatattcgtttggttttttcatctcatgctgtacttttg

SEQ ID NO: 38385 - DNA, 416 bp, Muscodor strobelii
  misc_feature: SGI cDNA ID NO. 573335
  misc_feature: Reduced expression when VOC is produced
  misc_feature: Encodes the peptide sequence at SEQ ID NO 38386
atggacccgtattccactaatggcccgcggcaacagccgccgccgcagcaacaccaccaccaccagcgccgtataagcctggaagacgtgccaccccagggcaatcagatgcaaaccggactgcaacaccggcgcaacaattcgcgcttcgacacgcacgacgacttctacgacttcctcgacaagaaccgcggccccaaaatctccaacggcggcccagcccccaccacgacggccaaccacgctgcgcccatgcaacagccaccgcagccgtcgtcgccccggatgcagctaccacagcagcagcagcagcagcagtcgcagcagcgaatgccgcctcccaaccagagccagagcagaccgcccgtcacaaacaacttccctgatcggtcgcgcccaccctcgtacgccggcag

SEQ ID NO: 38386 - protein, 138 aa, Muscodor strobelii
  misc_feature: SGI Peptide ID NO. 573335
  misc_feature: Useful for introducing or modulating the production of volatile compounds
MDPYSTNGPRQQPPPQQHHHHQRRISLEDVPPQGNQMQTGLQHRRNNSRFDTHDDFYDFLDKNRGPKISNGGPAPTTTANHAAPMQQPPQPSSPRMQLPQQQQQQQSQQRMPPPNQSQSRPPVTNNFPDRSRPPSYAG

SEQ ID NO: 38387 - DNA, 619 bp, Muscodor strobelii
  misc_feature: SGI EST ID NO. CUFF.92179.0
  misc_feature: Variant of the nucleotide sequence at SEQ ID NO 38385
ttcgtatcgcgctcgggaccagcctcccgggattttggacgaccaagggttaaaaacggcaagagggcaaacatcagatcagtcggatgagcatgcaatccgatttaagttgactttagctagtcttgcgtagcgactgatcaactctcacttttcgacccgtgtcttttctttgtcccaccccagagcgcacccgataggtaacatggacccgtattccactaatggcccgcggcaacagccgccgccgcagcaacaccaccaccaccagcgccgtataagcctggaagacgtgccaccccagggcaatcagatgcaaaccggactgcaacaccggcgcaacaattcgcgcttcgacacgcacgacgacttctacgacttcctcgacaagaaccgcggccccaaaatctccaacggcggcccagcccccaccacgacggccaaccacgctgcgcccatgcaacagccaccgcagccgtcgtcgccccggatgcagctaccacagcagcagcagcagcagcagtcgcagcagcgaatgccgcctcccaaccagagccagagcagaccgcccgtcacaaacaacttccctgatcggtcgcgcccaccctcgtacgccggc

SEQ ID NO: 38388 - DNA, 630 bp, Muscodor strobelii
  misc_feature: SGI cDNA ID NO. 573336
  misc_feature: Encodes the peptide sequence at SEQ ID NO 38389
atgtcaccatttggaagcaccgaaccgacgcaacagggaacgtccctgaacctggtcttcgactgcgaagacttggaccatttgacaggtcagatagtaaatcaatggatttgggaagctgcacctcgctccagacacgtcgacgatcgtatcgtcccgcgtgcagtccgttcgttgagttcggcagatcaatacaaaatctcttctatccttacgatcagagatgaggacatggccgaaagggtcaagaaactcctcggtctgaaacttcgtgaatatgtggaagtcaaagccagactcgtctctttactcgtcgcttgggaacataatcctcgagacgggtctttgcgctttccggatatcgattggacggcatcttgtaaacctatcccgaccgacgacctcgaatattcgcaccaacgcaagcttgcggaagaggcgacggagagtaaagacggagaggaagagagaccgtctcgcctcgtggactgcaatatggcagcggctggcctagccgccaaggctgttcgtatacaaaacggtaaagccaagtgggcggacttcggccctaacgaccacataccctaccccatcgaaccaacgccaaccgaccctatgcgcaaattctaa

SEQ ID NO: 38389 - protein, 209 aa, Muscodor strobelii
  misc_feature: SGI Peptide ID NO. 573336
MSPFGSTEPTQQGTSLNLVFDCEDLDHLTGQIVNQWIWEAAPRSRHVDDRIVPRAVRSLSSADQYKISSILTIRDEDMAERVKKLLGLKLREYVEVKARLVSLLVAWEHNPRDGSLRFPDIDWTASCKPIPTDDLEYSHQRKLAEEATESKDGEEERPSRLVDCNMAAAGLAAKAVRIQNGKAKWADFGPNDHIPYPIEPTPTDPMRKF

SEQ ID NO: 38390 - DNA, 525 bp, Muscodor strobelii
  misc_feature: SGI cDNA ID NO. 573339
  misc_feature: Encodes the peptide sequence at SEQ ID NO 38391
atggatcaaccgctcaatacccgtacggtcacgggtctggacgaaggactggtcgaatttggacttgaaccatttcacccgatcttcgatatcccagacagcgaatcgtcagcgccaagcgatggtatctaccctttagaaagcatttttggctttgattctgagtcgatgttcctaaccggagctgacggcatctccctgatgacgaatgaagccgaagcgacatatcttgctcttcttgcaagcagcagcgatatcatcaccggtagcgaaggagagctcgaaggcattggcgacgtggggatcgcagatcacaaggcggcctgtgcagctctcgatgttctcgaagacctgcctgcccctgggtcgcccattgccaacagaaagagatgtagtaagcagcacagcggtcgaaaagccaagaaaagaagggctgggaacattctatacgactcgaacccgaatctgagggcgattgcgatcgacgtgcgctctggagacaaaatcatcaagcaccgttggtag

SEQ ID NO: 38391 - protein, 174 aa, Muscodor strobelii
  misc_feature: SGI Peptide ID NO. 573339
MDQPLNTRTVTGLDEGLVEFGLEPFHPIFDIPDSESSAPSDGIYPLESIFGFDSESMFLTGADGISLMTNEAEATYLALLASSSDIITGSEGELEGIGDVGIADHKAACAALDVLEDLPAPGSPIANRKRCSKQHSGRKAKKRRAGNILYDSNPNLRAIAIDVRSGDKIIKHRW

SEQ ID NO: 38392 - DNA, 1447 bp, Muscodor strobelii
  misc_feature: SGI EST ID NO. CUFF.92203.0
  misc_feature: Variant of the nucleotide sequence at SEQ ID NO 38390
gcgggagtgtgtaggctgttacagcagcggcctatctctggactacaggcttgaaggtggtctgaatatcctctaatggtattatcaagacttgagagtctttgaccatatcgtgtttaatgagaacgagcctcctggggtgacgagacaagaacggcgtcggcgtggtaaaaagtggtcgcgtatcgcactgcaacaaagcctgctaggggctaatgagaggtcacatcggctaggcagctattagttcatatatgaaaatgtctagacacttaacttgaaagagtagccctgtctggcaagtgtcgaattttcgtccctgcgtaccatcatatgctacaccccgagtcattcgttctaatcgtagggtgcatcacgattgtagtgactttgaaatatccagaggacactttggcgtcggtcgccgaggaagcgcttatatctaatgaactgctcgcagtccgctccacacagcgagacagcttgtcagactctctcattcatagagcaccgcagctcattctagtctctcgcaagtgcctggaggagcacccaccggatcgtccagcagagagtacgtaactcgcaactaagtatgcccatcgtgcgatgatatgatgctacgtggcttgctttgtccttttgtacagcgaagcagggcctcggaggcagtgctggtcatggccctcgccgacgggattatacaagctacacgtcgccctcgcctggctgccgccctcttcacctccttctcttcatacaaatttcatacaatatcgtcttctctgcaccaacatctttacttcacccatggatcaaccgctcaatacccgtacggtcacgggtctggacgaaggactggtcgaatttggacttgaaccatttcacccgatcttcgatatcccagacagcgaatcgtcagcgccaagcgatggtatctaccctttagaaagcatttttggctttgattctgagtcgatgttcctaaccggagctgacggcatctccctgatgacgaatgaagccgaagcgacatatcttgctcttcttgcaagcagcagcgatatcatcaccggtagcgaaggagagctcgaaggcattggcgacgtggggatcgcagatcacaaggcggcctgtgcagctctcgatgttctcgaagacctgcctgcccctgggtcgcccattgccaacagaaagagatgtagtaagcagcacagcggtcgaaaagccaagaaaagaagggctgggaacattctatacgactcgaacccgaatctgagggcgattgcgatcgacgtgcgctctggagacaaaatcatcaagcaccgttggtagagcatctctggttcatcacacaggccatgcgtctgtaggttcgcctgccgatattaaatctcctccacctgtcatgaaagagtcagtcggcactggttaaaaaaagggcaaa

SEQ ID NO: 38393 - DNA, 1608 bp, Muscodor strobelii
  misc_feature: SGI cDNA ID NO. 573340
  misc_feature: Encodes the peptide sequence at SEQ ID NO 38394
atgaagtcagaggatgagcctgatataacagatcaccctatttttcgaaatgattcaccgacgtcggtctattcggacgacgtgaagctcgtaccgccaccacggagacccgaactagtcaccgctgcgccgccgccgaggttgtcgcaaagagcgctcctccagctcgacagctctccggggatccctctactagttgaccattgcgccatcttgcccgtggcgcttcccacgatcgcgaaggagctcgaaggctccgccctgcaggcattctgggcaggaaatgcctccctcctcgcctcggcggcctctcaactcctgtggcgagagattgctggcgtgaccgggcagaagcagactatgctggctgctttattgcttgtcgcaggaggcaatggttttgccctatttccaatttcctctagcttcgcgatctttttgttggcccgcagtgtacatggtgttggccaaggaggaatcgtatctctctcccaggtgatcctgattactcgtgtgtccttagataagcgggagcgatgttccaagttcttgatgctcccatgggctgtaggtatcgcagtgtctcctatcatcagcggtattctcgcccaggccggcagctggcgttggatcttctcgactacaatacctctgtgtctagtaactctgccgattgttttcttctcctttaaacccgacagaggccgcccggtcgagaaacgcaagctcacggacattgactggctcggttatgctattattatagtgtcggctatcctcctcatagtccctctctcgtggggcggcgtcatgtatgactgggatgcttgggaaaccctggtgcctctgacactaggagtctcgggctttctgtgttcagtgaaacttaccctttaccgtcccaagcggaggttcatgcggtcttacctgcatctagcagccttggcaaaagctgctcacgcccttgcattcgtccaaggcgtcgtattcgcttgtctcctctactccttccctctgtacttccaagcagtgagagggtatgccgttgctatctccgggacggctctcctattcttccttagcccggacgcgtctacgccgatccaggtgttcatcgaggcggtcgttggtctcggccttggcatcgcatggagtgtaagaagctttgccgctcggacatcaccagacagagaagagctaccatccgtagatgagttgcacgtcttctttcaatcagcaggtctgactgtaggtgttactatctgtggcgttatattcttaagctcatttaagatgattgtccgagagaatgctctatacgcgccgttcgcccaagaatggaccgatcgtgctttggtcttagtcggaatgctcaacgacctaaccgccgcccaagatcgagacatccggatctttctcatgtcgggcttcggcgagagtctgaaagttgtctggttagtcgtttcggtattttgtgccgccggtgctctggtctatctgatatgtgctcagaagcaagcgaccgacccagcgagaaaacgagactctcaatccggcagcttgagctcgtctcatctccagtttcatccggttccctactgggtatga

SEQ ID NO: 38394 - protein, 535 aa, Muscodor strobelii
  misc_feature: SGI Peptide ID NO. 573340
  misc_feature (47)..(395): Pfam Id: PF07690 Pfam Desc: Major Facilitator Superfamily
  misc_feature (70)..(359): Pfam Id: PF07690 Pfam Desc: Major Facilitator Superfamily
  misc_feature (1)..(515): NCBI GI: 212538817 Blast Desc: MFS multidrug transporter, [Penicillium marneffei ATCC 18224] gi|210069306|gb|EEA23397.1| MFS multidrug transporter, [Penicillium marneffei ATCC 18224]
  misc_feature (6)..(500): NCBI GI: 156056404 Blast Desc: SS1G_05556 [Sclerotinia sclerotiorum 1980] gi|154703338|gb|EDO03077.1| SS1G_05556 [Sclerotinia sclerotiorum 1980]
  misc_feature (71)..(515): NCBI GI: 154302704 Blast Desc: BC1G_09467 [Botryotinia fuckeliana B05.10] gi|150855214|gb|EDN30406.1| BC1G_09467 [Botryotinia fuckeliana B05.10]
  misc_feature (47)..(519): NCBI GI: 242820296 Blast Desc: MFS multidrug transporter, [Talaromyces stipitatus ATCC 10500] gi|218713948|gb|EED13372.1| MFS multidrug transporter, [Talaromyces stipitatus ATCC 10500]
  misc_feature (72)..(519): NCBI GI: 67525613 Blast Desc: AN3264.2 [Aspergillus nidulans FGSC A4] gi|40743983|gb|EAA63165.1| AN3264.2 [Aspergillus nidulans FGSC A4] gi|259485769|tpe|CBF83072.1| TPA: MFS multidrug transporter,
  misc_feature (26)..(517): NCBI GI: 119467438 Blast Desc: MFS transporter, [Neosartorya fischeri NRRL 181] gi|119405677|gb|EAW15628.1| MFS transporter, [Neosartorya fischeri NRRL 181]
  misc_feature (72)..(500): NCBI GI: 169777863 Blast Desc: [Aspergillus oryzae RIB40] gi|83772134|dbj|BAE62264.1| protein product [Aspergillus oryzae]
  misc_feature (26)..(517): NCBI GI: 70984475 Blast Desc: MFS multidrug transporter [Aspergillus fumigatus Af293] gi|66845371|gb|EAL85706.1| MFS multidrug transporter, [Aspergillus fumigatus Af293] gi|159122527|gb|EDP47648.1| MFS
  misc_feature (72)..(518): NCBI GI: 238840127 Blast Desc: conserved [Microsporum canis CBS 113480]
  misc_feature (72)..(519): NCBI GI: 258578029 Blast Desc: conserved [Uncinocarpus reesii 1704] gi|237903462|gb|EEP77863.1| conserved [Uncinocarpus reesii 1704]
MKSEDEPDITDHPIFRNDSPTSVYSDDVKLVPPPRRPELVTAAPPPRLSQRALLQLDSSPGIPLLVDHCAILPVALPTIAKELEGSALQAFWAGNASLLASAASQLLWREIAGVTGQKQTMLAALLLVAGGNGFALFPISSSFAIFLLARSVHGVGQGGIVSLSQVILITRVSLDKRERCSKFLMLPWAVGIAVSPIISGILAQAGSWRWIFSTTIPLCLVTLPIVFFSFKPDRGRPVEKRKLTDIDWLGYAIIIVSAILLIVPLSWGGVMYDWDAWETLVPLTLGVSGFLCSVKLTLYRPKRRFMRSYLHLAALAKAAHALAFVQGVVFACLLYSFPLYFQAVRGYAVAISGTALLFFLSPDASTPIQVFIEAVVGLGLGIAWSVRSFAARTSPDREELPSVDELHVFFQSAGLTVGVTICGVIFLSSFKMIVRENALYAPFAQEWTDRALVLVGMLNDLTAAQDRDIRIFLMSGFGESLKVVWLVVSVFCAAGALVYLICAQKQATDPARKRDSQSGSLSSSHLQFHPVPYWV

SEQ ID NO: 38395 - DNA, 762 bp, Muscodor strobelii
  misc_feature: SGI cDNA ID NO. 573341
  misc_feature: Encodes the peptide sequence at SEQ ID NO 38396
atggcgttcagactccccatcaaacagccaaatgctacctactttctctacattgtcgcgacgattgtcgtgctaggcttttcgattactatgctcgcgagacctggtaatagctcaaggggcattgtatccgtcaagttcccgaccttgaaaaccagagagttctcctttcccgattctttagagaccgcagtggaaggcgcaacttctctcttcaacctcggtacattgatcgacagcgccgcggcacaggctaccgccgccgtgaccagcgccattggatccgtcgagtcacaaatcgccggcgcactgccggaaaacatcacggtcggggttagagaggtctgcgtgggatcccgttcgcaattcgagtgcagccctctccctctaaagggatcttcgcaagtcggttctcaattcccgcttctccttttcattttgggtatttttcagtatgtcccgtcactcgggacgcttatcattattggcactgtatttacggctttgtctgccgtgattggaatattcgtgggtttgaaatctcccttggctctgccgtgcttgttactatcgaacttcatttcgctagtcttctactctctttctggtctctacgtagctatcatctatagtatcggttctgcactgtcggggttggcgggcacggtctcggagcgaggggaggtcgtcaccggatcacttggtgctatcatagcatgccttgctgcattcgtgcttggcttgatcgcagtatttctttag

SEQ ID NO: 38396 - protein, 253 aa, Muscodor strobelii
  misc_feature: SGI Peptide ID NO. 573341
MAFRLPIKQPNATYFLYIVATIVVLGFSITMLARPGNSSRGIVSVKFPTLKTREFSFPDSLETAVEGATSLFNLGTLIDSAAAQATAAVTSAIGSVESQIAGALPENITVGVREVCVGSRSQFECSPLPLKGSSQVGSQFPLLLFILGIFQYVPSLGTLIIIGTVFTALSAVIGIFVGLKSPLALPCLLLSNFISLVFYSLSGLYVAIIYSIGSALSGLAGTVSERGEVVTGSLGAIIACLAAFVLGLIAVFL

SEQ ID NO: 38397 - DNA, 1014 bp, Muscodor strobelii
  misc_feature: SGI cDNA ID NO. 573342
  misc_feature: Encodes the peptide sequence at SEQ ID NO 38398
atggaatcagggttgaacttcctgaattgggctgaactacgtgattgcgaaccatatgtgttcattaccctgttcctcggcaagatcgtggagcagttcgatgaatctgcagataaagcccagggatcgattctgaaaacatatgaaaacgctctggtttctctttcagagaaagtgaacgagtatacaaagaatgcgcaggtcgaggacattgcctttaaccaggaaaagggcctcttccaagagatcaatgttcttagagaagaactatcaatgattaaatcaatacacgctgaacaattggaagtatggaacgagtatatgcatgtggttaaatcaaaccgacatcgtgggggagaacagcaacgagcctcggccacagaaactacacaggggagaaattctagcagaagtgagtctcatggcccttttgaacgcctggagggtagcgaaagtgagaccacgaaggtacagaaccgaaggacacgggcaaaactcgacaaatatagacggcgaatcgagaaacttgaagcagatgcggagagagttgagcataacatatcaacaattctagatctccaacaaaagcacgctactatcaaagaagcccactcgacagctatcctgagcgcgacagtttttggattcactatcatcacggtcatcttcacccccttatcgtttgttgttgcacttttcgcactcccaatcgacatgtttaagaaagggaaatacgggatggataacgcagataacgttttttattccagctatataggtaaatggacagctattaccgaaattgtttcgattgccgtaactttggtagcaatatgggctgcgctgcgctttgcaaaccttcatgtctggggaaagaaaggattgcgcaaatccattcggcaaaaggcaaagagcgtgagagagaaagaacaaggcaagacaacgagcatgcattcttccagtggtggaaatcgtagatccgaccttgagcaaggaacaggtggatctcgttaa

SEQ ID NO: 38398 - protein, 337 aa, Muscodor strobelii
  misc_feature: SGI Peptide ID NO. 573342
  misc_feature (45)..(336): NCBI GI: 169613761 Blast Desc: SNOG_10013 [Phaeosphaeria nodorum SN15] gi|111061228|gb|EAT82348.1| SNOG_10013 [Phaeosphaeria nodorum SN15]
  misc_feature (71)..(315): NCBI GI: 255941688 Blast Desc: Pc16g13140 [Penicillium chrysogenum Wisconsin 54-1255] gi|211586236|emb|CAP93984.1| Pc16g13140 [Penicillium chrysogenum Wisconsin 54-1255]
  misc_feature (71)..(278): NCBI GI: 119495022 Blast Desc: ankyrin repeat protein [Neosartorya fischeri NRRL 181] gi|119412469|gb|EAW22410.1| ankyrin repeat protein [Neosartorya fischeri NRRL 181]
  misc_feature (17)..(292): NCBI GI: 169617431 Blast Desc: SNOG_11894 [Phaeosphaeria nodorum SN15] gi|111059818|gb|EAT80938.1| SNOG_11894 [Phaeosphaeria nodorum SN15]
  misc_feature (71)..(278): NCBI GI: 70996130 Blast Desc: ankyrin repeat protein [Aspergillus fumigatus Af293] gi|66850455|gb|EAL90782.1| ankyrin repeat protein [Aspergillus fumigatus Af293] gi|159131573|gb|EDP56686.1| ankyrin repeat
  misc_feature (45)..(237): NCBI GI: 169615727 Blast Desc: SNOG_11027 [Phaeosphaeria nodorum SN15] gi|160703031|gb|EAT81526.2| SNOG_11027 [Phaeosphaeria nodorum SN15]
  misc_feature (71)..(296): NCBI GI: 121701093 Blast Desc: ankyrin repeat protein [Aspergillus clavatus NRRL 1] gi|119396954|gb|EAW07385.1| ankyrin repeat protein [Aspergillus clavatus NRRL 1]
  misc_feature (31)..(278): NCBI GI: 115492215 Blast Desc: conserved [Aspergillus terreus NIH2624] gi|114197595|gb|EAU39295.1| conserved [Aspergillus terreus NIH2624]
  misc_feature (71)..(278): NCBI GI: 145230782 Blast Desc: An01g12480 [Aspergillus niger] gi|134055776|emb|CAK37300.1| protein product [Aspergillus niger]
  misc_feature (166)..(278): NCBI GI: 169612041 Blast Desc: SNOG_09135 [Phaeosphaeria nodorum SN15] gi|160702424|gb|EAT83327.2| SNOG_09135 [Phaeosphaeria nodorum SN15]
MESGLNFLNWAELRDCEPYVFITLFLGKIVEQFDESADKAQGSILKTYENALVSLSEKVNEYTKNAQVEDIAFNQEKGLFQEINVLREELSMIKSIHAEQLEVWNEYMHVVKSNRHRGGEQQRASATETTQGRNSSRSESHGPFERLEGSESETTKVQNRRTRAKLDKYRRRIEKLEADAERVEHNISTILDLQQKHATIKEAHSTAILSATVFGFTIITVIFTPLSFVVALFALPIDMFKKGKYGMDNADNVFYSSYIGKWTAITEIVSIAVTLVAIWAALRFANLHVWGKKGLRKSIRQKAKSVREKEQGKTTSMHSSSGGNRRSDLEQGTGGSR

SEQ ID NO: 38399 - DNA, 972 bp, Muscodor strobelii
  misc_feature: SGI cDNA ID NO. 573343
  misc_feature: Encodes the peptide sequence at SEQ ID NO 38400
atgagcggcgatagagccagaaactcatttcagctctctctccactcaaaagccccactgcgccagtcggcgcccctcaacctaccgacgcaccttatcgtttcagtctctgtttcttcgtcgacttgcatcattgcaacttgctctaaacacatcacagaacatagtgcgaggtactcgcaagcaacgggaagccgagcggctcgacgcatcggcgagctgcgaaagcacctgaaagagactttcaaattctacgaaggctatgtgccttcattccattactgggtcaatgacccatggtcaaaccttaacattgcacttaaagacctcgaaattcgcgttcgagatatcattatccggagtgctgatgacaaaacgatcatgggcgtgccaatcggccgcgacgggctgctcgcagagctggaagctgagacgataccctacacaccgagagaacttctcaaatttgccgaaaaagagtacgcctgctgcgaaaaggaaatgaaagccgcagcatcctcgctaaattacccatcctggcgcgacgcgctggagcacgtcaagaatcaatacgagccaccccaaacacacataacctacgtccgaagtctcgtcgaagaaagctcctcatacgttaaagaacgtaatctcgtcaccgtacctacacttgcagaagagacaataagaataacgcgtatctcgcccaaaaaacaactggtctcgccattcttcctcggcggcacgagattacgagttgcgtacccccgagaagatatgaagcacgaagataagatgatgacactccgtggcaacaatcggtcattcagtcgcgctacagcattccatgaaatggtaccaggacaccgtcttcaaatgtacatcggtgcccgttcgcgcccttatcgcgcagcgttgttcagtacaccattttacgtcgaaggttgggcactgtactgggagatggttttctag

SEQ ID NO: 38400 - protein, 323 aa, Muscodor strobelii
  misc_feature: SGI Peptide ID NO. 573343
  misc_feature (32)..(323): NCBI GI: 256729030 Blast Desc: NECHADRAFT_39842 [Nectria haematococca mpVI 77-13-4]
  misc_feature (66)..(323): NCBI GI: 240107379 Blast Desc: X-Pro dipeptidyl-peptidase, [Coccidioides posadasii C735 delta SOWgp]
  misc_feature (66)..(323): NCBI GI: 119190961 Blast Desc: CIMG_05528 [Coccidioides immitis RS]
  misc_feature (38)..(323): NCBI GI: 46105140 Blast Desc: FG00198.1 [Gibberella zeae PH-1]
  misc_feature (37)..(323): NCBI GI: 256732353 Blast Desc: [Nectria haematococca mpVI 77-13-4]
  misc_feature (45)..(323): NCBI GI: 258564961 Blast Desc: [Uncinocarpus reesii 1704] gi|237906926|gb|EEP81327.1| [Uncinocarpus reesii 1704]
  misc_feature (67)..(323): NCBI GI: 126646474 Blast Desc: X-Pro dipeptidyl-peptidase [Algoriphagus sp. PR1] gi|126578106|gb|EAZ82326.1| X-Pro dipeptidyl-peptidase [Algoriphagus sp. PR1]
  misc_feature (45)..(321): NCBI GI: 83814606 Blast Desc: X-Pro dipeptidyl-peptidase [Salinibacter ruber DSM 13855] gi|83756000|gb|ABC44113.1| X-Pro dipeptidyl-peptidase [Salinibacter ruber DSM 13855]
  misc_feature (52)..(323): NCBI GI: 256424545 Blast Desc: protein of function DUF885 [Chitinophaga pinensis DSM 2588] gi|256039453|gb|ACU62997.1| protein of function DUF885 [Chitinophaga pinensis DSM 2588]
  misc_feature (67)..(323): NCBI GI: 255035232 Blast Desc: protein of function DUF885 [Dyadobacter fermentans DSM 18053] gi|254947988|gb|ACT92688.1| protein of function DUF885 [Dyadobacter fermentans DSM 18053]
MSGDRARNSFQLSLHSKAPLRQSAPLNLPTHLIVSVSVSSSTCIIATCSKHITEHSARYSQATGSRAARRIGELRKHLKETFKFYEGYVPSFHYWVNDPWSNLNIALKDLEIRVRDIIIRSADDKTIMGVPIGRDGLLAELEAETIPYTPRELLKFAEKEYACCEKEMKAAASSLNYPSWRDALEHVKNQYEPPQTHITYVRSLVEESSSYVKERNLVTVPTLAEETIRITRISPKKQLVSPFFLGGTRLRVAYPREDMKHEDKMMTLRGNNRSFSRATAFHEMVPGHRLQMYIGARSRPYRAALFSTPFYVEGWALYWEMVF

SEQ ID NO: 38401 - DNA, 1157 bp, Muscodor strobelii
  misc_feature: SGI cDNA ID NO. 573344
  misc_feature: Encodes the peptide sequence at SEQ ID NO 38402
atgtctagcgctccggagtctttatggacgcttccacaggctcgtcacatttcgtacttgactctccgaatctttcacaagaagaacatcacgcaaaggaccgtagaatggttcctaaatgctctctggcccgagggtatctcacatgccatacgtcaactgcgcgatgttcaacctgtaaccctattagatgaagctacggagtgtcgtattgcctgtagagagcagagggagcggacgattcgtgaagctctcgtccagcaggttctggataccaaccacattacccctgctatattaaaggggctagtgacggctctcgatacttcggccctagcttgcgaccgaacgaccatgcactatataaaggctcgatggacactacgtcaggcatatgacattctccacgttagcaatcgggtccaacgcgaaaaagacgtaacaccagaaacaatggactggttcatccactctctatggccaggaggctttcctccagtatcgacgaatcattacgatataccatctgcctcaactatcggcaatgctatcaaacctcagactagctccgagattcgcaaggctttcgttcagcgagttttaggagtcacccaaataaacgactcggtcttggactggctacacgcagctatattcggcaccggaaaaatagcatccccttcattcaacaacggaggttcatttggtgcatttagtagtgacgaggatgaccccgatacgggggacgatgaaacgcttgaaaataagactattggcgatgagagcccttctctatatggcgaatattgccctacgccacgcatttgcggtccagcagacagcgaaccagccgactccgagaaggaaaatgaaggatcataccaaccagctgcgagctttgacacatggaattcacgaagtataacgccgagtaacaagacattggatattgctgcagcttcaacaacaggaaatacgagccgagatctggaggcagctcactgtctttcacaagttttgcaaggcgaagcgccggccgcggccgaacctgcttctgagatagagagtgatatgtctgaggacagcacgcctagcaaactccttacatcagtcgcaaagagaagccggtcgcatagcgacagcagcgacgacgatgg

SEQ ID NO: 38402 - protein, 385 aa, Muscodor strobelii
  misc_feature: SGI Peptide ID NO. 573344
MSSAPESLWTLPQARHISYLTLRIFHKKNITQRTVEWFLNALWPEGISHAIRQLRDVQPVTLLDEATECRIACREQRERTIREALVQQVLDTNHITPAILKGLVTALDTSALACDRTTMHYIKARWTLRQAYDILHVSNRVQREKDVTPETMDWFIHSLWPGGFPPVSTNHYDIPSASTIGNAIKPQTSSEIRKAFVQRVLGVTQINDSVLDWLHAAIFGTGKIASPSFNNGGSFGAFSSDEDDPDTGDDETLENKTIGDESPSLYGEYCPTPRICGPADSEPADSEKENEGSYQPAASFDTWNSRSITPSNKTLDIAAASTTGNTSRDLEAAHCLSQVLQGEAPAAAEPASEIESDMSEDSTPSKLLTSVAKRSRSHSDSSDDD

SEQ ID NO: 38403 - DNA, 174 bp, Muscodor strobelii
  misc_feature: SGI EST ID NO. CUFF.92252.0
  misc_feature: Variant of the nucleotide sequence at SEQ ID NO 38401
ccgagatctggaggcagctcactgtctttcacaagttttgcaaggcgaagcgccggccgcggccgaacctgcttctgagatagagagtgatatgtctgaggacagcacgcctagcaaactccttacatcagtcgcaaagagaagccggtcgcatagcgacagcagcgacgacga

SEQ ID NO: 38404 - DNA, 981 bp, Muscodor strobelii
  misc_feature: SGI cDNA ID NO. 573345
  misc_feature: Encodes the peptide sequence at SEQ ID NO 38405
atgacagctcgatttaaaaatccacctttcgcattagcccatgagctagtacaaggaaatctccgagatccccatgcgacggcgccatctatccctggttaccctagagtcccactacgggaccgctcccgggtggacgagtttgtcgccgaggatctgtgctccccagacttggatcgcatggcagataagctatggtggatgtcgaaacaagatagcagcagcatctcgccgctccaccggcagctggtcaaacggcgcgccatcgttgtgacggaggatcccaagcttcatcttgtgtggatatacgaccacattttcgtcaaaccgctaccacgctacatcctgtcgcacgccttctggcaggattatctttgtggagatgacaagaaccgcctcaacagggcagccctaggtttcgtgcggaagtattcccatttgatcagatatgaatcggactttcgcatcgctcaggaccccagcttacagctgatcccacgccacataacttgggaacaattctgcaacttcaccatcgcgtttgccgacatcgaagaccgcgacgtttctcctcgctatgcgttcggtgagatccgacttacaaggctgaacttctatgcttcattgctgctcggaagatcgcacttccaacgcgtccagtaccagtatagagcttacttcgctcagttctacgggccccttcttttcttcatcggtattacatccgtgtttctcggtgcgttccaggtgtgggtttctgtgaagcaaacccagggcgcctctatcttctcggacctagcgtttgggttcagcacagtcgtcatcgttttgttcttgctcgtctttgcagtgctttgcgggacctgggtttggaaagtcgctaaggaatggaggttcgccatctatgaccgcctacatctgctagaagaaggacggaccattggagcaaatggcgacacgagaataagctcgccacgatag

SEQ ID NO: 38405 - protein, 326 aa, Muscodor strobelii
  misc_feature: SGI Peptide ID NO. 573345
  misc_feature (7)..(312): NCBI GI: 240107130 Blast Desc: CPC735_019210 [Coccidioides posadasii C735 delta SOWgp]
  misc_feature (4)..(310): NCBI GI: 261356090 Blast Desc: conserved [Verticillium albo-atrum VaMs.102]
  misc_feature (4)..(313): NCBI GI: 67541264 Blast Desc: AN6802.2 [Aspergillus nidulans FGSC A4] gi|40739011|gb|EAA58201.1| AN6802.2 [Aspergillus nidulans FGSC A4] gi|259480397|tpe|CBF71489.1| TPA: [Aspergillus nidulans FGSC
  misc_feature (9)..(281): NCBI GI: 46119340 Blast Desc: FG04765.1 [Gibberella zeae PH-1]
  misc_feature (31)..(305): NCBI GI: 255940988 Blast Desc: Pc16g09490 [Penicillium chrysogenum Wisconsin 54-1255] gi|211585886|emb|CAP93619.1| Pc16g09490 [Penicillium chrysogenum Wisconsin 54-1255]
  misc_feature (31)..(287): NCBI GI: 255934895 Blast Desc: Pc13g00200 [Penicillium chrysogenum Wisconsin 54-1255] gi|211583094|emb|CAP91089.1| Pc13g00200 [Penicillium chrysogenum Wisconsin 54-1255]
  misc_feature (6)..(301): NCBI GI: 156047589 Blast Desc: SS1G_09521 [Sclerotinia sclerotiorum 1980] gi|154693916|gb|EDN93654.1| SS1G_09521 [Sclerotinia sclerotiorum 1980]
  misc_feature (6)..(320): NCBI GI: 154316195 Blast Desc: BC1G_03683 [Botryotinia fuckeliana B05.10] gi|150846469|gb|EDN21662.1| BC1G_03683 [Botryotinia fuckeliana B05.10]
  misc_feature (31)..(274): NCBI GI: 255934969 Blast Desc: Pc13g00640 [Penicillium chrysogenum Wisconsin 54-1255] gi|211583131|emb|CAP91133.1| Pc13g00640 [Penicillium chrysogenum Wisconsin 54-1255]
  misc_feature (68)..(289): NCBI GI: 115443452 Blast Desc: [Aspergillus terreus NIH2624] gi|114188402|gb|EAU30102.1| [Aspergillus terreus NIH2624]
MTARFKNPPFALAHELVQGNLRDPHATAPSIPGYPRVPLRDRSRVDEFVAEDLCSPDLDRMADKLWWMSKQDSSSISPLHRQLVKRRAIVVTEDPKLHLVWIYDHIFVKPLPRYILSHAFWQDYLCGDDKNRLNRAALGFVRKYSHLIRYESDFRIAQDPSLQLIPRHITWEQFCNFTIAFADIEDRDVSPRYAFGEIRLTRLNFYASLLLGRSHFQRVQYQYRAYFAQFYGPLLFFIGITSVFLGAFQVWVSVKQTQGASIFSDLAFGFSTVVIVLFLLVFAVLCGTWVWKVAKEWRFAIYDRLHLLEEGRTIGANGDTRISSPR

SEQ ID NO: 38406 - DNA, 1209 bp, Muscodor strobelii
  misc_feature: SGI cDNA ID NO. 573346
  misc_feature: Elevated expression when VOC is produced
  misc_feature: Encodes the peptide sequence at SEQ ID NO 38407
atggagatgtctgcagcacttttgttggccgcgatcctgctgctgaccgctctcttcctcctatcacggtgtaatcaagcaggcaccccaaggcacccaatgctcatgccgcctcgactcaaacgcaacgtcgtccttcgcatccaagaaatccccgaccgcaaaacccacgaggatttgactcgagatctgaaaacgattgccacgaccgactcgatcttggaacaagtcatcgacaccgtgtgtcgcgtctcgctggtacatgtacaaggaccttgggcttgtaccgagcttctcgataccgagctggtggagcacttctctcaagccagcgcgcaggctggattcgagtatcgatacgactgcaatttctacggcatcacgcctatacacgaggctgaggccggtgcgcgggtaggtgttttggccgtacccggtcttgccagccatgccgttggttcgtggaaggcaccgggtaaggaagacatatggctacgagattatcttccccaggacgtgcctcatctccgcatcctcttgtacggctatgaaacggatctgcttaagagcaactctaagaaatcgattgaagaaatggggaagactctcctcgaggacgtaaatgtgtttcaagcctcaagtcaaactaagcggcccatcatcctcaccggccatagcctgggagggcttctcatcaaggaaacatgcgttgggctgcttttgtttggcgtacctaatcacgggttgagacaagagcagctcttgagtctcgtaaatggccaacccaacgaaccactagtacgaagtctcgttgtcgacgaagatacagagccctcagcatacttggggaggctctcccaagattttgcaaagtgttgcaaagaccaatgccccatcatatcattctacgagaagaagaagagtccggtcgttgagatacaacggaatggcgctctggctaagtctggtgccctagttctgatggtcactaaaaagtcggccaccagtattggtatcaccgcggcagccagtgaagataatatctctgtggatgcagaccactctgacatgatcaaattcgatgacagatggcaaggcatataccaaactgtgaaagaacggatcaagaaacttgccattgaaggcgtccagattatctcagacagatctgcagatcgtatgttagtcgcatggctggctatgaattaa

SEQ ID NO: 38407 - protein, 402 aa, Muscodor strobelii
  misc_feature: SGI Peptide ID NO. 573346
  misc_feature (36)..(389): NCBI GI: 119175449 Blast Desc: CIMG_09574 [Coccidioides immitis RS]
  misc_feature (36)..(389): NCBI GI: 240107129 Blast Desc: CPC735_019200 [Coccidioides posadasii C735 delta SOWgp]
  misc_feature (3)..(382): NCBI GI: 46119326 Blast Desc: FG04764.1 [Gibberella zeae PH-1]
  misc_feature (119)..(395): NCBI GI: 154316973 Blast Desc: [Botryotinia fuckeliana B05.10] gi|150845516|gb|EDN20709.1| [Botryotinia fuckeliana B05.10]
  misc_feature (121)..(335): NCBI GI: 116201887 Blast Desc: CHGG_08828 [Chaetomium globosum CBS 148.51] gi|88177346|gb|EAQ84814.1| CHGG_08828 [Chaetomium globosum CBS 148.51]
  misc_feature (121)..(360): NCBI GI: 116191799 Blast Desc: CHGG_05617 [Chaetomium globosum CBS 148.51] gi|88181530|gb|EAQ88998.1| CHGG_05617 [Chaetomium globosum CBS 148.51]
  misc_feature (42)..(360): NCBI GI: 116198787 Blast Desc: CHGG_07549 [Chaetomium globosum CBS 148.51] gi|88178828|gb|EAQ86296.1| CHGG_07549 [Chaetomium globosum CBS 148.51]
  misc_feature (121)..(392): NCBI GI: 145231014 Blast Desc: An01g13700 [Aspergillus niger] gi|134055898|emb|CAK37376.1| protein product [Aspergillus niger]
  misc_feature (83)..(389): NCBI GI: 255934893 Blast Desc: Pc13g00190 [Penicillium chrysogenum Wisconsin 54-1255] gi|211583093|emb|CAP91088.1| Pc13g00190 [Penicillium chrysogenum Wisconsin 54-1255]
  misc_feature (209)..(391): NCBI GI: 156037412 Blast Desc: SS1G_12418 [Sclerotinia sclerotiorum 1980] gi|154697828|gb|EDN97566.1| SS1G_12418 [Sclerotinia sclerotiorum 1980]
  misc_feature: Useful for introducing or modulating the production of volatile compounds
MEMSAALLLAAILLLTALFLLSRCNQAGTPRHPMLMPPRLKRNVVLRIQEIPDRKTHEDLTRDLKTIATTDSILEQVIDTVCRVSLVHVQGPWACTELLDTELVEHFSQASAQAGFEYRYDCNFYGITPIHEAEAGARVGVLAVPGLASHAVGSWKAPGKEDIWLRDYLPQDVPHLRILLYGYETDLLKSNSKKSIEEMGKTLLEDVNVFQASSQTKRPIILTGHSLGGLLIKETCVGLLLFGVPNHGLRQEQLLSLVNGQPNEPLVRSLVVDEDTEPSAYLGRLSQDFAKCCKDQCPIISFYEKKKSPVVEIQRNGALAKSGALVLMVTKKSATSIGITAAASEDNISVDADHSDMIKFDDRWQGIYQTVKERIKKLAIEGVQIISDRSADRMLVAWLAMN

SEQ ID NO: 38408 - DNA, 3530 bp, Muscodor strobelii
  misc_feature: SGI EST ID NO. CUFF.92349.1
  misc_feature: Variant of the nucleotide sequence at SEQ ID NO 38406
ggagaagtcaccaagacaataatgcgacaacgaaatgcacacgttcttgatgttaagagaaatagtaacggaacagggtacacatgtttcggtttgcgtcgctgtaccgtcgtggtaagatgcttacgcagtgcgcctttttggctttagtatacgacgcgactgggttgtgtacatagtaattatagtactaaattgcgtatttagattgtggtcgatgtgaatgaagatgacagcaggcgcgacgcgttgatctttagtctcgtacgcgccttgggtggttcgcctatacagcgcacatacataatatactcttgagatcaccattagcctacataaatattaaacaggttatgaacgccgctatgccgtctccactagcccctgccgctgggctttgctagttcccgccgcggggcagaatactagtgtgataagggctgttgtccatgcattatcctcgtctacggctatacgttgcccctgtatgtaagctgatttcttggcccctctagaagcctttgcttagcaactcgttgcgtccgtcgagcgaggcgaccatcgatcgctatcatgtttccggccactgccaccttcaacgctgtatagatcccatcagtatgagtatagatatagcattccgatgacgcccctcgcgcctgcacattgattatactgcgaatccatgctagcagctttttccagcatctgaactatgacccatctccttaccagattggtggtgaagattcacacaacaatctatcgtggcgagcttattctcgtgtcgccatttgctccaatggtccgtccttcttctagcagatgtaggcggtcatagatggcgaacctccattccttagcgactttccaaacccaggtcccgcaaagcactgcaaagacgagcaagaacaaaacgatgacgactgtgctgaacccaaacgctaggtccgagaagatagaggcgccctgggtttgcttcacagaaacccacacctggaacgcaccgagaaacacggatgtaataccgatgaagaaaagaaggggcccgtagaactgagcgaagtaagctctatactggtactggacgcgttggaagtgcgatcttccgagcagcaatgaagcatagaagttcagccttgtaagtcggatctcaccgaacgcatagcgaggagaaacgtcgcggtcttcgatgtcggcaaacgcgatggtgaagttgcagaattgttcccaagttatgtggcgtgggatcagctgtaagctggggtcctgagcgatgcgaaagtccgattcatatctgatcaaatgggaatacttccgcacgaaacctagggctgccctgttgaggcggttcttgtcatctccacaaagataatcctgccagaaggcgtgcgacaggatgtagcgtggtagcggtttgacgaaaatgtggtcgtatatccacacaagatgaagcttgggatcctccgtcacaacgatggcgcgccgtttgaccagctgccggtggagcggcgagatgctgctgctatcttgtttcgacatccaccatagcttatctgccatgcgatccaagtctggggagcacagatcctcggcgacaaactcgtccacccgggagcggtcccgtagtgggactctagggtaaccagggatagatggcgccgtcgcatggggatctcggagatttccttgtactagctcatgggctaatgcgaaaggtggatttttaaatcgagctgtcatcttgatttgggtagatgtgagatcaaagagtataatgcagaacttcgtatcatgatgagcgctgcgatcttctgatcaatgagagcactacacggcccccaggagcatttcggtcattcagcatgcatctcgatgaggggtaagtaagcatgcatcagccgcgccataaagcataaaattgcctcgctctcaccgagcccttcgctcaatttctcagatcgatacgcggcccagaatggtttcaattgtatcgacgtgttcaagataccacaatcatcatggagatgtctgcagcacttttgttggccgcgatcctgctgctgaccgctctcttcctcctatcacggtgtaatcaagcaggcaccccaaggcacccaatgctcatgccgcctcgactcaaacgcaacgtcgtccttcgcatccaagaaatccccgaccgcaaaacccacgaggatttgactcgagatctgaaaacgattgccacgaccgactcgatcttggaacaagtcatcgacaccgtgtgtcgcgtctcgctggtacatgtacaaggaccttgggcttgtaccgagcttctcgataccgagctggtggagcacttctctcaagccagcgcgcaggctggattcgagtatcgatacgactgcaatttctacggcatcacgcctatacacgaggctgaggccggtgcgcgggtaggtgttttggccgtacccggtcttgccagccatgccgttggttcgtggaaggcaccgggtaaggaagacatatggctacgagattatcttccccaggacgtgcctcatctccgcatcctcttgtacggctatgaaacggatctgcttaagagcaactctaagaaatcgattgaagaaatggggaagactctcctcgaggacgtaaatgtgtttcaagcctcaagtcaaactaagcggcccatcatcctcaccggccatagcctgggagggcttctcatcaaggaagcacttatctatgcaaaagataactaatcttacgatttgccaaagacatgcgttgggctgcttttgtttggcgtacctaatcacgggttgagacaagagcagctcttgagtctcgtaaatggccaacccaacgaaccactagtacgaagtctcgttgtcgacgaagatacagagccctcagcatacttggggaggctctcccaagattttgcaaagtgttgcaaagaccaatgccccatcatatcattctacgagaagaagaagagtccggtcgttgaggtacgtaatggtggtcgctataagccaatggccatgacataattattagatacaacggaatggcgctctggctaagtctggtgccctagttctgatggtcactaaaaagtcggccaccagtattggtatcaccgcggcagccagtgaagataatatctctgtggatgcagaccactctgacatgatcaaattcgatgacagatggcaaggcatataccaaactgtgaaagaacggatcaagaaacttgccattgaaggcgtccagattatctcagacagatctgcagatcgtatgttagtcgcatggctggctatgaattaaactgttaactatatattgctagacttgtctattgagttggaatgtgcttggtctgataataatattaatagtagtgctaatggtaattaagaattgaagttttagtgaggtacgtcgcccggtagttagttagccgatagcacctgcgttgtagctgctacctgtattgctgtttgggattcgaagttggctccgtagatccaaat

SEQ ID NO: 38409 - DNA, 843 bp, Muscodor strobelii
  misc_feature: SGI cDNA ID NO. 573347
  misc_feature: Encodes the peptide sequence at SEQ ID NO 38410
atgcccacctggtttctccctcctgacttcacctttaagcccgacaagattcccctcggcactgtcatctcgcaccctaaaaaccccaccgatgtgctggcgttcccccccttggtcaatggcgatctacccgttgcccttccagaggaggactctgtacctagtatcgagccggagcatgaacactcgcgcgacgtcgaacgccgcaacggcctaaatctgctggcgaagatggtggaagtcttctccgcgtcaacgaacatcaacctacggcggcgcaacctgctgcactacggaccggtcgaccacgagatccgcacctttaagacgcctttcacacgtgccatgctcaaggctattgtagccatccccgacattcgggaccaaatcgatggtggtctatttggcagacggcccatatacattgtcgccgggctgcgtgtggctcgggagtctttcaccgttactgaggagcgtgagaccgaggtggatctgaaacttgaagggtccggaccggcaccccttgccagcctcgtgccggttgaggcaggtggtggggcaaccgagggcttaaacagaagtagcgtgaacaaatatagaacgcaaccgggcattgtgttcgcgtatcaagtgtatgcgatcagagccagaggggacggcacagctagagcaaatattgtagagagtagcaccgcgttcatgacgggagagggcgagggaaagcagcatgtgatggaggttgtagacgcagataaggatgtgctacaggaagatgtcgatgagccgaccgagttcgaagttgaggacattggagatggcgacttttgcatctcgtttcattaa

SEQ ID NO: 38410 - protein, 280 aa, Muscodor strobelii
  misc_feature: SGI Peptide ID NO. 573347
  misc_feature (3)..(203): NCBI GI: 256722441 Blast Desc: NECHADRAFT_8529 [Nectria haematococca mpVI 77-13-4]
  misc_feature (5)..(247): NCBI GI: 238845714 Blast Desc: [Microsporum canis CBS 113480]
  misc_feature (2)..(278): NCBI GI: 145248880 Blast Desc: An14g01520 [Aspergillus niger] gi|134081452|emb|CAK46465.1| protein product [Aspergillus niger]
  misc_feature (2)..(218): NCBI GI: 154321942 Blast Desc: [Botryotinia fuckeliana B05.10] gi|150850365|gb|EDN25558.1| [Botryotinia fuckeliana B05.10]
  misc_feature (2)..(215): NCBI GI: 256722219 Blast Desc: NECHADRAFT_52455 [Nectria haematococca mpVI 77-13-4]
MPTWFLPPDFTFKPDKIPLGTVISHPKNPTDVLAFPPLVNGDLPVALPEEDSVPSIEPEHEHSRDVERRNGLNLLAKMVEVFSASTNINLRRRNLLHYGPVDHEIRTFKTPFTRAMLKAIVAIPDIRDQIDGGLFGRRPIYIVAGLRVARESFTVTEERETEVDLKLEGSGPAPLASLVPVEAGGGATEGLNRSSVNKYRTQPGIVFAYQVYAIRARGDGTARANIVESSTAFMTGEGEGKQHVMEVVDADKDVLQEDVDEPTEFEVEDIGDGDFCISFH

SEQ ID NO: 38411 - DNA, 4036 bp, Muscodor strobelii
  misc_feature: SGI EST ID NO. CUFF.92353.0
  misc_feature: Variant of the nucleotide sequence at SEQ ID NO 38409
tcgattcaatcggtgtaatgccgcaatggtgtttttgtttcttgaatcgagatataggtgtttgtgataaaaacagttgcgtcctattctgccagccaagtgccaattggattatgtcgttcttttctcgcctgttcacattaaatggcaagatggccatcttggaaaaggccattccacccggtctatttggacaaccacagccccgagagatcgacgacgatgtcacagaaatgttgaagcagtacgcttcagcagggaatctggaagatgcggtcaccgaactgcttcgcgacacccttggcccggagaaggagaacaacggtacgatggtcgatgatcacgatcacaacagcgattttcgagctaaaatacgcccctatttgtgcaagaatgactatcaatccgctctccgagagtttatcgacgtcttacatgcccggtggcctagatgcaagattgctcacaagtcggcacttcgcattgcataccggcaggatgaggacgatagtgggcaagagcctcaacaactcatcttcgaaactctttcatccggacatagtgagcactggggaaaagtacagttcaccaagagaatcgaacgtagggctacagtcgttagatttgctggtgtcgatgacgacacggatagtactaaagatacgccaaacgcctgtcttgaggaactccctgtcataggtaatgccaacgccagtggattctcctcggacccgattgctatctgcaaggcaatcgaagatgcaagtgaaaggagagtatgtaaaagggttgacctcataaactttacaacgcaagagcctagagaatatggaatccgctcacgtcgggatatgataaccttgactgatcttctcgaccggatgaatacaacccgtctaaatgaccaagaagaccacgaaattagactctcgctgcatcagcgagctaagcttgccttaatactcgggtgcacattccaccagctttgtagtggcgcgtggggatccgctacaggttcacggaggacagccagtgagggcccgtggctttatagagactggacgaagcagggtatctgtttttttcccgatatcagaaacagaccagacatttcctgtccatatttaccaattatactggacgaccgccacaaagaggccacattcgatttccaaacttctagcacagttgctttagctattagcctaatccgcctccagggcgacgaagtagtacaagcatacgactcaaaaagagcagagctgcttgaagatggaggctacacagagaactttgacttctgcgttgttgccgagcttgtcgagacctcaacattcaaagacaacgtgcacgacttgtgtcaaaccgccattcgcgcctgtgttcaaggtgattttgcaaacgccgttgacgaagaggaggaagaagttgtccaaaagtattttctttccctcattcttgctccgttaaaagaatacttcgatatcatagaggagctgagagctgggggcgaaacgccgggattgcaaaggaatgcgacagtagcccgcaggggccatcccagacgctactccggtacatacgaaggttttacgactaacactaatgaaattggagaatctttgaccgttggcaagaacaatacaatgtcaagcggcagtaatcatgctcggagtgccgctttccagacaggcaatctcgaccacgagcactggctgaccaagctaaaggggatctccgacgatataaggagcggaacaccaaaatggttcaaagtcaaaccgattcgagtagcgattcttgacacaggaattgatttgggaaagcattgcttccagagcgctgcacgaagggcccgaattaaggagcgagtggattttgcacccgatgctgaaaagtcgtccgagattgctcatgatacatttggtcatgggagtttgatggcacaaatattgatggaagctgctccgcttgccgatgtttacattgcccgagtggctaaagacacagagtctttaaagaatagcaccgaagggatccgccaggcaattttgtgggcgaacgaagaggaggtagacatcgtttccatgtccttcggcctccgggactggaatatagacatcgccaatgccattcgggacgtacaatcggagcgcaataactctatcatctttttagcggctggtggcaactcatcatctgaaaataagaagtttcccgctaatcatccgtctgtcttttccatttatgcgactacgtgtcgaggcattcctctgttctatccaccgaacggggactcccaaggcaccttcgcaacctttggagacactctgccacgctacatcacgaaataccacgacaagaacatatgccaaccaggctcatcagtcgcgacggtagttacggctgccattgcggctataatgctcgcttatatcaaggcgctgccctcgttcgactgtacatcgctaccagacagcctgacaccagcagaaaagctgaagttgaggtacgagaagcttcaacttctagggaaattacgcaccgtgcagggcatagagcaattgttcctaagaatggcacctaaaacggatggcttgacgagatggattaacccaatctggttttggatggacagaccgacaactgactctcgggagactgcactgaaagaggttgcgtacaatttacaaacagaagtgcatcgagatgattggatgtgcgagctttatccatcataagaagaataaatcactcagagttgtaaatatgttttataataaagtgctaggcggtaaaaggaggcagaataggtgcttcatcaaatgatagttatactggtgatgttatagggtaggtcctgccagtcaaggcaccatttatggtaccttgcctgttaatgcgcccaagacatctcatgcatacgtgcagtaaatatataacctttcgatctcacatcaaatttgcagtccgggcatcatcctaaacatttgtttgccttgaaaagcatttgatctccgggcatttgcataattgacgttttggctgcgccctaaagaaaacaaagaaatgcccacctggtttctccctcctgacttcacctttaagcccgacaagattcccctcggcactgtcatctcgcaccctaaaaaccccaccgatgtgctggcgttcccccccttggtcaatggcgatctacccgttgcccttccagaggaggactctgtacctagtatcgagccggagcatgaacactcgcgcgacgtcgaacgccgcaacggcctaaatctgctggcgaagatggtggaagtcttctccgcgtcaacgaacatcaacctacggcggcgcaacctgctgcactacggaccggtcgaccacgagatccgcacctttaagacgcctttcacacgtgccatgctcaaggctattgtagccatccccgacattcgggaccaaatcgatggtggtctatttggcagacggcccatatacattgtcgccgggctgcgtgtggctcgggagtctttcaccgttactgaggagcgtgagaccgaggtggatctgaaacttgaagggtccggaccggcaccccttgccagcctcgtgccggttgaggcaggtggtggggcaaccgagggcttaaacagaagtagcgtgaacaaatatagaacgcaaccgggcattgtgttcgcgtatcaagtgtatgcgatcagagccagaggggacggcacagctagagcaaatattgtagagagtagcaccgcgttcatgacgggagagggcgagggaaagcagcatgtgatggaggttgtagacgcagataaggatgtgctacaggaagatgtcgatgagccgaccgagttcgaagttgaggacattggagatggcgacttttgcatctcgtttcattaaatagttcatatgtagtttaacagggtgcgccaccatgttttcggccgttcttacacccaggcttgcaaacaaataaatcccaagcaaataaatctaaattaaatcaaatttatttaaatcaaac

SEQ ID NO: 38412 - DNA, 2184 bp, Muscodor strobelii
  misc_feature: SGI cDNA ID NO. 573348
  misc_feature: Elevated expression when VOC is produced
  misc_feature: Encodes the peptide sequence at SEQ ID NO 38413
atgtcgttcttttctcgcctgttcacattaaatggcaagatggccatcttggaaaaggccattccacccggtctatttggacaaccacagccccgagagatcgacgacgatgtcacagaaatgttgaagcagtacgcttcagcagggaatctggaagatgcggtcaccgaactgcttcgcgacacccttggcccggagaaggagaacaacggtacgatggtcgatgatcacgatcacaacagcgattttcgagctaaaatacgcccctatttgtgcaagaatgactatcaatccgctctccgagagtttatcgacgtcttacatgcccggtggcctagatgcaagattgctcacaagtcggcacttcgcattgcataccggcaggatgaggacgatagtgggcaagagcctcaacaactcatcttcgaaactctttcatccggacatagtgagcactggggaaaagtacagttcaccaagagaatcgaacgtagggctacagtcgttagatttgctggtgtcgatgacgacacggatagtactaaagatacgccaaacgcctgtcttgaggaactccctgtcataggtaatgccaacgccagtggattctcctcggacccgattgctatctgcaaggcaatcgaagatgcaagtgaaaggagaggcgacgaagtagtacaagcatacgactcaaaaagagcagagctgcttgaagatggaggctacacagagaactttgacttctgcgttgttgccgagcttgtcgagacctcaacattcaaagacaacgtgcacgacttgtgtcaaaccgccattcgcgcctgtgttcaaggtgattttgcaaacgccgttgacgaagaggaggaagaagttgtccaaaagtattttctttccctcattcttgctccgttaaaagaatacttcgatatcatagaggagctgagagctgggggcgaaacgccgggattgcaaaggaatgcgacagtagcccgcaggggccatcccagacgctactccggtacatacgaaggttttacgactaacactaatgaaattggagaatctttgaccgttggcaagaacaatacaatgtcaagcggcagtaatcatgctcggagtgccgctttccagacaggcaatctcgaccacgagcactggctgaccaagctaaaggggatctccgacgatataaggagcggaacaccaaaatggttcaaagtcaaaccgattcgagtagcgattcttgacacaggaattgatttgggaaagcattgcttccagagcgctgcacgaagggcccgaattaaggagcgagtggattttgcacccgatgctgaaaagtcgtccgagattgctcatgatacatttggtcatgggagtttgatggcacaaatattgatggaagctgctccgcttgccgatgtttacattgcccgagtggctaaagacacagagtctttaaagaatagcaccgaagggatccgccaggcaattttgtgggcgaacgaagaggaggtagacatcgtttccatgtccttcggcctccgggactggaatatagacatcgccaatgccattcgggacgtacaatcggagcgcaataactctatcatctttttagcggctggtggcaactcatcatctgaaaataagaagtttcccgctaatcatccgtctgtcttttccatttatgcgactacgtgtcgaggcattcctctgttctatccaccgaacggggactcccaaggcaccttcgcaacctttggagacactctgccacgctacatcacgaaataccacgacaagaacatatgccaaccaggctcatcagtcgcgacggtagttacggctgccattgcggctataatgctcgcttatatcaaggcgctgccctcgttcgactgtacatcgctaccagacagcctgacaccagcagaaaagctgaagttgaggtacgagaagcttcaacttctagggaaattacgcaccgtgcagggcatagagcaattgttcctaagaatggcacctaaaacggatggcttgacgagatggattaacccaatctggttttggatggacagaccgacaactgactctcgggagactgcactgaaagaggttgcgtacaatttacaaacagaagtgcatcgagatgattggatgtgcgagctttatccatcataa

SEQ ID NO: 38413 - protein, 727 aa, Muscodor strobelii
  misc_feature: SGI Peptide ID NO. 573348
  misc_feature (410)..(631): NCBI GI: 145248882 Blast Desc: An14g01530 [Aspergillus niger] gi|134081453|emb|CAK46466.1| protein product [Aspergillus niger]
  misc_feature (223)..(628): NCBI GI: 46117328 Blast Desc: FG04506.1 [Gibberella zeae PH-1]
  misc_feature (384)..(628): NCBI GI: 256726775 Blast Desc: [Nectria haematococca mpVI 77-13-4]
  misc_feature (355)..(628): NCBI GI: 238841164 Blast Desc: conserved [Microsporum canis CBS 113480]
  misc_feature (407)..(626): NCBI GI: 154272986 Blast Desc: [Ajellomyces capsulatus NAm1] gi|150415857|gb|EDN11201.1| [Ajellomyces capsulatus NAm1]
  misc_feature (407)..(626): NCBI GI: 225555108 Blast Desc: conserved [Ajellomyces capsulatus G186AR]
  misc_feature (346)..(699): NCBI GI: 238842188 Blast Desc: intracellular serine protease [Microsporum canis CBS 113480]
  misc_feature (410)..(626): NCBI GI: 256720682 Blast Desc: [Nectria haematococca mpVI 77-13-4]
  misc_feature (407)..(631): NCBI GI: 240281314 Blast Desc: conserved [Ajellomyces capsulatus H143]
  misc_feature (409)..(705): NCBI GI: 116205772 Blast Desc: CHGG_02179 [Chaetomium globosum CBS 148.51] gi|88182776|gb|EAQ90244.1| CHGG_02179 [Chaetomium globosum CBS 148.51]
  misc_feature: Useful for introducing or modulating the production of volatile compounds
MSFFSRLFTLNGKMAILEKAIPPGLFGQPQPREIDDDVTEMLKQYASAGNLEDAVTELLRDTLGPEKENNGTMVDDHDHNSDFRAKIRPYLCKNDYQSALREFIDVLHARWPRCKIAHKSALRIAYRQDEDDSGQEPQQLIFETLSSGHSEHWGKVQFTKRIERRATVVRFAGVDDDTDSTKDTPNACLEELPVIGNANASGFSSDPIAICKAIEDASERRGDEVVQAYDSKRAELLEDGGYTENFDFCVVAELVETSTFKDNVHDLCQTAIRACVQGDFANAVDEEEEEVVQKYFLSLILAPLKEYFDIIEELRAGGETPGLQRNATVARRGHPRRYSGTYEGFTTNTNEIGESLTVGKNNTMSSGSNHARSAAFQTGNLDHEHWLTKLKGISDDIRSGTPKWFKVKPIRVAILDTGIDLGKHCFQSAARRARIKERVDFAPDAEKSSEIAHDTFGHGSLMAQILMEAAPLADVYIARVAKDTESLKNSTEGIRQAILWANEEEVDIVSMSFGLRDWNIDIANAIRDVQSERNNSIIFLAAGGNSSSENKKFPANHPSVFSIYATTCRGIPLFYPPNGDSQGTFATFGDTLPRYITKYHDKNICQPGSSVATVVTAAIAAIMLAYIKALPSFDCTSLPDSLTPAEKLKLRYEKLQLLGKLRTVQGIEQLFLRMAPKTDGLTRWINPIWFWMDRPTTDSRETALKEVAYNLQTEVHRDDWMCELYPS

SEQ ID NO: 38414 - DNA, 4036 bp, Muscodor strobelii; identical to SEQ ID NO: 38411
  misc_feature: SGI EST ID NO. CUFF.92353.0
  misc_feature: Variant of the nucleotide sequence at SEQ ID NO 38412

SEQ ID NO: 38415 - DNA, 3063 bp, Muscodor strobelii
  misc_feature: SGI cDNA ID NO. 573349
  misc_feature: Elevated expression when VOC is produced
  misc_feature: Encodes the peptide sequence at SEQ ID NO 38416
atgtcgcttgccaatgaagacctagattcgacaaatatggtcgcaattcacgaatactatctgaaatgcgtacactcattcgactcctgcagagcttgtccttatctcccacaggacttcctgcggctggttgaagacgagatggggcggttcgagatctgggccatcaatactggcgcctctcttgattcactagtctcatcgtcgctcgataatcaacttcgaaacagcagcaacactttggatatggttgtcctggtcctccgagctctgaggctcaaccttgactatgctagccgtatatgtgaccaacccggagaaaatggccgagattccagcaacaaagatagcagaaatgcggatgataatggtcagcgcacgaacgagggcgccataaacctctctaaagcggcgctacaatcagttcatggactagtaagccagcttaagagactatcttccgcgattcgacgagcaacagccatggagtacaatgttgaggccgcgaagaaaagagataacaagggcggcgttgatcaaggcgccgacgatgagaaattggctcagattatcgtcaacaaaaaattcccaagggcctccgaacaattgaaggcgattctaagtacaggtatatctttccgtatgaggcgatttagagattggaaacgacaccacgagagattacaaaagaagatcaaagacgcgttggctgagtctccagttacactggagaatcaccaatgcgcagaagtagaaagcccccgcaaattaccgctctctgcaaatgccaaagaggcaccaagccaatcagctagaaccgaagacaaacccactataccacaaagcatggcatcatcaaaaccgtcattcgacagttgcaaatttgagattccagagtctttcggaccgtctacaaccgtctcgaagagtgtgcgttcggagatcggaagcgagtttctagattggccgcgacctcctaaagttacacttgatgatgacggcgatggcaatgctttttgtccctattgtttcgacctactagataaagcagagatacgtaacaagacaaagtggagaaagcacgtcaaaagggaccttgaaccatacaattgcatttttgaagaatgtcagacttttattaagatgttccccaaagaggggcaatgggccaatcacattcggtcatcacacttgccaggcacatgggtttgccgaatgcgtccgcacagcgattctgttgtcttacatggcgaagtcgagttcaatgagcacctggagaggacccacgttggcatgtatcctgcgtctcgtgcagcgaccatggccaaggcggcttatcgaccagctcaagcaggcgacagcttgtttctccagtgtccgatggggtgtcccgactccgaagtgttgcccgaaatagttgcaaacccaagtcccttgactctgcacgtggccaaccacttgctatggctcgcacttgcgtcgctcccagaacggagtgcacgctcgtctgagactgggttttccaacgattacaaaacagaaaatggagacttgccacagtcgaatacatcatcgaaatcgaaacatgtgaccacgtggtccaacatgccaggttttgttgagctggatcccaacgcaggcttatcatatgatacagctaaacagcagctcaccgaggtatcttggattgagaagtggattgcagaacctgtcgccgccagcgacaccgggtcaacagctgaaacaccagaactcaagattctggagtgggttgaaggaccacctaagaacgatccgatatacatgccaggcaacctcagtcgccaagagacctggtttcaaatcccatggatccgtcggcagcactctcttttcaatgcagatcacccgccgaagatatctgtgaccgaacgaggagagcaggtcgtcgttacagaggacgtggtcaaggccgcagcagcaaacgatagaaatggcgaggcggtgacgacactcctcctagaccgacgaaatagattggcatttctcgaagactatgagccggtttcggccacaccgatctttggaacactcagagatggtatcgcaactctccctgttggtaagattcatggtatcaacggaggatcagagtttagcacagtttcgacgagtcctggtgctattgtatcggtagatgaaatctacgatataaaaagtaaggcgaaggttgtatggggatccattcaggatccgtcacagtccgattggttcatcctataccggtggagctcggagaatcccttaaacattatcgtggatccgaatctagggagcttctttcagcagaagctccgcgactacttggagactaggattactggcaacatccaatacacacacggggttgaaatgaccaagagtgaagctgctcaagctgagtggttccgactaggaatgaaagaggatggtggcattgatatcttcggacccgagcagacagtgggtgatcaaggaccagtacgtggttggaagaccagagggaaaaccgacgacgagagagcaagggacttggccattgcgctagctcacttatttcgatttgggcagatcgttcaattacggaacgagtccgaggatgtagcgccatttcaaataactgttgactcgaaactcagggagaacacgaagaaagttgtcgactttgtattccataacaacggtaacgagaaattaagtttcgcaattctcatcctcagtccaggattccacgtcaagcaattgttcccggccacagacacgttccaaacagtacttgcacacgagaggcattctgtctcgttctcattaacagtacccgatgagctgaaaatcaacgaggcagatgaccaacaacggaggcaccgtgatattgtccgcactgttgtaacaaagggtaagagtgtgtcactcaagtgtatagagctgcctgatatttggaatgccgatcaatgggataataggagtatagatgggttgggtagagacgggaatcttcgtgatcatttcagctggtggatacgagataaggagttcataaggtga

SEQ ID NO: 38416 - protein, 1020 aa, Muscodor strobelii
  misc_feature: SGI Peptide ID NO. 573349
  misc_feature (14)..(537): NCBI GI: 46117326 Blast Desc: FG04505.1 [Gibberella zeae PH-1]
  misc_feature (41)..(519): NCBI GI: 156064815 Blast Desc: SS1G_00415 [Sclerotinia sclerotiorum 1980] gi|154691277|gb|EDN91015.1| SS1G_00415 [Sclerotinia sclerotiorum 1980]
  misc_feature (671)..(1017): NCBI GI: 256728254 Blast Desc: [Nectria haematococca mpVI 77-13-4]
  misc_feature (41)..(495): NCBI GI: 115391759 Blast Desc: [Aspergillus terreus NIH2624] gi|114194308|gb|EAU36008.1| [Aspergillus terreus NIH2624]
  misc_feature (44)..(516): NCBI GI: 46120348 Blast Desc: FG04821.1 [Gibberella zeae PH-1]
  misc_feature (23)..(510): NCBI GI: 256733794 Blast Desc: NECHADRAFT_35737 [Nectria haematococca mpVI 77-13-4]
  misc_feature (36)..(496): NCBI GI: 116205762 Blast Desc: CHGG_02174 [Chaetomium globosum CBS 148.51] gi|88182771|gb|EAQ90239.1| CHGG_02174 [Chaetomium globosum CBS 148.51]
  misc_feature (44)..(496): NCBI GI: 169612235 Blast Desc: SNOG_09236 [Phaeosphaeria nodorum SN15] gi|160702462|gb|EAT83428.2| SNOG_09236 [Phaeosphaeria nodorum SN15]
  misc_feature (51)..(495): NCBI GI: 256722254 Blast Desc: NECHADRAFT_86856 [Nectria haematococca mpVI 77-13-4]
  misc_feature (132)..(496): NCBI GI: 116205774 Blast Desc: CHGG_02180 [Chaetomium globosum CBS 148.51] gi|88182777|gb|EAQ90245.1| CHGG_02180 [Chaetomium globosum CBS 148.51]
  misc_feature: Useful for introducing or modulating the production of volatile compounds
MSLANEDLDSTNMVAIHEYYLKCVHSFDSCRACPYLPQDFLRLVEDEMGRFEIWAINTGASLDSLVSSSLDNQLRNSSNTLDMVVLVLRALRLNLDYASRICDQPGENGRDSSNKDSRNADDNGQRTNEGAINLSKAALQSVHGLVSQLKRLSSAIRRATAMEYNVEAAKKRDNKGGVDQGADDEKLAQIIVNKKFPRASEQLKAILSTGISFRMRRFRDWKRHHERLQKKIKDALAESPVTLENHQCAEVESPRKLPLSANAKEAPSQSARTEDKPTIPQSMASSKPSFDSCKFEIPESFGPSTTVSKSVRSEIGSEFLDWPRPPKVTLDDDGDGNAFCPYCFDLLDKAEIRNKTKWRKHVKRDLEPYNCIFEECQTFIKMFPKEGQWANHIRSSHLPGTWVCRMRPHSDSVVLHGEVEFNEHLERTHVGMYPASRAATMAKAAYRPAQAGDSLFLQCPMGCPDSEVLPEIVANPSPLTLHVANHLLWLALASLPERSARSSETGFSNDYKTENGDLPQSNTSSKSKHVTTWSNMPGFVELDPNAGLSYDTAKQQLTEVSWIEKWIAEPVAASDTGSTAETPELKILEWVEGPPKNDPIYMPGNLSRQETWFQIPWIRRQHSLFNADHPPKISVTERGEQVVVTEDVVKAAAANDRNGEAVTTLLLDRRNRLAFLEDYEPVSATPIFGTLRDGIATLPVGKIHGINGGSEFSTVSTSPGAIVSVDEIYDIKSKAKVVWGSIQDPSQSDWFILYRWSSENPLNIIVDPNLGSFFQQKLRDYLETRITGNIQYTHGVEMTKSEAAQAEWFRLGMKEDGGIDIFGPEQTVGDQGPVRGWKTRGKTDDERARDLAIALAHLFRFGQIVQLRNESEDVAPFQITVDSKLRENTKKVVDFVFHNNGNEKLSFAILILSPGFHVKQLFPATDTFQTVLAHERHSVSFSLTVPDELKINEADDQQRRHRDIVRTVVTKGKSVSLKCIELPDIWNADQWDNRSIDGLGRDGNLRDHFSWWIRDKEFIR

SEQ ID NO: 38417 - DNA, 3213 bp, Muscodor strobelii
  misc_feature: SGI EST ID NO. CUFF.92340.1
  misc_feature: Variant of the nucleotide sequence at SEQ ID NO 38415
ccaacccggagaaaatggccgagattccagcaacaaagatagcagaaatgcggatgataatggtcagcgcacgaacgagggcgccataaacctctctaaagcggcgctacaatcagttcatggactagtaagccagcttaagagactatcttccgcgattcgacgagcaacagccatggagtacaatgttgaggccgcgaagaaaagagataacaagggcggcgttgatcaaggcgccgacgatgagaaattggctcagattatcgtcaacaaaaaattcccaagggcctccgaacaattgaaggcgattctaagtacaggtatatctttccgtatgaggcgatttagagattggaaacgacaccacgagagattacaaaagaagatcaaagacgcgttggctgagtctccagttacactggagaatcaccaatgcgcagaagtagaaagcccccgcaaattaccgctctctgcaaatgccaaagaggcaccaagccaatcagctagaaccgaagacaaacccactataccacaaagcatggcatcatcaaaaccgtcattcgacagttgcaaatttgagattccagagtctttcggaccgtctacaaccgtctcgaagagtgtgcgttcggagatcggaagcgagtttctagattggccgcgacctcctaaagttacacttgatgatgacggcgatggcaatgctttttgtccctattgtttcgacctactagataaagcagagatacgtaacaagacaaagtggagaaagcacgtcaaaagggaccttgaaccatacaattgcatttttgaagaatgtcagacttttattaagatgttccccaaagaggggcaatgggccaatcacattcggtcatcacacttgccaggcacatgggtttgccgaatgcgtccgcacagcgattctgttgtcttacatggcgaagtcgagttcaatgagcacctggagaggacccacgttggcatgtatcctgcgtctcgtgcagcgaccatggccaaggcggcttatcgaccagctcaagcaggcgacagcttgtttctccagtgtccgatggggtgtcccgactccgaagtgttgcccgaaatagttgcaaacccaagtcccttgactctgcacgtggccaaccacttgctatggctcgcacttgcgtcgctcccagaacggagtgcacgctcgtctgagactgggttttccaacgattacaaaacagaaaatggagacttgccacagtcgaatacatcatcgaaatcgaaacatgtgaccacgtggtccaacatgccaggttttgttgagctggatcccaacgcaggcttatcatatgatacagctaaacagcagctcaccgaggtatcttggattgagaagtggattgcagaacctgtcgccgccagcgacaccgggtcaacagctgaaacaccagaactcaagattctggagtgggttgaaggaccacctaagaacgatccgatatacatgccaggcaacctcagtcgccaagagacctggtttcaaatcccatggatccgtcggcagcactctcttttcaatgcagatcacccgccgaagatatctgtggtcaaagttcttttaagattatcagggggaacctggttggctcgacatgcaggactatcaaggtacgtgcaactataagcgcactagttccaacgcactagtcggcttagtagatctagaaggcttagaagttgtcatttagattgagatcgtctctctttgcgacatacttcatatatctcttgaagtctcgaatgattgccgcccctcccagtgagtccatactcaaggccgcagcagcaaacgatagaaatggcgaggcggtgatgacacttctcctagaccgaacgaggagagcaggtcgtcgttacagaggacgtggtcaaggccgcagcagcaaacgatagaaatggcgaggcggtgacgacactcctcctagaccgacgaaatagattggcatttctcgaagactatgagccggtttcggccacaccgatctttggaacactcagagatggtatcgcaactctccctgttggtaagattcatggtatcaacggaggatcagagtttagcacagtttcgacgagtcctggtgctattgtatcggtagatgaaatctacgatataaaaagtaaggcgaaggttgtatggggatccattcaggatccgtcacagtccgattggttcatcctataccggtggagctcggagaatcccttaaacattatcgtggatccgaatctagggagcttctttcagcagaagctccgcgactacttggagactaggattactggcaacatccaatacacacacggggttgaaatgaccaagagtgaagctgctcaagctgagtggttccgactaggaatgaaagaggatggtggcattgatatcttcggacccgagcagacagtgggtgatcaaggaccagtacgtggttggaagaccagagggaaaaccgacgacgagagagcaagggacttggccattgcgctagctcacttatttcgatttgggcagatcgttcaattacggaacgagtccgaggatgtagcgccatttcaaataactgttgactcgaaactcagggagaacacgaagaaagttgtcgactttgtattccataacaacggtaacgagaaattaagtttcgcaattctcatcctcagtccaggattccacgtcaagcaattgttcccggccacagacacgttccaaacagtacttgcacacgagaggcattctgtctcgttctcattaacagtacccgatgagctgaaaatcaacgaggcagatgaccaacaacggaggcaccgtgatattgtccgcactgttgtaacaaagggtaagagtgtgtcactcaagtgtatagagctgcctgatatttggaatgccgatcaatgggataataggagtatagatgggttgggtagagacgggaatcttcgtgatcatttcagctggtggatacgagataaggagttcataaggtgatccaatacaacggccttgcgactcttgctcttaagcgagcttactcgctttttctttccctccttaagaccattcatcaagccttggtttgctctagtggacggttcagcgcgctctttggatggcaagatcttgaaaaataaacagctaccatcttgttcgcctctcaagccgcg

SEQ ID NO: 38418 - DNA, 1065 bp, Muscodor strobelii
  misc_feature: SGI cDNA ID NO. 573350
  misc_feature: Encodes the peptide sequence at SEQ ID NO 38419
atggccttgaaacaacatcgcctcactgcgcgagctggaattcagtacggtgatggctcgcgccagttcgccgtgtatggcgcttcagtcacattggtcgcggtcatcgccgtgataatatcggtgcgcatgtacgtccgaattcgattgatccaagcggtcggcgccgatgatgttctaatgttgctgggtactgctgcagcttttgggctttcggtcgcgagtttagtagctgcgtattacggcgttggactacatcacgagtggctagttcccgacatccccctcgaggactacgcgccgatgctccaagccatatactctacccgtctcctatacgtcaccgccatgctcttcgtcaaacaaagcctcttggtgttctacctacgcctggatagccacggtgccatgcgatgggcagtttacggtctcatgttcgcccacgtcggcttcaatatcgcaagcttcgtcatactagctgcctcatgcgtaccggcttctctgttctgggatacaacaggcactgttgtgggtaaatgtctcgaccctgtttcgcagcaggccttctacgatgccaatggcgctctcaatatcattttcgacctcgcaatctacctcgccccgatgcccatgctagctaagctccagataaacagacgccagaagttagttttgttcggcgtcttctctcttggatttttgtctgttgctgctggcggtgtcaggttggagtacgtccgcctcctagctaatgagaaggacatgtacttctacctggccgattctctcatctggtgccagatcgagatctatgtcgcaatcttttgcggttctgcacccgccttaaaggttctgctcaaagactggttcccacgcgtatttggctcgtcggccagaaatccacccctctacccgatcgccaggaattcgagatacggcactatcggtgatcagagtggcggcggggggcgcaatttctcccacaacggttataggctgccaagcgacagcaaggaaaacgggattgtcaagaatatagagttcataatggaagtggaagaatag

SEQ ID NO: 38419 - protein, 354 aa, Muscodor strobelii
  misc_feature: SGI Peptide ID NO. 573350
  misc_feature (21)..(311): NCBI GI: 145253551 Blast Desc: An17g00590 [Aspergillus niger] gi|134083856|emb|CAK42987.1| protein product [Aspergillus niger]
  misc_feature (92)..(339): NCBI GI: 189201465 Blast Desc: [Pyrenophora tritici-repentis Pt-1C-BFP] gi|187984168|gb|EDU49656.1| [Pyrenophora tritici-repentis Pt-1C-BFP]
  misc_feature (18)..(314): NCBI GI: 255941498 Blast Desc: Pc16g12190 [Penicillium chrysogenum Wisconsin 54-1255] gi|211586141|emb|CAP93889.1| Pc16g12190 [Penicillium chrysogenum Wisconsin 54-1255]
  misc_feature (24)..(326): NCBI GI: 115383676 Blast Desc: conserved [Aspergillus terreus NIH2624] gi|114196077|gb|EAU37777.1| conserved [Aspergillus terreus NIH2624]
  misc_feature (20)..(313): NCBI GI: 255932455 Blast Desc: Pc12g09570 [Penicillium chrysogenum Wisconsin 54-1255] gi|211582403|emb|CAP80584.1| Pc12g09570 [Penicillium chrysogenum Wisconsin 54-1255]
  misc_feature (19)..(302): NCBI GI: 119501204 Blast Desc: MFS transporter, [Neosartorya fischeri NRRL 181] gi|119415524|gb|EAW25462.1| MFS transporter, [Neosartorya fischeri NRRL 181]
  misc_feature (20)..(329): NCBI GI: 239612727 Blast Desc: conserved [Ajellomyces dermatitidis ER-3]
  misc_feature (20)..(328): NCBI GI: 145242916 Blast Desc: An11g00060 [Aspergillus niger] gi|134078677|emb|CAK48239.1| protein product [Aspergillus niger]
  misc_feature (18)..(341): NCBI GI: 261353889 Blast Desc: conserved [Verticillium albo-atrum VaMs.102]
  misc_feature (19)..(302): NCBI GI: 70994772 Blast Desc: MFS monosaccharide transporter [Aspergillus fumigatus Af293] gi|66849797|gb|EAL90125.1| MFS monosaccharide transporter, [Aspergillus fumigatus Af293]
MALKQHRLTARAGIQYGDGSRQFAVYGASVTLVAVIAVIISVRMYVRIRLIQAVGADDVLMLLGTAAAFGLSVASLVAAYYGVGLHHEWLVPDIPLEDYAPMLQAIYSTRLLYVTAMLFVKQSLLVFYLRLDSHGAMRWAVYGLMFAHVGFNIASFVILAASCVPASLFWDTTGTVVGKCLDPVSQQAFYDANGALNIIFDLAIYLAPMPMLAKLQINRRQKLVLFGVFSLGFLSVAAGGVRLEYVRLLANEKDMYFYLADSLIWCQIEIYVAIFCGSAPALKVLLKDWFPRVFGSSARNPPLYPIARNSRYGTIGDQSGGGGRNFSHNGYRLPSDSKENGIVKNIEFIMEVEE

SEQ ID NO: 38420 - DNA, 972 bp, Muscodor strobelii
  misc_feature: SGI EST ID NO. CUFF.92310.4
  misc_feature: Variant of the nucleotide sequence at SEQ ID NO 38418
ctggcgacttgcagataataaaaccgagtcaagacaggagccaaaattctactggtgatagacgacatacaaagacgcaatctaggttctagactgctctagttcgaccttcaaagctggacacgcctctccacacaatttgggtggactttactgctcatactatggccttgaaacaacatcgcctcactgcgcgagctggaattcagtacggtgatggctcgcgccagttcgccgtgtatggcgcttcagtcacattggtcgcggtcatcgccgtgataatatcggtgcgcatgtacgtccgaattcgattgatccaagcggtcggcgccgatgatgttctaatgttgctgggtactgctgcagcttttgggctttcggtcgcgagtttagtagctgcgtattacggcgttggactacatcgtaagtctcatctataacctgatggcagagttgtcggagctcactcagacgagtggctagttcccgacatccccctcgaggactacgcgccgatgctccaagccatatactctacccgtctcctatacgtcaccgccatgctcttcgtcaaacaaagcctcttggtgttctacctacgcctggatagccacggtgccatgcgatgggcagtttacggtctcatgttcgcccacgtcggcttcaatatcgcaagcttcgtcatactagctgcctcatgcgtaccggcttctctgttctgggatacaacaggcactgttgtgggtaaatgtctcgaccctgtttcgcagcaggccttctacgatgccaatggcgctctcaagttgattcttacctcacaatcgacatcatcgagaaacaccctcgactgactggtacttcgctgtagtatcattttcgacctcgcaatctacctcgccccgatgcccatgctagctaagctccagataaacagacgccagaagttagttttgttcggcgtcttctctcttg

SEQ ID NO: 38421 - DNA, 1305 bp, Muscodor strobelii
  misc_feature: SGI cDNA ID NO. 573351
  misc_feature: Elevated expression when VOC is produced
  misc_feature: Encodes the peptide sequence at SEQ ID NO 38422
atggccgaaaccaagatcacccaagccgaccaagctccggttgctggtgcaccatgctcaacagaagagaaattgattaaccatggcgctcccaatgtaagtccccttttcactccagtccaagaccctccagcaggtaccccatgggacgtgcagcccgagggcagtctattttcaccactgaagatcaatgggatgacaattcataatcgcataattgtttcgccgatgtgccaatactcggctaaagatggcgtcatgtcgccatggcaccacgttcatcttggtagcttcgctgtgcgcggtgcaggtcttgtgcttactgaggtggtgtccatctcgccagaaggacgcatatctccccaagatttgggactatgggatgatgagcagatcgatccaataaagtggatggcggacttcgcacatagccaaggaaccaaatttggtcttcaaatgggacatgctgggcgaaaggccagtacggtggccccatggattgatcgcaaagctgcagctggaaattattcagaaggctggcccagcaatgtcgtcgccccttctcctgagccgtatagccagcaaaccatcgtgccgcgagaagcgacccaggttgatattgacaaagtcaaaagtgactgggcggccgctgttaagcgagcgttgaaggctggtgtagatacaatcgaaattcatgcagctcatgggtacttgttcaacgagtttctatcaccgtcctcgaataaacgaaccgatgaatacggaggctcactggccaatcgcgcacgcttagtgattgagatcctcgatttgactcgaagtattgttccggaaatatttcctgtccttgtccgcatcccagctaccgactacctggagaatgcgtctcctgcggtcgatcgtaaagaccaatgggcgatagaggacgctgtagagctcgcacaattacttgcggagcatggtgctgatttccttgatgtgactggaggcggtactgattcaaggcaaaagatcacacctggaccagggtatcaagttaaatacgcgactgcaatcaaggaagcactccgcgataagccgaagcgagtcagcgtaggttcggtcggagagatcacttccggagctcaggctgctgagctcatgtccaaaggcgaggtagatgcggtactcgttggtcgcgcattcctcaaagatcctgatcttgtctggcattgggccgatgagattgagctggatattcacgttcccagtcaatatggctggggatttggtacgacgagaactcatcggaaacggcgcagctaa

SEQ ID NO: 38422 - protein, 434 aa, Muscodor strobelii
  misc_feature: SGI Peptide ID NO. 573351
  misc_feature (56)..(412): Pfam Id: PF00724 Pfam Desc: NADH:flavin oxidoreductase / NADH oxidase family
  misc_feature (56)..(293): Pfam Id: PF00724 Pfam Desc: NADH:flavin oxidoreductase / NADH oxidase family
  misc_feature (365)..(412): Pfam Id: PF00724 Pfam Desc: NADH:flavin oxidoreductase / NADH oxidase family
  misc_feature (18)..(433): NCBI GI: 256726802 Blast Desc: NECHADRAFT_57931 [Nectria haematococca mpVI 77-13-4]
  misc_feature (25)..(433): NCBI GI: 46136337 Blast Desc: FG09684.1 [Gibberella zeae PH-1]
  misc_feature (23)..(425): NCBI GI: 240105533 Blast Desc: oxidoreductase, FAD/FMN-binding family protein [Coccidioides posadasii C735 delta SOWgp]
  misc_feature (27)..(423): NCBI GI: 119480069 Blast Desc: NADH-dependent flavin oxidoreductase, [Neosartorya fischeri NRRL 181] gi|119408217|gb|EAW18166.1| NADH-dependent flavin oxidoreductase, [Neosartorya fischeri NRRL 181]
  misc_feature (21)..(423): NCBI GI: 169851586 Blast Desc: CC1G_03496 [Coprinopsis cinerea okayama7#130] gi|116506336|gb|EAU89231.1| CC1G_03496 [Coprinopsis cinerea okayama7#130]
  misc_feature (27)..(423): NCBI GI: 70989429 Blast Desc: NADH-dependent flavin oxidoreductase [Aspergillus fumigatus Af293] gi|66847195|gb|EAL87526.1| NADH-dependent flavin oxidoreductase, [Aspergillus fumigatus Af293]
  misc_feature (23)..(425): NCBI GI: 119193881 Blast Desc: CIMG_01315 [Coccidioides immitis RS]
  misc_feature (13)..(423): NCBI GI: 156034304 Blast Desc: SS1G_13455 [Sclerotinia sclerotiorum 1980] gi|154698858|gb|EDN98596.1| SS1G_13455 [Sclerotinia sclerotiorum 1980]
  misc_feature (27)..(423): NCBI GI: 159128974 Blast Desc: NADH-dependent flavin oxidoreductase, [Aspergillus fumigatus A1163]
  misc_feature (25)..(433): NCBI GI: 169769925 Blast Desc: [Aspergillus oryzae RIB40] gi|238487746|ref|XP_002375111.1| NADH-dependent flavin oxidoreductase, [Aspergillus flavus NRRL3357] protein product
  misc_feature (25)..(433): SWISSPROT Homolog: EC 1.6.99.1 NADPH dehydrogenase
  misc_feature: Useful for introducing or modulating the production of volatile compounds
MAETKITQADQAPVAGAPCSTEEKLINHGAPNVSPLFTPVQDPPAGTPWDVQPEGSLFSPLKINGMTIHNRIIVSPMCQYSAKDGVMSPWHHVHLGSFAVRGAGLVLTEVVSISPEGRISPQDLGLWDDEQIDPIKWMADFAHSQGTKFGLQMGHAGRKASTVAPWIDRKAAAGNYSEGWPSNVVAPSPEPYSQQTIVPREATQVDIDKVKSDWAAAVKRALKAGVDTIEIHAAHGYLFNEFLSPSSNKRTDEYGGSLANRARLVIEILDLTRSIVPEIFPVLVRIPATDYLENASPAVDRKDQWAIEDAVELAQLLAEHGADFLDVTGGGTDSRQKITPGPGYQVKYATAIKEALRDKPKRVSVGSVGEITSGAQAAELMSKGEVDAVLVGRAFLKDPDLVWHWADEIELDIHVPSQYGWGFGTTRTHRKRRS

SEQ ID NO: 38423 - DNA, 2146 bp, Muscodor strobelii
  misc_feature: SGI EST ID NO. CUFF.92356.1
  misc_feature: Variant of the nucleotide sequence at SEQ ID NO 38421
gcgatgtgcccctgtctcctctatatcttaaaccgtagacatcattttaagtgaactgcaaacgccacattctcgggagtcaatagcgccatggccgaaaccaagatcacccaagccgaccaagctccggttgctggtgcaccatgctcaacagaagagaaattgattaaccatggcgctcccaatgtccccttttcactccagtccaagaccctccagcaggtaccccatgggacgtgcagcccgagggcagtctattttcaccactgaagatcaatgggatgacaattcataatcgcataattgtttcgccgatgtgccaatactcggctaaagatggcgtcatgtcgccatggcaccacgttcatcttggtagcttcgctgtgcgcggtgcaggtcttgtgcttactgaggtggtgtccatctcgccagaaggacgcatatctccccaagatttgggactatgggatgatgagcagatcgatccaataaagtggatggcggacttcgcacatagccaaggaaccaaatttggtcttcaaatgggacatgctgggcgaaaggccagtacggtggccccatggattgatcgcaaagctgcagctggaaattattcagaaggctggcccagcaatgtcgtcgccccttctcctgagccgtatagccagcaaaccatcgtgccgcgagaagcgacccaggttgatattgacaaagtcaaaagtgactgggcggccgctgttaagcgagcgttgaaggctggtgtagatacaatcgaaattcatgcagctcatgggtacttgttcaacgagtttctatcaccgtcctcgaataaacgaaccgatgaatacggaggctcactggccaatcgcgcacgcttagtgattgagatcctcgatttgactcgaagtattgttccggaaatatttcctgtccttgtccgcatcccagctaccgactacctggagaatgcgtctcctgcggtcgatcgtaaagaccaatgggcgatagaggacgctgtagagctcgcacaattacttgcggagcatggtgctgatttccttgatgtgactggaggcggtactgattcaaggcaaaagatcacacctggaccagggtatcaagttaaatacgcgactgcaatcaaggaagcactccgcgataagccgaagcgagtcagcgtaggttcggtcggagagatcacttccggagctcaggctgctgagctcatgtccaaaggcgaggtagatgcggtactcgttggtcgcgcattcctcaaagatcctgatcttgtctggcattgggccgatgagattgagctggatattcacgttcccagtcaatatggctggggatttggtacgacgagaactcatcggaaacggcgcagctaagtaactccacctgtttgataggtcgtctcatatcctatcgatattgttatgaaatcgttgatcttgtcgtgcggaactgaaaggaaggcgttgaccgggcctgtagagggtttcaaccgatctatattcctcatattaagtccatcctgtagcgagaaacttgattgactcaaatagatcaagctgagatatatgaaatgcaactgtgagcagtgcagttgattcttcggctcttttcctttcgatctcccaacttctggcatggttagaagaaccttacgcgaatgccgaatcgatctattccaagggcctttgctgcagtcaccaccagggcataataacaaatcgctattaccatccctttagcagcgacatcagcacatgtctcctgaaattcgaattttaggactcttgcggctatattcgacatcttgcctgctacgtagttgttcgtttaggtttggtgagtagtgacaggactggtgagtgcttgacggaattctgtgtcttcgcgctagggaaagatgactttagaaaggttcttgcatatttgtacgctggacgttatcatgtacattatgggaagatacgtgcgcgtttgatttaagtgatgatttcattctagcaccctttaataagtcctcaacctctgggcacataagcttcgaaacttgaccctagtctcattcacaagaagagaacatataaaactgtagatcctacgcgagttttcgttatgggactggccaaatatg

SEQ ID NO: 38424 - DNA, 810 bp, Muscodor strobelii
  misc_feature: SGI cDNA ID NO. 573352
  misc_feature: Encodes the peptide sequence at SEQ ID NO 38425
atggcgtacagaatattaaagcgcaaatggaggtcgtcgatggctatgtggattgtgatgttattcgagctcggcatcaccatcggtctgctcattctcacggctctcgctcacccaaatgtgtaccgcgataagctgtggcaagccggctacgaactgggctacaactcgagtcccgctcaaatcctctacgcatattccatgggaaaaccgattcctgcgaaaccttttgtctggtcgccattattgaccaacttcaatttctccatcgccatcgttagcttgttcttcctgattgctaagttgatcggctatgttatggacatctggtttccattaccggtcctattcatcaatatcggcttgacggtgctctatgctgtgagtttgggcgggcagggcggacccgatcatcttgatcccgaacagcagagcaatgtggcgtggtacatcgcgcattcgtgctctgtagccaagaaccaaaacattcagaaatactgcacagatgcgaagactttattcggagtcaccttcgttatgctactcatcatggccgccaatacaggcttaacaatctgggccttgattcccaacgaccgcgacaagcgagattgggattccgatgacgaagacgacgatgaagatgagcctctcgacaacaagaagggcacgtcttgggagatgcgttcgattccgcccacacctcgcacaggtgtcacaccgtttaccccacgtacgacggctttcaatacattggataggaagctacctctacgctcgaaccaacccgcgtcaactgcatatgcctaa

SEQ ID NO: 38425 - protein, 269 aa, Muscodor strobelii
  misc_feature: SGI Peptide ID NO. 573352
  misc_feature (2)..(269): NCBI GI: 39950597 Blast Desc: MGG_01229 [Magnaporthe grisea 70-15] gi|145020965|gb|EDK05094.1| MGG_01229 [Magnaporthe grisea 70-15]
  misc_feature (1)..(261): NCBI GI: 261358685 Blast Desc: conserved [Verticillium albo-atrum VaMs.102]
  misc_feature (5)..(260): NCBI GI: 154289529 Blast Desc: BC1G_16091 [Botryotinia fuckeliana B05.10] gi|150849185|gb|EDN24378.1| BC1G_16091 [Botryotinia fuckeliana B05.10]
  misc_feature (5)..(260): NCBI GI: 156054752 Blast Desc: SS1G_06224 [Sclerotinia sclerotiorum 1980] gi|154704004|gb|EDO03743.1| SS1G_06224 [Sclerotinia sclerotiorum 1980]
  misc_feature (2)..(261): NCBI GI: 85114817 Blast Desc: NCU00938 [Neurospora crassa OR74A] gi|28926557|gb|EAA35528.1| [Neurospora crassa OR74A]
  misc_feature (3)..(259): NCBI GI: 116182564 Blast Desc: CHGG_01910 [Chaetomium globosum CBS 148.51] gi|88186207|gb|EAQ93675.1| CHGG_01910 [Chaetomium globosum CBS 148.51]
  misc_feature (3)..(262): NCBI GI: 256734735 Blast Desc: NECHADRAFT_75288 [Nectria haematococca mpVI 77-13-4]
  misc_feature (3)..(262): NCBI GI: 46107944 Blast Desc: FG00855.1 [Gibberella zeae PH-1]
  misc_feature (1)..(259): NCBI GI: 171694936 Blast Desc: protein product [Podospora anserina] gi|170947710|emb|CAP59872.1| protein product [Podospora anserina]
  misc_feature (5)..(252): NCBI GI: 189202318 Blast Desc: conserved [Pyrenophora tritici-repentis Pt-1C-BFP] gi|187984594|gb|EDU50082.1| conserved [Pyrenophora tritici-repentis Pt-1C-BFP]
MAYRILKRKWRSSMAMWIVMLFELGITIGLLILTALAHPNVYRDKLWQAGYELGYNSSPAQILYAYSMGKPIPAKPFVWSPLLTNFNFSIAIVSLFFLIAKLIGYVMDIWFPLPVLFINIGLTVLYAVSLGGQGGPDHLDPEQQSNVAWYIAHSCSVAKNQNIQKYCTDAKTLFGVTFVMLLIMAANTGLTIWALIPNDRDKRDWDSDDEDDDEDEPLDNKKGTSWEMRSIPPTPRTGVTPFTPRTTAFNTLDRKLPLRSNQPASTAYA

SEQ ID NO: 38426 - DNA, 2389 bp, Muscodor strobelii
  misc_feature: SGI EST ID NO. CUFF.92406.0
  misc_feature: Variant of the nucleotide sequence at SEQ ID NO 38424
caaaaatgtagagtgcccgagtgccgttgatcctgtgctcgtatgataatcctcttccgtttgaatgataatattaaccgcgagagtcgctggcgtatctcagcaactctcatatcgactctctatgtgatttatacttgcacgtggtgaaccgacgacgtacatatcctgaaaagcgtctctttctcagcgggcctggacgattgattgacgataaaacgactaatagctgcggaaaagcaagggacagcacagagcctcgccgcgacgaatatttaccgccctcctcccttgagtccaaataataccaagcatctcagcggcaccctcaacccctcatttcaatcatggcgtacagaatattaaagcgcaaatggaggtcgtcgatggctatgtggattgtgatgttattcgagctcggcatcaccatcggtctgctcattctcacggctctcgctcacccaaatgtgtaccgcgataagctgtggcaagccggctacgaactgggctacaactcgagtcccgctcaaatcctctacgcatattccatgggaaaaccgattcctgcgaaaccttttgtctggtcgccattattgaccaacttcaatttctccatcgccatcgttagcttgttcttcctgattgctaagttgatcggctatgttatggacatctggtttccattaccggtcctattcatcaatatcggcttgacggtgctctatgctgtgagtttgggcgggcagggcggacccgatcatcttgatcccgaacagcagagcaatgtggcgtggtacatcgcgcattcgtgctctgtagccaagaaccaaaacattcagaaatactgcacagatgcgaagactttattcggagtcaccttcgttatgctactcatcatggccgccaatacaggcttaacaatctgggccttgattcccaacgaccgcgacaagcgagattgggattccgatgacgaagacgacgatgaagatgagcctctcgacaacaagaagggcacgtcttgggagatgcgttcgattccgcccacacctcgcacaggtgtcacaccgtttaccccacgtacgacggctttcaatacattggataggaagctacctctacgctcgaaccaacccgcgtcaactgcatatgcctaaatgtccgggtggcggatgggaacagggcaggagattatttggatgtgaagataaggaagcaatgacatatttttttggatacccagacagaatctatactagcgagattctcgtgtctggacctcattggacatatttgtttccttggttgtgctacgatgggatgcaacttcgagggagttcggcgtgtcacagatgaatgactatgtgctataaagtccacatcccatactaagacatattttatttattctaatttccaatcgtcaagttccacaatgtcaccttgtgcctctgcagtgattacttagactaatgatgattttgctggaaattccattagtattatcttggaacccgatttactttagtgcctaaagccaaatcaactgcattcactcggctcctcaaaatccaaaacaacagcctgcgaatccggcactttgacatccacagccccattcttaacactcacgaactcacccgtcgtgacattatccaatttgacaggctttccaagcttcaactcataattataactcgttccatcccaagtaatacccgtaatagcatcactaccattggcataaagtctcttaaccgcgacctgcgccccatcatccaatccactaaccgtaaagctatacgctctagacggtctcggtgtggggttaagcgtcgttagatctcccgtgccgtttagtgtgtagttgtacgctcgcaaattgacgaccatgatacgcgcgattgtgccgttgacgtatgctgcgtacgcagcttgcaggtttacgtcaccatctgtggcgttcgtgtgcgtgagatcgatgtgtgcaactttcgtggtgttttttcttagatcgcctagaaatgcggcgactgcaatatttccgtaatatggcgatttggtcccgatgctctggagatcagtggcaattggttgccaggacgcgtaacggtagtttgtgcccatgtgcatatgtactcttccaatgttgactgctgcgcagtagagattgaagtcaataccccagagtgcggcgccgaaggaattggagagaccgggttttccttggttgtagagggagtttgtctcgcccatgatctgaactaggtcggaagacttgttcgttatgctgttgaattcgatgacgtgtggattgacactatttttggttgatgtgtggttcatgagtgttccttggagggtgacgccggggaccatagcgccggag

SEQ ID NO: 38427 - DNA, 1665 bp, Muscodor strobelii
  misc_feature: SGI cDNA ID NO. 573353
  misc_feature: Encodes the peptide sequence at SEQ ID NO 38428
atggcagcgcttctgtctgtgctggcgctctcgagcccagctttagcgaagatctccgcgatcgtcccttcgtcaatcaacacggatggtcctcaaaccctagccgacgatctcttaattggtcaacctctggatgggtttgtgagtttctcaatcgaattctcgtcatttccagacttcgcagggaacaaatcaaatccaaataagttctccgataacttgttaaacaatctcggaaatcttaccggaaccaagccatacatcagggtcggtggcaatactcaagattttgcaatctacaacccagatctcgaagtcgggctgaaaggcacagtcaatgagacgagatcaccagactacccaacaacaatcgagattgggcccagctacttcgaatcatataccacctttcccagaacgaaattctcacatggtttcaatctcggcgggaacaactacagtgccgaagctttaaggaccacccttgaggagaccaccgagctcgcctgcaaggcgctaggaaacaatctttacttgtgggaatatggcaacgaaccagacttgttctctacgcaaaagttccctgtccgtccgtctaattacaatgagtcagattgggttgcagaatggcttaacgggacccggttcattgatactgtggttaaggaaaactgtcctagcttgttgaacgatagcacatatggatatcttgcgccatcatacgccggcgtcaataatcatctgaaggctcctagagcatggtccgatggtcttgacacggatggaaacattaaatactattcgacacataattacatctccggcgctatggtccccggcgtcaccctccaaggaacactcatgaaccacacatcaaccaaaaatagtgtcaatccacacgtcatcgaattcaacagcataacgaacaagtcttccgacctagttcagatcatgggcgagacaaactccctctacaaccaaggaaaacccggtctctccaattccttcggcgccgcactctggggtattgacttcaatctctactgcgcagcagtcaacattggaagagtacatatgcacatgggcacaaactaccgttacgcgtcctggcaaccaattgccactgatctccagagcatcgggaccaaatcgccatattacggaaatattgcagtcgccgcatttctaggcgatctaagaaaaaacaccacgaaagttgcacacatcgatctcacgcacacgaacgccacagatggtgacgtaaacctgcaagctgcgtacgcagcatacgtcaacggcacaatcgcgcgtatcatggtcgtcaatttgcgagcgtacaactacacactaaacggcacgggagatctaacgacgcttaaccccacaccgagaccgtctagagcgtatagctttacggttagtggattggatgatggggcgcaggtcgcggttaagagactttatgccaatggtagtgatgctattacgggtattacttgggatggaacgagttataattatgagttgaagcttggaaagcctgtcaaattggataatgtcacgacgggtgagttcgtgagtgttaagaatggggctgtggatgtcaaagtgccggattcgcaggctgttgttttggattttgaggagccgagtgaatgcagttga

SEQ ID NO: 38428 - protein, 554 aa, Muscodor strobelii
  misc_feature: SGI Peptide ID NO. 573353
  misc_feature (20)..(521): NCBI GI: 85114813 Blast Desc: NCU00937 [Neurospora crassa OR74A] gi|28926556|gb|EAA35527.1| [Neurospora crassa OR74A] gi|156071386|dbj|BAF75800.1| beta-glucuronidase [Neurospora
  misc_feature (44)..(547): NCBI GI: 171694932 Blast Desc: protein product [Podospora anserina] gi|170947708|emb|CAP59870.1| protein product [Podospora anserina]
  misc_feature (41)..(547): NCBI GI: 156060939 Blast Desc: SS1G_02612 [Sclerotinia sclerotiorum 1980] gi|154700016|gb|EDN99754.1| SS1G_02612 [Sclerotinia sclerotiorum 1980]
  misc_feature (44)..(549): NCBI GI: 261358686 Blast Desc: beta-glucuronidase [Verticillium albo-atrum VaMs.102]
  misc_feature (48)..(547): NCBI GI: 154322026 Blast Desc: BC1G_01160 [Botryotinia fuckeliana B05.10] gi|150850407|gb|EDN25600.1| BC1G_01160 [Botryotinia fuckeliana B05.10]
  misc_feature (47)..(521): NCBI GI: 116182562 Blast Desc: CHGG_01909 [Chaetomium globosum CBS 148.51] gi|88186206|gb|EAQ93674.1| CHGG_01909 [Chaetomium globosum CBS 148.51]
  misc_feature (44)..(547): NCBI GI: 145233889 Blast Desc: An02g11890 [Aspergillus niger] gi|134057255|emb|CAK96418.1| protein product [Aspergillus niger]
  misc_feature (41)..(548): NCBI GI: 189205395 Blast Desc: conserved [Pyrenophora tritici-repentis Pt-1C-BFP] gi|187975125|gb|EDU41751.1| conserved [Pyrenophora tritici-repentis Pt-1C-BFP]
  misc_feature (1)..(535): NCBI GI: 169778435 Blast Desc: [Aspergillus oryzae RIB40] gi|83772420|dbj|BAE62550.1| protein product [Aspergillus oryzae]
  misc_feature (46)..(536): NCBI GI: 145248842 Blast Desc: An14g01330 [Aspergillus niger] gi|134081431|emb|CAK41913.1| protein product [Aspergillus niger]
MAALLSVLALSSPALAKISAIVPSSINTDGPQTLADDLLIGQPLDGFVSFSIEFSSFPDFAGNKSNPNKFSDNLLNNLGNLTGTKPYIRVGGNTQDFAIYNPDLEVGLKGTVNETRSPDYPTTIEIGPSYFESYTTFPRTKFSHGFNLGGNNYSAEALRTTLEETTELACKALGNNLYLWEYGNEPDLFSTQKFPVRPSNYNESDWVAEWLNGTRFIDTVVKENCPSLLNDSTYGYLAPSYAGVNNHLKAPRAWSDGLDTDGNIKYYSTHNYISGAMVPGVTLQGTLMNHTSTKNSVNPHVIEFNSITNKSSDLVQIMGETNSLYNQGKPGLSNSFGAALWGIDFNLYCAAVNIGRVHMHMGTNYRYASWQPIATDLQSIGTKSPYYGNIAVAAFLGDLRKNTTKVAHIDLTHTNATDGDVNLQAAYAAYVNGTIARIMVVNLRAYNYTLNGTGDLTTLNPTPRPSRAYSFTVSGLDDGAQVAVKRLYANGSDAITGITWDGTSYNYELKLGKPVKLDNVTTGEFVSVKNGAVDVKVPDSQAVVLDFEEPSECS

SEQ ID NO: 38429 - DNA, 3110 bp, Muscodor strobelii
  misc_feature: SGI EST ID NO. CUFF.92407.1
  misc_feature: Variant of the nucleotide sequence at SEQ ID NO 38427
aaacaatctcggaaatcttaccggaaccaagccatacatcagggtcggtggcaatactcaagattttgcaatctacaacccagatctcgaagtcgggctgaaaggcacagtcaatgagacgagatcaccagactacccaacaacaatcgagattgggcccagctacttcgaatcatataccacctttcccagaacgaaattctcacatggtttcaatctcggcgggaacaactacagtgccgaagctttaaggaccacccttgaggagaccaccgagctcgcctgcaaggcgctaggaaacaatctttacttgtgggaatatggcaacgaaccagacttgttctctacgcaaaagttccctgtccgtccgtctaattacaatgagtcagattgggttgcagaatggcttaacgggacccggttcattgatactgtggttaaggaaaactgtcctagcttgttgaacgatagcacatatggatatcttgcgccatcatacgccggcgtcaataatcatctgaaggctcctagagcatggtccgatggtcttgacacggatggaaacattaaatactattcgacacataattacatctccggcgctatggtccccggcgtcaccctccaaggaacactcatgaaccacacatcaaccaaaaatagtgtcaatccacacgtcatcgaattcaacagcataacgaacaagtcttccgacctagttcagatcatgggcgagacaaactccctctacaaccaaggaaaacccggtctctccaattccttcggcgccgcactctggggtattgacttcaatctctactgcgcagcagtcaacattggaagagtacatatgcacatgggcacaaactaccgttacgcgtcctggcaaccaattgccactgatctccagagcatcgggaccaaatcgccatattacggaaatattgcagtcgccgcatttctaggcgatctaagaaaaaacaccacgaaagttgcacacatcgatctcacgcacacgaacgccacagatggtgacgtaaacctgcaagctgcgtacgcagcatacgtcaacggcacaatcgcgcgtatcatggtcgtcaatttgcgagcgtacaactacacactaaacggcacgggagatctaacgacgcttaaccccacaccgagaccgtctagagcgtatagctttacggttagtggattggatgatggggcgcaggtcgcggttaagagactttatgccaatggtagtgatgctattacgggtattacttgggatggaacgagttataattatgagttgaagcttggaaagcctgtcaaattggataatgtcacgacgggtgagttcgtgagtgttaagaatggggctgtggatgtcaaagtgccggattcgcaggctgttgttttggattttgaggagccgagtgaatgcagttgatttggctttaggcactaaagtaaatcgggttccaagataatactaatggaatttccagcaaaatcatcattagtctaagtaatcactgcagaggcacaaggtgacattgtggaacttgacgattggaaattagaataaataaaatatgtcttagtatgggatgtggactttatagcacatagtcattcatctgtgacacgccgaactccctcgaagttgcatcccatcgtagcacaaccaaggaaacaaatatgtccaatgaggtccagacacgagaatctcgctagtatagattctgtctgggtatccaaaaaaatatgtcattgcttccttatcttcacatccaaataatctcctgccctgttcccatccgccacccggacatttaggcatatgcagttgacgcgggttggttcgagcgtagaggtagcttcctatccaatgtattgaaagccgtcgtacgtggggtaaacggtgtgacacctgtgcgaggtgtgggcggaatcgaacgcatctcccaagacgtgcccttcttgttgtcgagaggctcatcttcatcgtcgtcttcgtcatcggaatcccaatctcgcttgtcgcggtcgttgggaatcaaggcccagattgttaagcctgtattggcggccatgatgagtctgtttcgcattggttagtatgatttgttcgtggtatgaggagaaagggtagatattggcttacagcataacgaaggtgactccgaataaagtcttcgcatctgtgcagtatttctgaatgttttggttcttggctacagagcacgaatgcgcgatgtaccacgccacattgctctgctgttcgggatcaagatgatcgggtccgccctgcccgcccaaactcacagcatagagcaccgtcaagccgatattgatgaataggaccggtaatggaaaccagatgtccataacatagccgatcaacttagcaatcaggaagaacaagctaacgatggcgatggagaaattgaagttggtcaatctgagtagatcgaatatcagcaatcgaatctagctatttaaaccagtatgcgataaaacttacaatggcgaccagacaaaaggtttcgcaggaatcggttttcccatggaatatgcgtagaggatttgagcgggactcgagttgtagcccagttcgtagccggcttgccacagcttatcgcggtacacatttgggtgagcgagagccgtgagaatgagcagaccgatggtgatgccgagctcgaataacatcacaatccacatagccatcgacgacctccatttgcgctttaatattctgtacgccatgattgaaatgaggggttgagggtgccgctgagatgcttggtattatttggactcaagggaggagggcggtaaatattcgtcgcggcgaggctctgtgctgtcccttgcttttccgcagctattagtcgttttatcgtcaatcaatcgtccaggcccgctgagaaagagacgcttttcaggatatgtacgtcgtcggttcaccacgtgcaagtataaatcacatagagagtcgatatgagagttgctgagatacgccagcgactctcgcggttaatattatcattcaaacggaagaggattatcatacgagcacaggatcaacggcactcgggcactctacatttttg

SEQ ID NO: 38430 - DNA, 1488 bp, Muscodor strobelii
  misc_feature: SGI cDNA ID NO. 573354
  misc_feature: Reduced expression when VOC is produced
  misc_feature: Encodes the peptide sequence at SEQ ID NO 38431
atggctccaaagcttaacgacccgtccctcttcaagacggacgtctgctacgtaaacggcgaatgggtgaaggcaagttctggcaacacattcgaagtccacgaccccgcgacaggtaaactcatcggaacctgccccgagttcacctcaaaagacaccgagaccgccattgcagccgctgccgaagccttcaagacgtttaaacacaaaaccggtcgcgagcgatcgaagctcttacgaaaatggtacgatctcatgatggaaaatgcagaggatctagctacattgatcacattggagaatggcaagcccttggcagacgcaaaaggtgaggtcaattacgcagccgctttcttcgaatggtttagtgaggaagctccacgaacatacggcgataccatcccagctactgtcccgggaaatagagtgatcactcttaggcagcctgttggcgtatgcggattaatcactccgtggaacttccctgccgccatgatcacccgaaagattggccctgctcttgctgctggttgtacgactgtctgcaaaacccctggcgagacgcctttcacctcgttagcattggcggaactggcgcatcgtgccggaatccccaagggtgttgtcaatgttattacgacgctcaagaacacacctgagattggcgagctcttgacgacacaccctactatcgccaaggtttcattcactggctctacaggcgtcggaaagcttctgatgaagaatgcttcttcgaccttgaagattctgtcaatggaacttggtggcaacgcacctttcatcgtttttgatgatgctgatgtcgacgcagcggtggctggtgcagttgcatcaaagttccgctcctctggtcaaacatgtgtctgcgccaacagaatctacgtacaggcgggtgtatacgacgagtttgcccagaagctggctgaaaaggtcaaagcattcaaggttggccatggcttcgatgagggcatcacacatggccctcttattcacgatcgcgcagtgtccaaggttgattcccatgtgcgaaatgccgaagagaagggtggaaaagtcattgtgggaggtcaaaagattcccgatctgggctccaacttctatcaacctaccgtgattacgggcatgaccaaggacatggccatcgctaccgaagagactttcggtccggtagcaggtctcttcaaatttgatagtgagcaggaagttgtagacctagctaatgcggctgaagtcggtcttgctggctacttcttctcacgtgatctggagagaataacgcgggtgtctgaggctttggaggttggcatggtaggagttaatactggcttgatctccgactgcgctgcaccgtttggtggtgtaaaggagtctggattcggacgagagggctcaaagtatggtatcgaggagtaccagcacatcaagatgatcacatatggtggcatgaacaagccattgcagagctga

SEQ ID NO: 38431 - protein, 495 aa, Muscodor strobelii
  misc_feature: SGI Peptide ID NO. 573354
  misc_feature (22)..(484): Pfam Id: PF00171 Pfam Desc: Aldehyde dehydrogenase family
  misc_feature (1)..(495): NCBI GI: 116182560 Blast Desc: succinate-semialdehyde dehydrogenase NADP+ [Chaetomium globosum CBS 148.51] gi|88186205|gb|EAQ93673.1| succinate-semialdehyde dehydrogenase NADP+ [Chaetomium globosum
  misc_feature (1)..(494): NCBI GI: 164428697 Blast Desc: succinate semialdehyde dehydrogenase [Neurospora crassa OR74A] gi|157072245|gb|EAA35526.2| succinate semialdehyde dehydrogenase [Neurospora crassa OR74A]
  misc_feature (3)..(495): NCBI GI: 154322028 Blast Desc: BC1G_01161 [Botryotinia fuckeliana B05.10] gi|150850408|gb|EDN25601.1| BC1G_01161 [Botryotinia fuckeliana B05.10]
  misc_feature (3)..(495): NCBI GI: 156060937 Blast Desc: SS1G_02611 [Sclerotinia sclerotiorum 1980] gi|154700015|gb|EDN99753.1| SS1G_02611 [Sclerotinia sclerotiorum 1980]
  misc_feature (1)..(495): NCBI GI: 171694934 Blast Desc: protein product [Podospora anserina] gi|170947709|emb|CAP59871.1| protein product [Podospora anserina]
  misc_feature (3)..(489): NCBI GI: 256734736 Blast Desc: [Nectria haematococca mpVI 77-13-4]
  misc_feature (3)..(495): NCBI GI: 121707026 Blast Desc: succinate-semialdehyde dehydrogenase Uga2, [Aspergillus clavatus NRRL 1] gi|119399858|gb|EAW10284.1| succinate-semialdehyde dehydrogenase Uga2, [Aspergillus clavatus
  misc_feature (3)..(495): NCBI GI: 259481610 Blast Desc: TPA: succinate-semialdehyde dehydrogenase (Eurofung) [Aspergillus nidulans FGSC A4]
  misc_feature (3)..(495): NCBI GI: 169773585 Blast Desc: [Aspergillus oryzae RIB40] gi|83769122|dbj|BAE59259.1| protein product [Aspergillus oryzae]
  misc_feature (3)..(487): NCBI GI: 46107942 Blast Desc: FG00854.1 [Gibberella zeae PH-1]
  misc_feature (1)..(485): SWISSPROT Homolog: EC 1.2.1.16 Succinate-semialdehyde dehydrogenase (NAD(P)(+))
  misc_feature: Useful for introducing or modulating the production of volatile compounds
  misc_feature: Useful for fungicidal and/or biocontrol applications
MAPKLNDPSLFKTDVCYVNGEWVKASSGNTFEVHDPATGKLIGTCPEFTSKDTETAIAAAAEAFKTFKHKTGRERSKLLRKWYDLMMENAEDLATLITLENGKPLADAKGEVNYAAAFFEWFSEEAPRTYGDTIPATVPGNRVITLRQPVGVCGLITPWNFPAAMITRKIGPALAAGCTTVCKTPGETPFTSLALAELAHRAGIPKGVVNVITTLKNTPEIGELLTTHPTIAKVSFTGSTGVGKLLMKNASSTLKILSMELGGNAPFIVFDDADVDAAVAGAVASKFRSSGQTCVCANRIYVQAGVYDEFAQKLAEKVKAFKVGHGFDEGITHGPLIHDRAVSKVDSHVRNAEEKGGKVIVGGQKIPDLGSNFYQPTVITGMTKDMAIATEETFGPVAGLFKFDSEQEVVDLANAAEVGLAGYFFSRDLERITRVSEALEVGMVGVNTGLISDCAAPFGGVKESGFGREGSKYGIEEYQHIKMITYGGMNKPLQS

SEQ ID NO: 38432 - DNA, 2020 bp, Muscodor strobelii
  misc_feature: SGI EST ID NO. CUFF.92403.0
  misc_feature: Variant of the nucleotide sequence at SEQ ID NO 38430
ggcccctccaaacaccgatgtcgtcagtgttattgtgcaaaggaactctcaactccaattcaactttagactcctctagtcgtgtcgagtcccgacactccatgttcgtgtgattcgctaagctccgtagttccttccctttagtccgttcccctcctctgcgatcctgatatttaattgcttaggttgcttcccttctctgggagagctgttcaatatgacgttacttcatagcatacacagaagcgcattgtcttctacacgtcttgcaatcagatcacagttccagagaagtagtctgccaatagtaacatctcgattggcttccacaatggctccaaagcttaacgacccgtccctcttcaagacggacgtctgctacgtaaacggcgaatgggtgaaggcaagttctggcaacacattcgaagtccacgaccccgcgacaggtaaactcatcggaacctgccccgagttcacctcaaaagacaccgagaccgccattgcagccgctgccgaagccttcaagacgtttaaacacaaaaccggtcgcgagcgatcgaagctcttacgaaaatggtacgatctcatgatggaaaatgcagaggatctagctacattgatcacattggagaatggcaagcccttggcagacgcaaaaggtgaggtcaattacgcagccgctttcttcgaatggtttagtgaggaagctccacgaacatacggcgataccatcccagctactgtcccgggaaatagagtgatcactcttaggcagcctgttggcgtatgcggattaatcactccgtggaacttccctgccgccatgatcacccgaaagattggccctgctcttgctgctggttgtacgactgtctgcaaaacccctggcgagacgcctttcacctcgttagcattggcggaactggcgcatcgtgccggaatccccaagggtgttgtcaatgttattacgacgctcaagaacacacctgagattggcgagctcttgacgacacaccctactatcgccaaggtttcattcactggctctacaggcgtcggaaagcttctgatgaagaatgcttcttcgaccttgaagattctgtcaatggaacttggtggcaacgcacctttcatcgtttttgatgatgctgatgtcgacgcagcggtggctggtgcagttgcatcaaagttccgctcctctggtcaaacatgtgtctgcgccaacagaatctacgtacaggcgggtgtatacgacgagtttgcccagaagctggctgaaaaggtcaaagcattcaaggttggccatggcttcgatgagggcatcacacatggccctcttattcacgatcgcgcagtgtccaaggttgattcccatgtgcgaaatgccgaagagaagggtggaaaagtcattgtgggaggtcaaaagattcccgatctgggctccaacttctatcaacctaccgtgattacgggcatgaccaaggacatggccatcgctaccgaagagactttcggtccggtagcaggtctcttcaaatttgatagtgagcaggaagttgtagacctagctaatgcggctgaagtcggtcttgctggctacttcttctcacgtgatctggagagaataacgcgggtgtctgaggctttggaggttggcatggtaggagttaatactggcttgatctccgactgcgctgcaccgtttggtggtgtaaaggagtctggattcggacgagagggctcaaagtatggtatcgaggagtaccagcacatcaagatgatcacatatggtggcatgaacaagccattgcagagctgatgtggagttgcaaacgggacgcggacagtgtaacagtgtaacattgatatgatgcctttagttagcttatgtacataatgaacagggatttgtattttatttacatcaaacagtgagcttagcctgctttaaatgcctataccgcaatagcagtcataggtagattctcattcgctgcttgtaatacgcagcgtattctgc

SEQ ID NO: 38433 - DNA, 1539 bp, Muscodor strobelii
  misc_feature: SGI cDNA ID NO. 573355
  misc_feature: Encodes the peptide sequence at SEQ ID NO 38434
atgtcaattttcagtcttcacaatggcccaaagcaaagcgctgacgtcaatgaccaactgcagcttaacgacccgtccctcttcaagacggacgtctgctacgtaaacggcgaatgggtgaaggcaagttctggcaacacattcgaagtccacgaccccgcgacaggtaaactcatcggaacctgccccgagttcacctcaaaagacaccgagaccgccattgcagccgctgccgaagccttcaagacgtttaaacacaaaaccggtcgcgagcgatcgaagctcttacgaaaatggtacgatctcatgatggaaaatgcagaggatctagctacattgatcacattggagaatggcaagcccttggcagacgcaaaaggtgaggtcaattacgcagccgctttcttcgaatggtttagtgaggaagctccacgaacatacggcgataccatcccagctactgtcccgggaaatagagtgatcactcttaggcagcctgttggcgtatgcggattaatcactccgtggaacttccctgccgccatgatcacccgaaagattggccctgctcttgctgctggttgtacgactgtctgcaaaacccctggcgagacgcctttcacctcgttagcattggcggaactggcgcatcgtgccggaatccccaagggtgttgtcaatgttattacgacgctcaagaacacacctgagattggcgagctcttgacgacacaccctactatcgccaaggtttcattcactggctctacaggcgtcggaaagcttctgatgaagaatgcttcttcgaccttgaagattctgtcaatggaacttggtggcaacgcacctttcatcgtttttgatgatgctgatgtcgacgcagcggtggctggtgcagttgcatcaaagttccgctcctctggtcaaacatgtgtctgcgccaacagaatctacgtacaggcgggtgtatacgacgagtttgcccagaagctggctgaaaaggtcaaagcattcaaggttggccatggcttcgatgagggcatcacacatggccctcttattcacgatcgcgcagtgtccaaggttgattcccatgtgcgaaatgccgaagagaagggtggaaaagtcattgtgggaggtcaaaagattcccgatctgggctccaacttctatcaacctaccgtgattacgggcatgaccaaggacatggccatcgctaccgaagagactttcggtccggtagcaggtctcttcaaatttgatagtgagcaggaagttgtagacctagctaatgcggctgaagtcggtcttgctggctacttcttctcacgtgatctggagagaataacgcgggtgtctgaggctttggaggttggcatggtaggagttaatactggcttgatctccgactgcgctgcaccgtttggtggtgtaaaggagtctggattcggacgagagggctcaaagtatggtatcgaggagtaccagcacatcaagatgatcacatatggtggcatgaacaagccattgcagagctga

SEQ ID NO: 38434 - protein, 512 aa, Muscodor strobelii
  misc_feature: SGI Peptide ID NO. 573355
  misc_feature (39)..(501): Pfam Id: PF00171 Pfam Desc: Aldehyde dehydrogenase family
  misc_feature (21)..(512): NCBI GI: 116182560 Blast Desc: succinate-semialdehyde dehydrogenase NADP+ [Chaetomium globosum CBS 148.51] gi|88186205|gb|EAQ93673.1| succinate-semialdehyde dehydrogenase NADP+ [Chaetomium globosum
  misc_feature (21)..(511): NCBI GI: 164428697 Blast Desc: succinate semialdehyde dehydrogenase [Neurospora crassa OR74A] gi|157072245|gb|EAA35526.2| succinate semialdehyde dehydrogenase [Neurospora crassa OR74A]
  misc_feature (21)..(512): NCBI GI: 154322028 Blast Desc: BC1G_01161 [Botryotinia fuckeliana B05.10] gi|150850408|gb|EDN25601.1| BC1G_01161 [Botryotinia fuckeliana B05.10]
  misc_feature (21)..(512): NCBI GI: 156060937 Blast Desc: SS1G_02611 [Sclerotinia sclerotiorum 1980] gi|154700015|gb|EDN99753.1| SS1G_02611 [Sclerotinia sclerotiorum 1980]
  misc_feature (21)..(512): NCBI GI: 171694934 Blast Desc: protein product [Podospora anserina] gi|170947709|emb|CAP59871.1| protein product [Podospora anserina]
  misc_feature (21)..(506): NCBI GI: 256734736 Blast Desc: [Nectria haematococca mpVI 77-13-4]
  misc_feature (22)..(512): NCBI GI: 259481610 Blast Desc: TPA: succinate-semialdehyde dehydrogenase (Eurofung) [Aspergillus nidulans FGSC A4]
  misc_feature (21)..(512): NCBI GI: 121707026 Blast Desc: succinate-semialdehyde dehydrogenase Uga2, [Aspergillus clavatus NRRL 1] gi|119399858|gb|EAW10284.1| succinate-semialdehyde dehydrogenase Uga2, [Aspergillus clavatus
  misc_feature (22)..(512): NCBI GI: 169773585 Blast Desc: [Aspergillus oryzae RIB40] gi|83769122|dbj|BAE59259.1| protein product [Aspergillus oryzae]
  misc_feature (21)..(504): NCBI GI: 46107942 Blast Desc: FG00854.1 [Gibberella zeae PH-1]
  misc_feature (21)..(502): SWISSPROT Homolog: EC 1.2.1.16 Succinate-semialdehyde dehydrogenase (NAD(P)(+))
  misc_feature: Useful for introducing or modulating the production of volatile compounds
  misc_feature: Useful for fungicidal and/or biocontrol applications
MSIFSLHNGPKQSADVNDQLQLNDPSLFKTDVCYVNGEWVKASSGNTFEVHDPATGKLIGTCPEFTSKDTETAIAAAAEAFKTFKHKTGRERSKLLRKWYDLMMENAEDLATLITLENGKPLADAKGEVNYAAAFFEWFSEEAPRTYGDTIPATVPGNRVITLRQPVGVCGLITPWNFPAAMITRKIGPALAAGCTTVCKTPGETPFTSLALAELAHRAGIPKGVVNVITTLKNTPEIGELLTTHPTIAKVSFTGSTGVGKLLMKNASSTLKILSMELGGNAPFIVFDDADVDAAVAGAVASKFRSSGQTCVCANRIYVQAGVYDEFAQKLAEKVKAFKVGHGFDEGITHGPLIHDRAVSKVDSHVRNAEEKGGKVIVGGQKIPDLGSNFYQPTVITGMTKDMAIATEETFGPVAGLFKFDSEQEVVDLANAAEVGLAGYFFSRDLERITRVSEALEVGMVGVNTGLISDCAAPFGGVKESGFGREGSKYGIEEYQHIKMITYGGMNKPLQS

SEQ ID NO: 38435 - DNA, 2020 bp, Muscodor strobelii; identical to SEQ ID NO: 38432
  misc_feature: SGI EST ID NO. CUFF.92403.0
  misc_feature: Variant of the nucleotide sequence at SEQ ID NO 38433

SEQ ID NO: 38436 - DNA, 336 bp, Muscodor strobelii
  misc_feature: SGI cDNA ID NO. 573356
  misc_feature: Encodes the peptide sequence at SEQ ID NO 38437
atggactcacagcccggctctgttgtaggcatggaaccaccgagccagcagggtgggacaccaaaagtttccaaccgactatatcccttgccttcatcgtctcaaaatatcagtgttgacatcgtggctatctatgcgagcccaagcggtacagatccaccctggatctatcgcccaccttcaccaagcacgaaacttgatcctcgcccgcccgtgcagcctgagcaagatacgggtgcgatgcacctcagtcaacaacctgctgcagacgctcctcaactacagcgacaaacgaatgtaacggaaccactggctcacgacgttaacctcgaatag

SEQ ID NO: 38437 - protein, 111 aa, Muscodor strobelii
  misc_feature: SGI Peptide ID NO. 573356
MDSQPGSVVGMEPPSQQGGTPKVSNRLYPLPSSSQNISVDIVAIYASPSGTDPPWIYRPPSPSTKLDPRPPVQPEQDTGAMHLSQQPAADAPQLQRQTNVTEPLAHDVNLE

SEQ ID NO: 38438 - DNA, 260 bp, Muscodor strobelii
  misc_feature: SGI EST ID NO. CUFF.92358.0
  misc_feature: Variant of the nucleotide sequence at SEQ ID NO 38436
gcgacaaattgctatattggttgataccctcccgactgcgaactgtagtttggagaatgtacatattcgtcccaacctgtaagcccatacaagaagataggtagtaacaacccgtctgtgatataccattttgaatatcactatacggtaatcgcgcacaatggactcacagcccggctctgttgtaggcatggaaccaccgagccagcagggtgggacaccaaaagtttccaaccgactatatcccttgccttcatcgt

SEQ ID NO: 38439 - DNA, 2835 bp, Muscodor strobelii
  misc_feature: SGI cDNA ID NO. 573357
  misc_feature: Encodes the peptide sequence at SEQ ID NO 38440
atggtcggccatttcgacctatctgaagtcgcaatggttgggtttctcgtaagggttgcgtctacattgaccgaagaactacgacgcgaaaggagggacgtaacgcctggtctcagccgaccaattattttcgtcgcgtacggtgacgcagccagtattgtccaggaggcacttcagcgtgcccccgatttggccgtggccgcaattggtctgttattctttgaccaaaatcatcgttctggagatatgtcgaatattacaatcccgaacatcttcgtcacctccttctatggcaacagttctgtcgacggcgatcaggcgcagagtgacaatagattcgtgcagaagacgaaattaaaatgcaccaaagcagcagagcttggaaagtttagaaactccgaggatccagactatctgaaggtcaaagctacaatacagaaatacatcaattttgttggaacacgccgtctctgggatggaatagctagataccaggacacggaaggaattaggacccaaatatcgaaaggagcggacgtgaatagacagaattcgcaagggcagagcgcgttgcaccttgccgtaatagcccaaagcctagagacagtcagattgcttctcgatagcaacgccaacgttaacgttaaagacaaaaatggtcgatccccgttagtcgaagcaatagaagctataaatagcaggataattcttgcgttgttggaaagaggcgcaattctggaggaagagtatagggacaaagtgatgaacgaccagatcgaaaatatcgtcggagacaacgagatcaaaaatctgattcagacagtgaagcgctttgccggtccctcaacagctagatcgaacaccgtgaacgtgaagggatcaaaattatcagacccacctattgattgcctagaagcctcgtctcagtttatggctacagtgacaaaattcgagctgaagacggaggatgaaggcctaggaagcagtgacggcgggaatcagagggagtaccacacgtcgcggacgataccagtttcgaatctgctctacggcgaagacgacgatgcttcaatcgacgaaaccctcggagaacacgaatggagatggtatcatctccccgctaacaacatggattggattaagtggtctaagaatgatctaattctctattgtcctcagttattaattgatgaccaggatgattgtacgatcacggttgtctttagtagccctaacaccggaaagatgccctaccttcattttgagacaaacgaaggccgcattaaactcaggcacgcgatcaagcagatatcgagggaccggcgcaattttgcagacgattcttcgatcacagccacggaggaggatttcgatattttagcaagagcaagctccgacgaagacagcgaaaacgacgactgggatgacatatacgacagtgatgattgccacgagaaaggcaacattagaaatcaagttgcaaatacagatgaatcttcctcggaggttgaagaagatcagttagtcagcgagtcactgcgaaaggcctccgaattcaagagtatcgaagatactgattttcgtgataccaatcaagttgtccagcgctacgcagtcaaagcactaccgaatctcagcgagaaaacggccttgtccggtcaattgatcatggtcgatcaactctggctctggattatccaaaatcaagagaaaacgagaaatatcatcatcacgagtttccctcaggcatggcgccaatataagggatcccgagtcgacattatcgacttacatgaacaaatccgaaactatttgcaccaagtgtcaagagaggcaattacttccgtgcaccaactcgcatctgtaattatcaggaaatgtacgcgggtttttgggccgttcaaaataccatctgagcctggattctccgatatctttgacccgtccataagcgatgtgaatgatcgattatcgggcatgtacgatgggctccctggattgttagcgaatgttgaagaagaagacgatttatttcagccggaagcccttgcgcaaacccaaagtacgaaaaacaagactgcaaagaagaaaaatcacccgaaggtttaccggcacaagattgctgcagaagtcgaacttctcgttgagatccaagatatcaaagacgaactcggcatcgttcagatggtattaaaccaacagtcttcggctctagccgttcctcaggatggagttgataaacagaacataacaacagaggccatttcttccgatacttttcctttacttgatggaaagcctgttgactattacaccactgctaataagagacttgtcgacggcatgcttgcgcgtgcagaagatgtataccgtcgggttaatcacttgatcgacttgaaacaaaagcaagcgaatctagatgatgctcgatatgcacgtaaagaagctgtcagcgccgcaaaggaagggaagacaattttagcgttgacgatcgtcaacatgatattcctcccactgtctttcttgacaagcttctttgctcttgaaatcacggagttccctaaaggccttgaaaccggacagaattcactaggcctagcctgggcttccaaatacatcttcggcatatcgctcgccattgccatcttgtctatttccattgcattggccatcggtccaatggaggggcctgccaaaaggctctggcgcgcttcgaaatactgggggatcctgattctttcagtacttgcagtggtcgtcgtggctctgatcctcgtggaagcgcagaagaacttctggatcactgctctaattagtcggatccttttattttaa

SEQ ID NO: 38440 - protein, 944 aa, Muscodor strobelii
  misc_feature: SGI Peptide ID NO. 573357
  misc_feature (186)..(218): Pfam Id: PF00023 Pfam Desc: Ankyrin repeat
  misc_feature (416)..(908): NCBI GI: 212531615 Blast Desc: ankyrin repeat protein [Penicillium marneffei ATCC 18224] gi|210071328|gb|EEA25417.1| ankyrin repeat protein [Penicillium marneffei ATCC 18224]
  misc_feature (416)..(902): NCBI GI: 242773540 Blast Desc: ankyrin repeat protein [Talaromyces stipitatus ATCC 10500] gi|218721880|gb|EED21298.1| ankyrin repeat protein [Talaromyces stipitatus ATCC 10500]
  misc_feature (416)..(891): NCBI GI: 145230782 Blast Desc: An01g12480 [Aspergillus niger] gi|134055776|emb|CAK37300.1| protein product [Aspergillus niger]
  misc_feature (392)..(891): NCBI GI: 115492215 Blast Desc: conserved [Aspergillus terreus NIH2624] gi|114197595|gb|EAU39295.1| conserved [Aspergillus terreus NIH2624]
  misc_feature (416)..(908): NCBI GI: 70996130 Blast Desc: ankyrin repeat protein [Aspergillus fumigatus Af293] gi|66850455|gb|EAL90782.1| ankyrin repeat protein [Aspergillus fumigatus Af293] gi|159131573|gb|EDP56686.1| ankyrin repeat
  misc_feature (383)..(908): NCBI GI: 169783090 Blast Desc: [Aspergillus oryzae RIB40] gi|83774751|dbj|BAE64874.1| protein product [Aspergillus oryzae]
  misc_feature (383)..(908): NCBI GI: 238492835 Blast Desc: ankyrin repeat protein [Aspergillus flavus NRRL3357] gi|220696148|gb|EED52490.1| ankyrin repeat protein [Aspergillus flavus NRRL3357]
  misc_feature (524)..(908): NCBI GI: 119495022 Blast Desc: ankyrin repeat protein [Neosartorya fischeri NRRL 181] gi|119412469|gb|EAW22410.1| ankyrin repeat protein [Neosartorya fischeri NRRL 181]
  misc_feature (524)..(891): NCBI GI: 121701093 Blast Desc: ankyrin repeat protein [Aspergillus clavatus NRRL 1] gi|119396954|gb|EAW07385.1| ankyrin repeat protein [Aspergillus clavatus NRRL 1]
  misc_feature (416)..(891): NCBI GI: 145602854 Blast Desc: MGG_04781 [Magnaporthe grisea 70-15] gi|145011220|gb|EDJ95876.1| MGG_04781 [Magnaporthe grisea 70-15]
MVGHFDLSEVAMVGFLVRVASTLTEELRRERRDVTPGLSRPIIFVAYGDAASIVQEALQRAPDLAVAAIGLLFFDQNHRSGDMSNITIPNIFVTSFYGNSSVDGDQAQSDNRFVQKTKLKCTKAAELGKFRNSEDPDYLKVKATIQKYINFVGTRRLWDGIARYQDTEGIRTQISKGADVNRQNSQGQSALHLAVIAQSLETVRLLLDSNANVNVKDKNGRSPLVEAIEAINSRIILALLERGAILEEEYRDKVMNDQIENIVGDNEIKNLIQTVKRFAGPSTARSNTVNVKGSKLSDPPIDCLEASSQFMATVTKFELKTEDEGLGSSDGGNQREYHTSRTIPVSNLLYGEDDDASIDETLGEHEWRWYHLPANNMDWIKWSKNDLILYCPQLLIDDQDDCTITVVFSSPNTGKMPYLHFETNEGRIKLRHAIKQISRDRRNFADDSSITATEEDFDILARASSDEDSENDDWDDIYDSDDCHEKGNIRNQVANTDESSSEVEEDQLVSESLRKASEFKSIEDTDFRDTNQVVQRYAVKALPNLSEKTALSGQLIMVDQLWLWIIQNQEKTRNIIITSFPQAWRQYKGSRVDIIDLHEQIRNYLHQVSREAITSVHQLASVIIRKCTRVFGPFKIPSEPGFSDIFDPSISDVNDRLSGMYDGLPGLLANVEEEDDLFQPEALAQTQSTKNKTAKKKNHPKVYRHKIAAEVELLVEIQDIKDELGIVQMVLNQQSSALAVPQDGVDKQNITTEAISSDTFPLLDGKPVDYYTTANKRLVDGMLARAEDVYRRVNHLIDLKQKQANLDDARYARKEAVSAAKEGKTILALTIVNMIFLPLSFLTSFFALEITEFPKGLETGQNSLGLAWASKYIFGISLAIAILSISIALAIGPMEGPAKRLWRASKYWGILILSVLAVVVVALILVEAQKNFWITALISRILLF

SEQ ID NO: 38441 - DNA, 587 bp, Muscodor strobelii
  misc_feature: SGI EST ID NO. CUFF.92361.0
  misc_feature: Variant of the nucleotide sequence at SEQ ID NO 38439
gtgcgatgcacctcagtcaacaacctgctgcagacgctcctcaactacagcgacaaacgaatgtaacggaaccactggctcacgacgttaacctcgaatagaacctttccgtactccccaggaacgactttccttctcgtacctcatagagtgtaagtaaggacgttgattggatcaaggatttactgcctagatcttttcctaatgtaaagatcatggtcggccatttcgacctatctgaagtcgcaatggttgggtttctcgtaagggttgcgtctacattgaccgaagaactacgacgcgaaaggagggacgtaacgcctggtctcagccgaccaattattttcgtcgcgtacggtgacgcagccagtattgtccaggaggcacttcagcgtgcccccgatttggccgtggccgcaattggtctgttattctttgaccaaaatcatcgttctggagatatgtcgaatattacaatcccgaacatcttcgtcacctccttctatggcaacagttctgtcgacggcgatcaggcgcagagtgacaatagattcgtgcagaagacgaaattaaaatgcaccaaagca

SEQ ID NO: 38442 - DNA, 1179 bp, Muscodor strobelii
  misc_feature: SGI cDNA ID NO. 573358
  misc_feature: Encodes the peptide sequence at SEQ ID NO 38443
atgctaacagcgattaatcgaagggtggtaagaagtaaaacctaccaaggcgcaccagttcaagtgtccgattttgtacccatcccagagatctcgagggatgacggagatgtcacattaatgttcctatctggcgatggcgtcctctttcataaggcgctggatgatgaatggtacagagccacagcaccatacggttcgccaatcttcctctacgacgataatcagacggaatcgacctatataccaaccgaggcggctagtccactaggatgcgtcgagcaattccagtggtgcaacacagcatacccaaaagaaacaaggtgtggtcctcttacagggctttacgattcattatatggtgctgctcccctgttcaatataagcgcggaagaattgagtcttgatcgtcccatttcgcaaacgactgctggaacgcgcctaatctggtcgtactttataatgatcatttatggtggcgggattgaaactgttgccttaggcgctaactctttgagctcgcaaaagctcttgtacaatggtctacagcttcagctacccctgaaccaatggcaactggatgtgacgaattggtggaatatgtcccttgccgagctgcagtcaaatttcgtcaatgcagcaatagggacaacagcggggagcaaaattgaacccatgaatgactatgagaaacagctctgtcatagccagaaaatgcttagcaatgcacatatttcatttaatctcttcggcctgttgttcacctatctattgagcgccataatcatcatcgcatcattagttgcagagcctgtgctaggctacctatctaaaagacgtaagtacaagcagtacgagtacctagaatggaccgtcaacgacgctcttcagctgcaccgcctggctcaagaagaactcaacatgggaacatggacagagcgctgcgtgaaagatattccattgactggagcagatgatatgcttgccagtctcgatattaccaataccgaacatcctgtgcttctccgtccgcctcgactcccttccgctcaaaacggtattgagaaaattggcaatgatcaatttgaagagcatcaagagcagccagaatcatcgggtgatactagcagtagcatagagtccgagaatgacgagagcacgacaatagggagccagtga

SEQ ID NO: 38443 - protein, 392 aa, Muscodor strobelii
  misc_feature: SGI Peptide ID NO. 573358
  misc_feature (23)..(364): NCBI GI: 189194015 Blast Desc: conserved [Pyrenophora tritici-repentis Pt-1C-BFP] gi|187978910|gb|EDU45536.1| conserved [Pyrenophora tritici-repentis Pt-1C-BFP]
  misc_feature (27)..(384): NCBI GI: 169615058 Blast Desc: SNOG_10683 [Phaeosphaeria nodorum SN15] gi|111060957|gb|EAT82077.1| SNOG_10683 [Phaeosphaeria nodorum SN15]
  misc_feature (25)..(341): NCBI GI: 115399382 Blast Desc: [Aspergillus terreus NIH2624] gi|114192163|gb|EAU33863.1| [Aspergillus terreus NIH2624]
  misc_feature (17)..(343): NCBI GI: 119474227 Blast Desc: NFIA_004500 [Neosartorya fischeri NRRL 181] gi|119407142|gb|EAW17092.1| conserved [Neosartorya fischeri NRRL 181]
  misc_feature (25)..(308): NCBI GI: 121699395 Blast Desc: ACLA_082720 [Aspergillus clavatus NRRL 1] gi|119396149|gb|EAW06581.1| ACLA_082720 [Aspergillus clavatus NRRL 1]
  misc_feature (27)..(325): NCBI GI: 169772941 Blast Desc: [Aspergillus oryzae RIB40] gi|83768800|dbj|BAE58937.1| protein product [Aspergillus oryzae]
  misc_feature (27)..(322): NCBI GI: 159128250 Blast Desc: conserved [Aspergillus fumigatus A1163]
  misc_feature (27)..(322): NCBI GI: 70986226 Blast Desc: conserved [Aspergillus fumigatus Af293] gi|66846236|gb|EAL86569.1| conserved [Aspergillus fumigatus Af293]
  misc_feature (25)..(300): NCBI GI: 169618215 Blast Desc: SNOG_12297 [Phaeosphaeria nodorum SN15] gi|160703576|gb|EAT80110.2| SNOG_12297 [Phaeosphaeria nodorum SN15]
  misc_feature (10)..(327): NCBI GI: 169601244 Blast Desc: SNOG_03481 [Phaeosphaeria nodorum SN15] gi|160705891|gb|EAT88686.2| SNOG_03481 [Phaeosphaeria nodorum SN15]
MLTAINRRVVRSKTYQGAPVQVSDFVPIPEISRDDGDVTLMFLSGDGVLFHKALDDEWYRATAPYGSPIFLYDDNQTESTYIPTEAASPLGCVEQFQWCNTAYPKETRCGPLTGLYDSLYGAAPLFNISAEELSLDRPISQTTAGTRLIWSYFIMIIYGGGIETVALGANSLSSQKLLYNGLQLQLPLNQWQLDVTNWWNMSLAELQSNFVNAAIGTTAGSKIEPMNDYEKQLCHSQKMLSNAHISFNLFGLLFTYLLSAIIIIASLVAEPVLGYLSKRRKYKQYEYLEWTVNDALQLHRLAQEELNMGTWTERCVKDIPLTGADDMLASLDITNTEHPVLLRPPRLPSAQNGIEKIGNDQFEEHQEQPESSGDTSSSIESENDESTTIGSQ

SEQ ID NO: 38444 - DNA, 1254 bp, Muscodor strobelii
  misc_feature: SGI cDNA ID NO. 573359
  misc_feature: Reduced expression when VOC is produced
  misc_feature: Encodes the peptide sequence at SEQ ID NO 38445
atgatccgccacccgatacacacggccgggggcctcgcccgagccgaccttgtcagagtcagcgaaggcatcgcgtcctcgctacgacaattctcgacggcccagcgactatgcgcactcctcgacgaacaaggacccagcagagcagacagagcagccagagcagccagaccctctgctcgcgagcgcacggccaccgctgtcaacgaccttgtacatctggacaagatcggtacaccccaagcacagcagtttatcaaacaagatatcgagaggaataatcgacgcgagaactattatagacgtgcgggtacaaggtcgctggatttgaagactcccacacagcctacagcgcctgcttctccctctacacctgcacctaccattataacagcgcccaaggtcctccgtggtggtttccgtggtcgtggaggcttcagcttccagggcaatcgcaacagggagggacaagatgctcccgcagctaaccggtctcgcggacccaacaccagccgaggacccgaccctcgaagacgatccaacgacaaaggcaatgatttcaaggcgagaggctcaggtcgaggcatgcagcgacgtgatggtggtcgtggcggcggtggtcgcggtaaggctaaagggcgcggcgagcgaccaggaagagatagagacgatggtgcagacgatgggccctcgcaggacctcaaccgcagccccgagctcatcgagatggaacaatcacatcgattaggcgtcgagtcaacctacgaacctgccctcaccctcgacgacctcgcaaataccggccctgcagtcgccactgctacatcgagctttgcgaacaacacgacggtagtcaaacaggcgagactcttaggcggtggagacccctacgatgccgaacaagtctggcaccccgataacctcaccatgcgcgtcgcatcacgaaagggtatcttcttccccacgcccgaagtcaaaggatggatcaacgagaatactcagatcgagttcaagcccacggaacaagccaccaaagacgccgtgctgcaagaggccatgctgggactatacaagggcccgcagttcgtggagaagaccgacacgctgggtaccgtgcggaactacactaccaagaataacctgtggaatgccgcagcgagccagaggatcgaggacaagatcaggagtcttttgcccgggggcaagactggtcctaagcctacggctgctgctaagaagggtgcaaaggcttga

SEQ ID NO: 38445 - protein, 417 aa, Muscodor strobelii
  misc_feature: SGI Peptide ID NO. 573359
  misc_feature (232)..(417): NCBI GI: 39975415 Blast Desc: MGG_00146 [Magnaporthe grisea 70-15] gi|145019005|gb|EDK03284.1| MGG_00146 [Magnaporthe grisea 70-15]
  misc_feature (255)..(412): NCBI GI: 116180866 Blast Desc: CHGG_01061 [Chaetomium globosum CBS 148.51] gi|88185358|gb|EAQ92826.1| CHGG_01061 [Chaetomium globosum CBS 148.51]
  misc_feature (203)..(401): NCBI GI: 85116364 Blast Desc: NCU07493 [Neurospora crassa OR74A] gi|28926841|gb|EAA35804.1| [Neurospora crassa OR74A]
  misc_feature (255)..(399): NCBI GI: 171687203 Blast Desc: protein product [Podospora anserina] gi|170943563|emb|CAP69215.1| protein product [Podospora anserina]
  misc_feature: Useful for introducing or modulating the production of volatile compounds
MIRHPIHTAGGLARADLVRVSEGIASSLRQFSTAQRLCALLDEQGPSRADRAARAARPSARERTATAVNDLVHLDKIGTPQAQQFIKQDIERNNRRENYYRRAGTRSLDLKTPTQPTAPASPSTPAPTIITAPKVLRGGFRGRGGFSFQGNRNREGQDAPAANRSRGPNTSRGPDPRRRSNDKGNDFKARGSGRGMQRRDGGRGGGGRGKAKGRGERPGRDRDDGADDGPSQDLNRSPELIEMEQSHRLGVESTYEPALTLDDLANTGPAVATATSSFANNTTVVKQARLLGGGDPYDAEQVWHPDNLTMRVASRKGIFFPTPEVKGWINENTQIEFKPTEQATKDAVLQEAMLGLYKGPQFVEKTDTLGTVRNYTTKNNLWNAAASQRIEDKIRSLLPGGKTGPKPTAAAKKGAKA

SEQ ID NO: 38446 - DNA, 912 bp, Muscodor strobelii
  misc_feature: SGI cDNA ID NO. 573360
  misc_feature: Reduced expression when VOC is produced
  misc_feature: Encodes the peptide sequence at SEQ ID NO 38447
atgagcggcgcaacagctagaactctctttcggcatgccattgcacggccagagctgcgcaggagcagctacaatgtcgcatgcgccagcatcatagcatctcgagctccatacagctcgcgcgcaaaccacgagcaccgtctattcccttcaacgacaaccctaaactcccccagtagacgatccatccacgcctccccctcaacccgcaaaaaaaccaccaaagaagacgaagcaggaaagaaaggcaaaaaatctaagcagtccaacaccatcccacccaccacatcagccaccgaaaccgccgaagcagaagaagccggtcccaaacacccacaacccaacatcgaagacccgctagatttctccgacgtacgctcccgcctcacatcaacctccgagagattccgccccacattcaagaaatccgggcgtttcgaacccacccacatcggatccctacgcgtgctcacgtcccgaaccgacaacacatcctatcccctgcgagacctagcccaagtcgttccgcgaggcggtcgatccatctccctgctagtacacgaagaagcctacgtgaaacccataatgagcgctatccagacttctccggaattcaaccaacagccccaacgagatccggagaacgagttggagttactgctcaagattgaaccggagaaacccgaggatgtggttaagaggacgaaagcgagcgctaatgcgtggaaggataagattaaggctgttaggcaacggagggagaaggtacatgatacgtggctgaaggggaaactgattaggccggatgctaagaaggctttgagtgttgagttggagaagattattaagaaggaaattgcggatgtggaggcgtttgagaaggaggttcttaggggggttggtgggaagtaa

SEQ ID NO: 38447 - protein, 303 aa, Muscodor strobelii
  misc_feature: SGI Peptide ID NO. 573360
  misc_feature (61)..(298): NCBI GI: 46107942 Blast Desc: FG00854.1 [Gibberella zeae PH-1]
  misc_feature (50)..(303): NCBI GI: 85116368 Blast Desc: NCU07494 [Neurospora crassa OR74A] gi|28926842|gb|EAA35805.1| [Neurospora crassa OR74A]
  misc_feature (86)..(300): NCBI GI: 116180868 Blast Desc: CHGG_01062 [Chaetomium globosum CBS 148.51] gi|88185359|gb|EAQ92827.1| CHGG_01062 [Chaetomium globosum CBS 148.51]
  misc_feature (117)..(303): NCBI GI: 171687201 Blast Desc: protein product [Podospora anserina] gi|170943562|emb|CAP69214.1| protein product [Podospora anserina]
  misc_feature (117)..(293): NCBI GI: 258575539 Blast Desc: [Uncinocarpus reesii 1704] gi|237902217|gb|EEP76618.1| [Uncinocarpus reesii 1704]
  misc_feature (118)..(300): NCBI GI: 156053600 Blast Desc: [Sclerotinia sclerotiorum 1980] gi|154703428|gb|EDO03167.1| [Sclerotinia sclerotiorum 1980]
  misc_feature (115)..(293): NCBI GI: 119195787 Blast Desc: CIMG_02268 [Coccidioides immitis RS]
  misc_feature (115)..(293): NCBI GI: 240110503 Blast Desc: ribosomal recycling factor, mitochondrial precursor, [Coccidioides posadasii C735 delta SOWgp]
  misc_feature (118)..(293): NCBI GI: 255948524 Blast Desc: Pc22g10210 [Penicillium chrysogenum Wisconsin 54-1255] gi|211592046|emb|CAP98309.1| Pc22g10210 [Penicillium chrysogenum Wisconsin 54-1255]
  misc_feature (118)..(293): NCBI GI: 242798810 Blast Desc: ribosome recycling factor, [Talaromyces stipitatus ATCC 10500] gi|218716590|gb|EED16011.1| ribosome recycling factor, [Talaromyces stipitatus ATCC 10500]
  misc_feature: Useful for introducing or modulating the production of volatile compounds
MSGATARTLFRHAIARPELRRSSYNVACASIIASRAPYSSRANHEHRLFPSTTTLNSPSRRSIHASPSTRKKTTKEDEAGKKGKKSKQSNTIPPTTSATETAEAEEAGPKHPQPNIEDPLDFSDVRSRLTSTSERFRPTFKKSGRFEPTHIGSLRVLTSRTDNTSYPLRDLAQVVPRGGRSISLLVHEEAYVKPIMSAIQTSPEFNQQPQRDPENELELLLKIEPEKPEDVVKRTKASANAWKDKIKAVRQRREKVHDTWLKGKLIRPDAKKALSVELEKIIKKEIADVEAFEKEVLRGVGGK

SEQ ID NO: 38448 - DNA, 2669 bp, Muscodor strobelii
  misc_feature: SGI EST ID NO. CUFF.92480.0
  misc_feature: Variant of the nucleotide sequence at SEQ ID NO 38446
tctcaacatacaacataaccacatcacaatgagcggcgcaacagctagaactctctttcggcatgccattgcacggccagagctgcgcaggagcagctacaatgtcgcatgcgccagcatcatagcatctcgagctccatacagctcgcgcgcaaaccacgagcaccgtctattcccttcaacgacaaccctaaactcccccagtagacgatccatccacgcctccccctcaacccgcaaaaaaaccaccaaagaagacgaagcaggaaagaaaggcaaaaaatctaagcagtccaacaccatcccacccaccacatcagccaccgaaaccgccgaagcagaagaagccggtcccaaacacccacaacccaacatcgaagacccgctagatttctccgacgtacgctcccgcctcacatcaacctccgagagattccgccccacattcaagaaatccgggcgtttcgaacccacccacatcggatccctacgcgtgctcacgtcccgaaccgacaacacatcctatcccctgcgagacctagcccaagtcgttccgcgaggcggtcgatccatctccctgctagtacacgaagaagcctacgtgaaacccataatgagcgctatccagacttctccggaattcaaccaacagccccaacgagatccggagaacgagttggagttactgctcaagattgaaccggagaaacccgaggatgtggttaagaggacgaaagcgagcgctaatgcgtggaaggataagattaaggctgttaggcaacggagggagaaggtacatgatacgtggctgaaggggaaactgattaggccggatgctaagaaggctttgagtgttgagttggagaagattattaagaaggaaattgcggatgtggaggcgtttgagaaggaggttcttaggggggttggtgggaagtaaatttgtgtgtttatttgttcgaggggagaagtattgggatagaggcagatgggagagatatgtgtaggattaggaatgacactgcattatgaggcattgcagagtgcagagctgttggcactgagagggatgggataccatgtgcgattacatgtacaatatatagaatttggtttctttttacaaatgggtgataatgtacagtacaagtcttgccctcccagctgcgatttgtaggtctcgtggacacacagccccatcatctctatcaacctctttgccatgttgtacaccactactactcaatacattcaagcctttgcacccttcttagcagcagccgtaggcttaggaccagtcttgcccccgggcaaaagactcctgatcttgtcctcgatcctctggctcgctgcggcattccacaggttattcttggtagtgtagttccgcacggtacccagcgtgtcggtcttctccacgaactgcgggcccttgtatagtcccagcatggcctcttgcagcacggcgtctttggtggcttgttccgtgggcttgaactcgatctgagtattctcgttgatccatcctttgacttcgggcgtggggaagaagataccctttcgtgatgcgacgcgcatggtgaggttatcggggtgccagacttgttcggcatcgtaggggtctccaccgcctaagagtctcgcctgtttgactaccgtcgtgttgttcgcaaagctcgatgtagcagtggcgactgcagggccggtatttgcgaggtcgtcgagggtgagggcaggttcgtaggttgactcgacgcctaatcgatgtgattgttccatctcgatgagctcggggctgcggttgaggtcctgcgagggcccatcgtctgcaccatcgtctctatctcttcctggtcgctcgccgcgccctttagccttaccgcgaccaccgccgccacgaccaccatcacgtcgctgcatgcctcgacctgagcctctcgccttgaaatcattgcctttgtcgttggatcgtcttcgagggtcgggtcctcggctggtgttgggtccgcgagaccggttagctgcgggagcatcttgtccctccctgttgcgattgccctggaagctgaagcctccacgaccacggaaaccaccacggaggaccttgggcgctgttataatggtaggtgcaggtgtagagggagaagcaggcgctgtaggctgtgtgggagtcttcaaatccagcgaccttgtacccgcacgtctataatagttctcgcgtcgattattcctctcgatatcttgtttgataaactgctgtgcttggggtgtaccgatcttgtccagatgtacaaggtcgttgacagcggtggccgtgcgctcgcgagcagagggtctggctgctctggctgctctgtctgctctgctgggtccttgttcgtcgaggagtgcgcatagtcgctgggccgtcgagaattgtcgtagcgaggacgcgatgccttcgctgactctgacaaggtcggctcgggcgaggcccccggccgtgtgtatcgggtggcggatcattgggcctcgattgatgggatggcgctctggaggctcagagctgtgaagtgagctcttgatgtcgcaatttttggtagatgcaccgggactcaagcttggacgcaagggaaatttggcgctatgcagttatgcgagagtgccaacaatgggggcgctgacatttg

SEQ ID NO: 38449 - DNA, 2520 bp, Muscodor strobelii
  misc_feature: SGI cDNA ID NO. 573361
  misc_feature: Encodes the peptide sequence at SEQ ID NO 38450
atgctcaaagatctattcttagtagcatccttagcgggcgattatgcaacagttgaaaaacttgccaacttcgatcttgtttggtcttgtcattggcctcaaggaattagtccacttactggaacagcgtggaatccagacgatcatgatattgacgactttccacctatatcggcctttccactagcgatacacgtagcagcgcgatctggcaatacgaattttttgaaatggctgattgatagaggcagaggcatcgacgcagaactccggccacctcgtgaagattctgacatttggtattggctcgtaccctcaaacttatctacacctctacagctggctcttgagagcggtatttccgctgctgtcctccaatgtcaagcaggcaggttgataggaggagagcttgcccaagccatcagattaggctatatggaagtcgcgtcagatatgttatcccgtggaggagatctgacgtcaattgacgccaacggcgaatcggtcctacatgttgctgttgagatcgcagacattgaccttatttcaatgtacttctcctgcggcggggcttatagctcttcggcactcttaaaggcggtaaaagcggcagttcattcgcgagatgacacaatagtctcacagcttgtagcaagacgtcctgtacgacgtattgacagattcgaatcgtcggctttagtaattgcgatccacaaagagtccttgtctcttatttccattctgttagcggatccgtttctaccagcatcagcacgatcgctatataatactgagaatgtagatttaggcgatttcaacagacccgaagaatccatcactaaagatatcacgattcgcctggatggcgtgacaccactatatgcagtattccgcctcgggagattatatctcattgatagcttcattcaagctggctatcgacctcagtctaaggattcgatattacaggttcgcaagatcgatcaccgccttttgcactcatacttccccccacaaaagtccgatttgaaatgggcagaaactctactgcgcgcaaatatcctccttgacgacactaccagagtgaatgagtgtatcgggtgtctagccagtctcgagggttatattggctggggagtcacaagaacgccgttgcaaacagcaatagaaactgccagcatacctgtaatagaccttctcatccattcgggtgcagacattaatgcaccagcagccgctttttctggagcaacaacgcttcagctagcggctattcgaggaaacttggtgatagcaagattgctgatagagcgtggaggtgacataaatgcacctccggctaggttcagggggcgcaccgctctagaaggagcagcagagcacggaaggctcgacatgattgagctattgttagaacatggtgcaggggtaaaaggcgcaatgagaatacaatacatccgcgccgttgcattggcaaatcacgagggccatatggcactggcaaagcgtctccaagagactggaggttggaccgctgccgatcaaaagatctacagtcggcaagagatattgcgtgacgatgggtattttgtgttcattgaccaaacacaagactggcgattccaagccactaagccatttaggtgggataaccctgacagagaggacgggtttgacagtacttcgtcatctctgaaatcattgtatggggtcgacgttcaggacgatggagattctcatttcccggactcagcacagtctcatgaggattttaacgatcaccaccaggcgactatcatcaagtcaattgtgacggccatgtattacgagaccgtaatggaatcagataccaaagcgagtaaattaaagcggtactatttaatctcatacccacgaacagcctcgaatcttctactcaaaatcctagcccccgagcttcaacccggattttcctgcggcgactttgacggcggctacttcttcatgccagtcgatggcattttatgcgagcgacgtcttcgcagcagatgcataagcgactggacaattgacgaaagacgagaagtccgagaaagtttcgagtcctgttttaggaatcagcaacacgcggtagcatccgcacagtcacaggggcactctattttcgtcaaagaacacactagtttcttcgttgatccaataatacgtagccgctttcaatttggagctgatgcagtgaaagagccgaagtggacgcttcagtatgatgggggctcgactcactccgcactcaatatttcagtgctcccggatgagtttctgctcacttggttaccaacgtttctcattcgaaatccggttgttgcttttccatcttattataggactattattgaaagagagggaaaggaactggcagctgcagataatttcgcctcgctcgtgacaacggtagagtggagtcgcgctctttacgacttctttgtacaacaacgggacgctttgtcttgcccagagacgagagaagccagtggccaatag

SEQ ID NO: 38450 - protein, 839 aa, Muscodor strobelii
  misc_feature: SGI Peptide ID NO. 573361
  misc_feature (415)..(447): Pfam Id: PF00023 Pfam Desc: Ankyrin repeat
  misc_feature (450)..(475): Pfam Id: PF00023 Pfam Desc: Ankyrin repeat
  misc_feature (618)..(821): NCBI GI: 238845399 Blast Desc: conserved [Microsporum canis CBS 113480]
  misc_feature (109)..(514): NCBI GI: 226294082 Blast Desc: [Paracoccidioides brasiliensis Pb18]
  misc_feature (109)..(514): NCBI GI: 225684431 Blast Desc: conserved [Paracoccidioides brasiliensis Pb03]
  misc_feature (110)..(514): NCBI GI: 226284810 Blast Desc: [Paracoccidioides brasiliensis Pb01]
  misc_feature (623)..(824): NCBI GI: 226281710 Blast Desc: conserved [Paracoccidioides brasiliensis Pb01]
  misc_feature (623)..(825): NCBI GI: 119193612 Blast Desc: CIMG_01183 [Coccidioides immitis RS]
  misc_feature (623)..(825): NCBI GI: 240105639 Blast Desc: CPC735_052020 [Coccidioides posadasii C735 delta SOWgp]
  misc_feature (623)..(824): NCBI GI: 226287819 Blast Desc: conserved [Paracoccidioides brasiliensis Pb18]
  misc_feature (623)..(824): NCBI GI: 225680182 Blast Desc: conserved [Paracoccidioides brasiliensis Pb03]
  misc_feature (624)..(828): NCBI GI: 238845398 Blast Desc: conserved [Microsporum canis CBS 113480]
MLKDLFLVASLAGDYATVEKLANFDLVWSCHWPQGISPLTGTAWNPDDHDIDDFPPISAFPLAIHVAARSGNTNFLKWLIDRGRGIDAELRPPREDSDIWYWLVPSNLSTPLQLALESGISAAVLQCQAGRLIGGELAQAIRLGYMEVASDMLSRGGDLTSIDANGESVLHVAVEIADIDLISMYFSCGGAYSSSALLKAVKAAVHSRDDTIVSQLVARRPVRRIDRFESSALVIAIHKESLSLISILLADPFLPASARSLYNTENVDLGDFNRPEESITKDITIRLDGVTPLYAVFRLGRLYLIDSFIQAGYRPQSKDSILQVRKIDHRLLHSYFPPQKSDLKWAETLLRANILLDDTTRVNECIGCLASLEGYIGWGVTRTPLQTAIETASIPVIDLLIHSGADINAPAAAFSGATTLQLAAIRGNLVIARLLIERGGDINAPPARFRGRTALEGAAEHGRLDMIELLLEHGAGVKGAMRIQYIRAVALANHEGHMALAKRLQETGGWTAADQKIYSRQEILRDDGYFVFIDQTQDWRFQATKPFRWDNPDREDGFDSTSSSLKSLYGVDVQDDGDSHFPDSAQSHEDFNDHHQATIIKSIVTAMYYETVMESDTKASKLKRYYLISYPRTASNLLLKILAPELQPGFSCGDFDGGYFFMPVDGILCERRLRSRCISDWTIDERREVRESFESCFRNQQHAVASAQSQGHSIFVKEHTSFFVDPIIRSRFQFGADAVKEPKWTLQYDGGSTHSALNISVLPDEFLLTWLPTFLIRNPVVAFPSYYRTIIEREGKELAAADNFASLVTTVEWSRALYDFFVQQRDALSCPETREASGQ

SEQ ID NO: 38451 - DNA, 3051 bp, Muscodor strobelii
  misc_feature: SGI cDNA ID NO. 573362
  misc_feature: Encodes the peptide sequence at SEQ ID NO 38452
atggctagcagcgcacctcaccgcctgcggctgactcccgccggatcgcctttcctccccaggcccgcccgctcccctctccgcggtcgtgctctgccgtccaacgactcccgcctctccctcaaacgcgtcatcggcacgacctgcgcctcgcctacaggcttcgacgtgacctgcgactcgttcgcgtacatcgctggaggcgctgtcgttgtagtcgatgttaaggaggactgctacaaccaacgcttcttccgagcccgaccaaccgccctccccatctacaataccccgcctcttccctactcgcctgcggcccccgtcaccccgaaggccaacgatggccgcagccgcatcaccctacgcgactcgccctatgcaccaagcgagcaggctgatagtcccagctccaagacttggaccagtcgggagcgtatcaaagctgccacctgcctcgccctgagtaaagagggcaagttccttgctgtcggtgaaacaggctacgcaccgcgcgtcttgatatacagtctcgacgaccaatcctccgatacacccctcgtttccatcagtgaacatggcttcggcgtgaaagccgtggcttggtctcccgactccaagtttctcgcctccctcggatcgtcaaacgatggcttcctttacgtgtggaggatcgaccccaggactggcgccgccaagcttttccagcagaatcgatgcacaacctttatcagggggatggtctggatgggcaacagcctcatcactctcggcgtgcgtcacgtgaaggtctggcgcatcgaagagacacaggccacttcacctttgaaacagaaattcatcggtgatatcatctctcaatctcaaccgcagaagacccttcccggcagaaatgccctgcttggcaacctgattgaagccacattctcctgcgccgcagtcatcgatgagaacagagccatcatctgctctgagacgggcgatatatgcttgctggatgacaccggcaagcagatgaaattgacgcgaatcctcgaaagtggatttgttaccacctgcgttgctattaatgatgggctggggtatattagtgggaagtctggctgtgctgcgaccatagacatcgactcttttatcaaaggcaacccggcctgtcttcggacgactgccgataattccacaaactccggactgctcgccttgggcttcttgagcgaaaagatggtgactgtcaatgtcaaacgttccatcgatatttgggaccataacaataaaaagggttcaacgcccatgacggatttgcagtcgatatccatacccatccctggaggtggggatgcggtctctggtgtgggtagcctggcaccatcaaacatgacgggtgctcacttttacacatggtcgagatccggaaacgtggtactgtggactacgaacggcgtgattaagtcatccttccaggtgccgctggatgacgcttacttcgaggacgagccggagctgaccaatcaaatggttactattcgcgccacaactgatgctagattcttcattgcgggcgacaagctcggcttcatcaagattatcgactttatgactaaggagtgtgtatcctctatgaaagcgcactcctctgattgtcaatttattaccgtttacgaaagcccctcacggcttttcgttgcatcctgcggtcgcgaccgaaccgcgcagctcttccatcgacagagcgacggcgaatttgaacatttccagactctggagttccagtctagggtgtgtcaagtactgatcccatcagatgacagagtcgtgacctgctcgatggatagaactctacaaatacacgacttgattacgaaggagggcgatacagatgtccttgcggccattccttctcggactctatctctcaaggcctctcctatatcgatggtcatgggccccgatgcgaaatctctcttcgtatcccaggtggaccgctccgtctctttgttcgacttggatagtgggaaactgtcaagtgctttcaagtgtttcgatgaaggcggctgcgaggccgtcaatttggactcacttacctatcgttcagcgacagacaaagagcctgctttcctccttggactctccaatacggataaatcgatcaggatatatgatgcgcaggctggccagttcctcacacgagaatggggacataccgaggctatccaaggcgctgctctgatcgacgaagatgagacaaaccggaaagtggtcagcgtcggctccgacgggacaatcatgatctgggacatggatcttcaagaacgtgcatggggttccgctagtcgcgattcctcacccgtcaaagacgccaatactcccctatcccgaccgacattacgacgtgttctatccaaagcagagctagcggaatttcagcgtccgtcatcggctgcgagtggccgtagatcaccaccaagacttacgaagcggcgttcactttacaatttggcagcttcagcgaatcctcggacccctattgcacagtcgagcgttgctatcgcagaagacacgccatcgcgtcgcccatctgtcgcaccatcggcttacacacccgccggcagcccacctgccagcccgaaatcgagaatcagcagacggccgtcgctacctgcccttactaaagctaagactaagagcaatggcagtctccgaggctacgggtcgctcaatacggcgaccgaacagacatgtaggacattacggagttatcggaagaaactggcctctaccgaccccattagccaggaggtcctcggtgaactggatcaggagctccgcctcaccgccgttgcccttggtgagcgagccacccgaagccaagccatgagcgactccatgctcaatggacttctcgatcagtattcagaacgattagtatccatgcttgatgaaaagcttcgactaaatgggagttatagaagagcttccgaccagaactcggatagtcctgctgatgctaaacgaccgggatcctcgggcacaggttctagtagtaactcggcctga

SEQ ID NO: 38452 - protein, 1016 aa, Muscodor strobelii
  misc_feature: SGI Peptide ID NO. 573362
  misc_feature (723)..(764): Pfam Id: PF00400 Pfam Desc: WD domain, G-beta repeat
  misc_feature (533)..(573): Pfam Id: PF00400 Pfam Desc: WD domain, G-beta repeat
  misc_feature (1)..(1000): NCBI GI: 46108152 Blast Desc: FG00958.1 [Gibberella zeae PH-1]
  misc_feature (1)..(983): NCBI GI: 261356763 Blast Desc: WD repeat-containing protein [Verticillium albo-atrum VaMs.102]
  misc_feature (1)..(997): NCBI GI: 171689602 Blast Desc: protein product [Podospora anserina] gi|170944763|emb|CAP70874.1| protein product [Podospora anserina]
  misc_feature (1)..(986): NCBI GI: 145613227 Blast Desc: MGG_01791 [Magnaporthe grisea 70-15] gi|145020351|gb|EDK04480.1| MGG_01791 [Magnaporthe grisea 70-15]
  misc_feature (1)..(983): NCBI GI: 85110581 Blast Desc: NCU06758 [Neurospora crassa OR74A] gi|28881346|emb|CAD70388.1| [Neurospora crassa] gi|28925213|gb|EAA34294.1| conserved [Neurospora crassa OR74A]
  misc_feature (1)..(1013): NCBI GI: 116205077 Blast Desc: CHGG_10422 [Chaetomium globosum CBS 148.51] gi|88176550|gb|EAQ84018.1| CHGG_10422 [Chaetomium globosum CBS 148.51]
  misc_feature (9)..(984): NCBI GI: 154310323 Blast Desc: BC1G_07081 [Botryotinia fuckeliana B05.10] gi|150851413|gb|EDN26606.1| BC1G_07081 [Botryotinia fuckeliana B05.10]
  misc_feature (9)..(984): NCBI GI: 156055980 Blast Desc: SS1G_05342 [Sclerotinia sclerotiorum 1980] gi|154703126|gb|EDO02865.1| SS1G_05342 [Sclerotinia sclerotiorum 1980]
  misc_feature (9)..(981): NCBI GI: 189198650 Blast Desc: WD domain containing protein [Pyrenophora tritici-repentis Pt-1C-BFP] gi|187982761|gb|EDU48249.1| WD domain containing protein [Pyrenophora tritici-repentis Pt-1C-BFP]
  misc_feature (9)..(958): NCBI GI: 242809792 Blast Desc: WD repeat protein [Talaromyces stipitatus ATCC 10500] gi|218716071|gb|EED15493.1| WD repeat protein [Talaromyces stipitatus ATCC 10500]
MASSAPHRLRLTPAGSPFLPRPARSPLRGRALPSNDSRLSLKRVIGTTCASPTGFDVTCDSFAYIAGGAVVVVDVKEDCYNQRFFRARPTALPIYNTPPLPYSPAAPVTPKANDGRSRITLRDSPYAPSEQADSPSSKTWTSRERIKAATCLALSKEGKFLAVGETGYAPRVLIYSLDDQSSDTPLVSISEHGFGVKAVAWSPDSKFLASLGSSNDGFLYVWRIDPRTGAAKLFQQNRCTTFIRGMVWMGNSLITLGVRHVKVWRIEETQATSPLKQKFIGDIISQSQPQKTLPGRNALLGNLIEATFSCAAVIDENRAIICSETGDICLLDDTGKQMKLTRILESGFVTTCVAINDGLGYISGKSGCAATIDIDSFIKGNPACLRTTADNSTNSGLLALGFLSEKMVTVNVKRSIDIWDHNNKKGSTPMTDLQSISIPIPGGGDAVSGVGSLAPSNMTGAHFYTWSRSGNVVLWTTNGVIKSSFQVPLDDAYFEDEPELTNQMVTIRATTDARFFIAGDKLGFIKIIDFMTKECVSSMKAHSSDCQFITVYESPSRLFVASCGRDRTAQLFHRQSDGEFEHFQTLEFQSRVCQVLIPSDDRVVTCSMDRTLQIHDLITKEGDTDVLAAIPSRTLSLKASPISMVMGPDAKSLFVSQVDRSVSLFDLDSGKLSSAFKCFDEGGCEAVNLDSLTYRSATDKEPAFLLGLSNTDKSIRIYDAQAGQFLTREWGHTEAIQGAALIDEDETNRKVVSVGSDGTIMIWDMDLQERAWGSASRDSSPVKDANTPLSRPTLRRVLSKAELAEFQRPSSAASGRRSPPRLTKRRSLYNLAASANPRTPIAQSSVAIAEDTPSRRPSVAPSAYTPAGSPPASPKSRISRRPSLPALTKAKTKSNGSLRGYGSLNTATEQTCRTLRSYRKKLASTDPISQEVLGELDQELRLTAVALGERATRSQAMSDSMLNGLLDQYSERLVSMLDEKLRLNGSYRRASDQNSDSPADAKRPGSSGTGSSSNSA

SEQ ID NO: 38453 - DNA, 3982 bp, Muscodor strobelii
  misc_feature: SGI EST ID NO. CUFF.92459.0
  misc_feature: Variant of the nucleotide sequence at SEQ ID NO 38451
gctgattgctcggaagatcatcagattattagtcagctagctattcggtggattggctagtgtattatccggctgtgccatctatttcctggtatgcaagcttagctctcgccagcgagtcgaggctgcacagggggcacttccgttttcaactcccacttcacacacacaccccatcctcctccccagagacctgcggtcttgactgcctcatgcgattgcctcaggtggtaatctagacatcactcctttcaaaggaaagagtcccttcacgtcactcgtttgaaccaaaatacactccgtccgattcccttctctacattctctacattctctgcatccagtctcacaacagcacttccaccaattccgggctgagacatctatcgcacgtccatccatgatctcagcaagcaggacgactgtggcggaatcttccatgattttcagtatcattcgacgatggctagcagcgcacctcaccgcctgcggctgactcccgccggatcgcctttcctccccaggcccgcccgctcccctctccgcggtcgtgctctgccgtccaacgactcccgcctctccctcaaacgcgtcatcggcacgacctgcgcctcgcctacaggcttcgacgtgacctgcgactcgttcgcgtacatcgctggaggcgctgtcgttgtagtcgatgttaaggaggactgctacaaccaacgcttcttccgagcccgaccaaccgccctccccatctacaataccccgcctcttccctactcgcctgcggcccccgtcaccccgaaggccaacgatggccgcagccgcatcaccctacgcgactcgccctatgcaccaagcgagcaggctgatagtcccagctccaagacttggaccagtcgggagcgtatcaaagctgccacctgcctcgccctgagtaaagagggcaagttccttgctgtcggtgaaacaggctacgcaccgcgcgtcttgatatacagtctcgacgaccaatcctccgatacacccctcgtttccatcagtgaacatggcttcggcgtgaaagccgtggcttggtctcccgactccaagtttctcgcctccctcggatcgtcaaacgatggcttcctttacgtgtggaggatcgaccccaggactggcgccgccaagcttttccagcagaatcgatgcacaacctttatcagggggatggtctggatgggcaacagcctcatcactctcggcgtgcgtcacgtgaaggtctggcgcatcgaagagacacaggccacttcacctttgaaacagaaattcatcggtgatatcatctctcaatctcaaccgcagaagacccttcccggcagaaatgccctgcttggcaacctgattgaagccacattctcctgcgccgcagtcatcgatgagaacagagccatcatctgctctgagacgggcgatatatgcttgctggatgacaccggcaagcagatgaaattgacgcgaatcctcgaaagtggatttgttaccacctgcgttgctattaatgatgggctggggtatattagtgggaagtctggctgtgctgcgaccatagacatcgactcttttatcaaaggcaacccggcctgtcttcggacgactgccgataattccacaaactccggactgctcgccttgggcttcttgagcgaaaagatggtgactgtcaatgtcaaacgttccatcgatatttgggaccataacaataaaaagggttcaacgcccatgacggatttgcagtcgatatccatacccatccctggaggtggggatgcggtctctggtgtgggtagcctggcaccatcaaacatgacgggtgctcacttttacacatggtcgagatccggaaacgtggtactgtggactacgaacggcgtgattaagtcatccttccaggtgccgctggatgacgcttacttcgaggacgagccggagctgaccaatcaaatggttactattcgcgccacaactgatgctagattcttcattgcgggcgacaagctcggcttcatcaagattatcgactttatgactaaggagtgtgtatcctctatgaaagcgcactcctctgattgtcaatttattaccgtttacgaaagcccctcacggcttttcgttgcatcctgcggtcgcgaccgaaccgcgcagctcttccatcgacagagcgacggcgaatttgaacatttccagactctggagttccagtctagggtgtgtcaagtactgatcccatcagatgacagagtcgtgacctgctcgatggatagaactctacaaatacacgacttgattacgaaggagggcgatacagatgtccttgcggccattccttctcggactctatctctcaaggcctctcctatatcgatggtcatgggccccgatgcgaaatctctcttcgtatcccaggtggaccgctccgtctctttgttcgacttggatagtgggaaactgtcaagtgctttcaagtgtttcgatgaaggcggctgcgaggccgtcaatttggactcacttacctatcgttcagcgacagacaaagagcctgctttcctccttggactctccaatacggataaatcgatcaggatatatgatgcgcaggctggccagttcctcacacgagaatggggacataccgaggctatccaaggcgctgctctgatcgacgaagatgagacaaaccggaaagtggtcagcgtcggctccgacgggacaatcatgatctgggacatggatcttcaagaacgtgcatggggttccgctagtcgcgattcctcacccgtcaaagacgccaatactcccctatcccgaccgacattacgacgtgttctatccaaagcagagctagcggaatttcagcgtccgtcatcggctgcgagtggccgtagatcaccaccaagacttacgaagcggcgttcactttacaatttggcagcttcagcgaatcctcggacccctattgcacagtcgagcgttgctatcgcagaagacacgccatcgcgtcgcccatctgtcgcaccatcggcttacacacccgccggcagcccacctgccagcccgaaatcgagaatcagcagacggccgtcgctacctgcccttactaaagctaagactaagagcaatggcagtctccgaggctacgggtcgctcaatacggcgaccgaacagacatgtaggacattacggagttatcggaagaaactggcctctaccgaccccattagccaggaggtcctcggtgaactggatcaggagctccgcctcaccgccgttgcccttggtgagcgagccacccgaagccaagccatgagcgactccatgctcaatggacttctcgatcagtattcagaacgattagtatccatgcttgatgaaaagcttcgactaaatgggagttatagaagagcttccgaccagaactcggatagtcctgctgatgctaaacgaccgggatcctcgggcacaggttctagtagtaactcggcctgatggaatccgggttcccatttcgttatattgttttattatttgtatggattcttttgtattcttggcgttgcgccatagacaacgacgtggcgaggggaaaatggaggagatacagcatcgttgatccgaagagaaggacaacaactggcgttcacggcggtggtgttatcgcgggtttacaagacttgacgtcggtctttttttatcgtcgacttctttcgttatacatatcattataacacggtgcattatcgggtctggtctggtgaccacgagatagggcgtttagaggataacacttcgggtgggctggacttgtatttactatacccataccattcgcgttgctattattaagcctcatgaggttacttagggagatagcccgtatatcagtctggtggttaatgatatgggatgcccatctgagtccgttgagctggcgcaagcattgtatgagatggcctcc

SEQ ID NO: 38454 - DNA, 885 bp, Muscodor strobelii
  misc_feature: SGI cDNA ID NO. 573363
  misc_feature: Encodes the peptide sequence at SEQ ID NO 38455
atgtggcatcagacagattctctgcccccggcttatgacccctgtaaagatgagcaagaggagttcaagtactaccacgctcttggtgatcccaaccgcgtttatggtgtaggaactgaagaagaccccctcgtagtttggatgagccattctgataatctcgaccgggagttgatctgggctcataataatttcgcgaaggctattgcgaagtcacttcgcctcacccacacatggattatcaagggagcgcacaatcaagagtatgctcgtgacgcatacggcagaaagatatgggatagcatagagaagaaatggcttaccaaggatgcagatatgcatatcacgttgcgtcttggcacaggcttatacaactgtagtctgtctgcgcatgcatacgtcctgctcgacgagaaaaaatgcccccaaaagtatatgagcactcttaccaggacatttatgaaggggaatggagactcacagattgaattctggccctggaagaactttcgctgtcgcgaagtacctctacgtgaaatctggcttggcaaagactggaagcttcatgctaatgttgggccatatctagatacctaccgaccgaacgaacgacgatcaggcgatacgtataccccacgaaagcacaccgaacacgagcctcagaatgaagacagaaaggtagtaggtcgtatgaccaaagaattagcggctctacaagataagtgtgatgctgcctacgaagtgtacaaggcgctgcatttcgagcttgcagctatggaacgtccctgtcagaagaagatgagagacttacacgccatgagagagcagatcataacgatgaagagagaagcttatagagaagcaggtgccgttattgactcatag

SEQ ID NO: 38455 - protein, 294 aa, Muscodor strobelii
  misc_feature: SGI Peptide ID NO. 573363
MWHQTDSLPPAYDPCKDEQEEFKYYHALGDPNRVYGVGTEEDPLVVWMSHSDNLDRELIWAHNNFAKAIAKSLRLTHTWIIKGAHNQEYARDAYGRKIWDSIEKKWLTKDADMHITLRLGTGLYNCSLSAHAYVLLDEKKCPQKYMSTLTRTFMKGNGDSQIEFWPWKNFRCREVPLREIWLGKDWKLHANVGPYLDTYRPNERRSGDTYTPRKHTEHEPQNEDRKVVGRMTKELAALQDKCDAAYEVYKALHFELAAMERPCQKKMRDLHAMREQIITMKREAYREAGAVIDS

SEQ ID NO: 38456 - DNA, 339 bp, Muscodor strobelii
  misc_feature: SGI EST ID NO. CUFF.92437.0
  misc_feature: Variant of the nucleotide sequence at SEQ ID NO 38454
ggaatggagactcacagattgaattctggccctggaagaactttcgctgtcgcgaagtacctctacgtgaaatctggcttggcaaagactggaagcttcatgctaatgttgggccatatctagatacctaccgaccgaacgaacgacgatcaggcgatacgtataccccacgaaagcacaccgaacacgagcctcagaatgaagacagaaaggtagtaggtcgtatgaccaaagaattagcggctctacaagataagtgtgatgctgcctacgaagtgtacaaggcgctgcatttcgagcttgcagctatggaacgtccctgtcagaagaagatgagag

SEQ ID NO: 38457 - DNA, 1770 bp, Muscodor strobelii
  misc_feature: SGI cDNA ID NO. 573364
  misc_feature: Encodes the peptide sequence at SEQ ID NO 38458
atgagcttctatgacgattacgaacccaacgaggacagatctgcagaagtcccttcgtatgcccctgttgaggacatcaacaaatacactgctggtggtctgcatcctattcatctcggagattgcataggccaggacaaacgattcgaagttcagcataaacttggccacagcaacaattcaacagtttggctatgccaagatctcgaacacgagcgccatcttgctgtcaagatcctgaaagccgaaaattcatcggagacataccccgaattaagagcgcagaaactgttcaatgacagagggctacaaggcctcgactcgtatcagttgtctctggtcaaggagcacttctggattgagggaccaaatggtcgtcacctctgcttggttatcgacatcctgggcccaccaataagttacggtttagatggcatcggactggacaccccgtatcttctaggcgacttctgccttcaaattgcaaaatcattaaaatatatacatgaaaataacatttgccatggagactatcggccggatcacatgaggcttcagttaaacacagaagccatgaaaggtactaacatttacgacatattcggacagcctaaggtatggaaactcaatgaacagacggacgaggcaaagcgcagaccgcattacgtggttgaaccatgcgatattcgcgcagccgagatgaagtaccggacgggtagagtattcatcgattctttctcaatgtgtcatcatgctggtgattctattgagccacaccttaccgagccctcatacattccacccgaagttctgttccaaaagaggtaccatggacttagcagcgacatctggtccctagcaagcgccatccatctcgtcagggcggacaagctactcctagcagcattaccttcgaagtccagtctcgtatcgtggatggcatgggcgtacggcccctttccacaagcaacctggaacaagatcggagattatctggtggatgactcagcggtgcctgtattcactgtcaataaattgtcgcaggaaccgccaaaggctgcggatgaccggtcaaggcaatggcatttcaatagaagcgacgtcatcacgcttgtgctaggtgtttgggagactccgcgagaggaacgccgccgggaggcactccgcgaggtgggagaccgaaacaaatatctccgagtaaagctaccaaagaacttggcagcatggaagaaattccagaatgaccgcgagaaattgacaggctggccctcgctcctccacgaagacctaggcaaagaccggacgtggtatgtagacacggtccccagaaacgggccaagacgcaacagacagtcgaagcaggcagagggcattgatgacgaactactcgaacggttgaacaagccatggaaaaatggaccagtttctgaggagttggagcaggcagccgaaccccgtgattccaacgcaggcgaacagagccaagattcagcatcctcgactgcgaaccggaagaaacgttcattagacactggaaatgaagcacggccaaaatcaaagcgcatcaagacctttatctccgaaccaacgctacgcgaccgtgttgagtgcgttgaccaagatgatggcatgacacgatattcctaccgtctccaacgcaaggaggtagagtctcttgcagacctccttggcaaaatgttgaagaatgacccgaaggagcgcattgggatcgaggaagtgctggctcatgaatggtttaagcataattga

SEQ ID NO: 38458 - protein, 589 aa, Muscodor strobelii
  misc_feature: SGI Peptide ID NO. 573364
  misc_feature (557)..(586): Pfam Id: PF00069 Pfam Desc: Protein kinase domain
  misc_feature (23)..(327): NCBI GI: 256721211 Blast Desc: NECHADRAFT_82323 [Nectria haematococca mpVI 77-13-4]
  misc_feature (4)..(294): NCBI GI: 116191345 Blast Desc: CHGG_05390 [Chaetomium globosum CBS 148.51] gi|88181303|gb|EAQ88771.1| CHGG_05390 [Chaetomium globosum CBS 148.51]
  misc_feature (5)..(326): NCBI GI: 121709688 Blast Desc: protein kinase, [Aspergillus clavatus NRRL 1] gi|119400639|gb|EAW11064.1| protein kinase, [Aspergillus clavatus NRRL 1]
  misc_feature (23)..(321): NCBI GI: 85109105 Blast Desc: NCU05658 [Neurospora crassa OR74A] gi|28924372|gb|EAA33510.1| [Neurospora crassa OR74A]
  misc_feature (23)..(295): NCBI GI: 85109099 Blast Desc: NCU05655 [Neurospora crassa OR74A] gi|28924369|gb|EAA33507.1| [Neurospora crassa OR74A]
  misc_feature (23)..(349): NCBI GI: 159122901 Blast Desc: protein kinase, [Aspergillus fumigatus A1163]
  misc_feature (23)..(349): NCBI GI: 70982656 Blast Desc: protein kinase [Aspergillus fumigatus Af293] gi|66844480|gb|EAL84818.1| protein kinase, [Aspergillus fumigatus Af293]
  misc_feature (20)..(320): NCBI GI: 85089807 Blast Desc: NCU10004 [Neurospora crassa OR74A] gi|28919443|gb|EAA28883.1| [Neurospora crassa OR74A]
  misc_feature (3)..(325): NCBI GI: 156032561 Blast Desc: SS1G_13978 [Sclerotinia sclerotiorum 1980] gi|154699380|gb|EDN99118.1| SS1G_13978 [Sclerotinia sclerotiorum 1980]
  misc_feature (21)..(322): NCBI GI: 85091840 Blast Desc: NCU09189 [Neurospora crassa OR74A] gi|28920497|gb|EAA29863.1| [Neurospora crassa OR74A]
MSFYDDYEPNEDRSAEVPSYAPVEDINKYTAGGLHPIHLGDCIGQDKRFEVQHKLGHSNNSTVWLCQDLEHERHLAVKILKAENSSETYPELRAQKLFNDRGLQGLDSYQLSLVKEHFWIEGPNGRHLCLVIDILGPPISYGLDGIGLDTPYLLGDFCLQIAKSLKYIHENNICHGDYRPDHMRLQLNTEAMKGTNIYDIFGQPKVWKLNEQTDEAKRRPHYVVEPCDIRAAEMKYRTGRVFIDSFSMCHHAGDSIEPHLTEPSYIPPEVLFQKRYHGLSSDIWSLASAIHLVRADKLLLAALPSKSSLVSWMAWAYGPFPQATWNKIGDYLVDDSAVPVFTVNKLSQEPPKAADDRSRQWHFNRSDVITLVLGVWETPREERRREALREVGDRNKYLRVKLPKNLAAWKKFQNDREKLTGWPSLLHEDLGKDRTWYVDTVPRNGPRRNRQSKQAEGIDDELLERLNKPWKNGPVSEELEQAAEPRDSNAGEQSQDSASSTANRKKRSLDTGNEARPKSKRIKTFISEPTLRDRVECVDQDDGMTRYSYRLQRKEVESLADLLGKMLKNDPKERIGIEEVLAHEWFKHN

SEQ ID NO: 38459 - DNA, 1617 bp, Muscodor strobelii
  misc_feature: SGI cDNA ID NO. 573365
  misc_feature: Elevated expression when VOC is produced
  misc_feature: Encodes the peptide sequence at SEQ ID NO 38460
atgtctcgcgatcttgatgagacgacgcccctcttgggtgaggggcagaatggcaacggagaagtcaaagagaaaccctcacacttctcccccatagtgcgaactctgtttgcggggttcatcatttgcatttcattcagttatacacaggtacctttgatatatacatttcgtcttatggtatgcgaagactactataatcatcatccgccttttgaaggtgaaggtgatagatgcgcgcgcaatgagatcgatgccggtgccgccgtacagatcgccataatgggatgcgccacggtcattgtaggcattacgaacttgtttttcgccggatgggagatgaggaagtatgggcccaagttcgcgctagctgtgcagactttcttccctgcggttcgagtttgcgtccaaacactggcactggtcgtcggagctcgtggtggcgttatcataatgcaactgagccagctaactggagtctggggaggtcccgctggttatattcttatcctgaataccattgtcgctgagatcacggagccggaggagcgaaccgcgatgtttggaaggttacagggtatccttatgtttggcggcgcactgggattttttgttggcggtcttgcggcggaaaacatcggaatcaagacgccattcgagatggctggaatctcatttctgctgtcctgcgctttcacgatccttgctgtgccttacgttgatccgaagacattgtcaggagacactaaaacgaagggactcgcaggtttcttcggaccattgagagtcctgaagccccagaaaatggcattgaaagatggtcgcatcacgaagcattatggtctccagtttttgtcgctaggtatctttaccggcgtgcttgcaacaggctatgcgccgacgctgattcagatgtattccatgacggttttcaaatttgagcctaccaataacagcattctcatgtcggtcgggttcttaatccgcggcatcttcttgacattcatattcccgttgatgatcaagtacgggcgtatatggttcaagacaaccgaagagccgctacctgatcttaccccggagtcgccaatcccaacggagccgcaggacttccatcccatgccgcctaccatagccgaccaagaggagccagtgaaaccaccaaagccagtcgaagcagcccagggcgccgggtttgatttattcttcctgagatggagtcttcttgtagatggatgtatcacagcgctcgctgcgttcgcgacgcaaggttggcacatgtatctcgtgggatttttgcttccattagcatcagggtcggctcctgcgagcaaaggtgtgctcacatcaatggttccatccaatcgcaaagccgacgcgttgcaagccatgacacttgtcgagtacacggccagtttgtcaacaatgggcttgttcgggttcatcttctcctcgtttgcggacatcgggaagtcgtatctgacgttctattgcaatgctgcaatcgcaaccatagcagcattcattctcatcttttcgagattcccgccacacggtagtgagatgatccccgacgcccaaaagccttcggaggagaccgtacaatcacaagagtag

SEQ ID NO: 38460 - protein, 538 aa, Muscodor strobelii
  misc_feature: SGI Peptide ID NO. 573365
  misc_feature (35)..(348): Pfam Id: PF07690 Pfam Desc: Major Facilitator Superfamily
  misc_feature (2)..(525): NCBI GI: 145603534 Blast Desc: MGG_05979 [Magnaporthe grisea 70-15] gi|145011747|gb|EDJ96403.1| MGG_05979 [Magnaporthe grisea 70-15]
  misc_feature (6)..(523): NCBI GI: 256723665 Blast Desc: NECHADRAFT_52291 [Nectria haematococca mpVI 77-13-4]
  misc_feature (3)..(528): NCBI GI: 85110741 Blast Desc: NCU08748 [Neurospora crassa OR74A] gi|28925294|gb|EAA34373.1| conserved [Neurospora crassa OR74A] gi|38524240|emb|CAE75706.1| conserved [Neurospora crassa]
  misc_feature (6)..(536): NCBI GI: 261361065 Blast Desc: conserved [Verticillium albo-atrum VaMs.102]
  misc_feature (25)..(500): NCBI GI: 171677219 Blast Desc: protein product [Podospora anserina] gi|170936677|emb|CAP61336.1| protein product [Podospora anserina]
  misc_feature (5)..(523): NCBI GI: 189196098 Blast Desc: conserved [Pyrenophora tritici-repentis Pt-1C-BFP] gi|187980266|gb|EDU46892.1| conserved [Pyrenophora tritici-repentis Pt-1C-BFP]
  misc_feature (6)..(538): NCBI GI: 46114484 Blast Desc: FG03084.1 [Gibberella zeae PH-1]
  misc_feature (34)..(446): NCBI GI: 116205627 Blast Desc: CHGG_10697 [Chaetomium globosum CBS 148.51] gi|88176825|gb|EAQ84293.1| CHGG_10697 [Chaetomium globosum CBS 148.51]
  misc_feature (49)..(525): NCBI GI: 256725402 Blast Desc: NECHADRAFT_82986 [Nectria haematococca mpVI 77-13-4]
  misc_feature (60)..(523): NCBI GI: 169605091 Blast Desc: SNOG_05561 [Phaeosphaeria nodorum SN15] gi|160706706|gb|EAT86625.2| SNOG_05561 [Phaeosphaeria nodorum SN15]
  misc_feature: Useful for introducing or modulating the production of volatile compounds
MSRDLDETTPLLGEGQNGNGEVKEKPSHFSPIVRTLFAGFIICISFSYTQVPLIYTFRLMVCEDYYNHHPPFEGEGDRCARNEIDAGAAVQIAIMGCATVIVGITNLFFAGWEMRKYGPKFALAVQTFFPAVRVCVQTLALVVGARGGVIIMQLSQLTGVWGGPAGYILILNTIVAEITEPEERTAMFGRLQGILMFGGALGFFVGGLAAENIGIKTPFEMAGISFLLSCAFTILAVPYVDPKTLSGDTKTKGLAGFFGPLRVLKPQKMALKDGRITKHYGLQFLSLGIFTGVLATGYAPTLIQMYSMTVFKFEPTNNSILMSVGFLIRGIFLTFIFPLMIKYGRIWFKTTEEPLPDLTPESPIPTEPQDFHPMPPTIADQEEPVKPPKPVEAAQGAGFDLFFLRWSLLVDGCITALAAFATQGWHMYLVGFLLPLASGSAPASKGVLTSMVPSNRKADALQAMTLVEYTASLSTMGLFGFIFSSFADIGKSYLTFYCNAAIATIAAFILIFSRFPPHGSEMIPDAQKPSEETVQSQE

SEQ ID NO: 38461 - DNA, 1935 bp, Muscodor strobelii
  misc_feature: SGI EST ID NO. CUFF.92489.1
  misc_feature: Variant of the nucleotide sequence at SEQ ID NO 38459
ataaatcaaagcagcagtacagtagaacatcagccttgtgtttcgattctcaaaagtttccatgtcgatagaccgaaagtcaattggcaatgtctcgcgatcttgatgagacgacgcccctcttgggtgaggggcagaatggcaacggagaagtcaaagagaaaccctcacacttctcccccatagtgcgaactctgtttgcggggttcatcatttgcatttcattcagttatacacaggtacctttgatatatacatttcgtcttatggtatgcgaagactactataatcatcatccgccttttgaaggtgaaggtgatagatgcgcgcgcaatgagatcgatgccggtgccgccgtacagatcgccataatgggatgcgccacggtcattgtaggcattacgaacttgtttttcgccggatgggagatgaggaagtatgggcccaagttcgcgctagctgtgcagactttcttccctgcggttcgagtttgcgtccaaacactggcactggtcgtcggagctcgtggtggcgttatcataatgcaactgagccagctaactggagtctggggaggtcccgctggttatattcttatcctgaataccattgtcgctgagatcacggagccggaggagcgaaccgcgatgtttggaaggttacagggtatccttatgtttggcggcgcactgggattttttgttggcggtcttgcggcggaaaacatcggaatcaagacgccattcgagatggctggaatctcatttctgctgtcctgcgctttcacgatccttgctgtgccttacgttgatccgaagacattgtcaggagacactaaaacgaagggactcgcaggtttcttcggaccattgagagtcctgaagccccagaaaatggcattgaaagatggtcgcatcacgaagcattatggtctccagtttttgtcgctaggtatctttaccggcgtgcttgcaacaggctatgcgccgacgctgattcagatgtattccatgacggttttcaaatttgagcctaccaataacagcattctcatgtcggtcgggttcttaatccgcggcatcttcttgacattcatattcccgttgatgatcaagtacgggcgtatatggttcaagacaaccgaagagccgctacctgatcttaccccggagtcgccaatcccaacggagccgcaggacttccatcccatgccgcctaccatagccgaccaagaggagccagtgaaaccaccaaagccagtcgaagcagcccagggcgccgggtttgatttattcttcctgagatggagtcttcttgtagatggatgtatcacagcgctcgctgcgttcgcgacgcaaggttggcacatgtatctcgtgggatttttgcttccattagcatcagggtcggctcctgcgagcaaaggtgtgctcacatcaatggttccatccaatcgcaaagccgacgcgttgcaagccatgacacttgtcgagtacacggccagtttgtcaacaatgggcttgttcgggttcatcttctcctcgtttgcggacatcgggaagtcgtatctgacgttctattgcaatgctgcaatcgcaaccatagcagcattcattctcatcttttcgagattcccgccacacggtagtgagatgatccccgacgcccaaaagccttcggaggagaccgtacaatcacaagagtagaacagtgcttcagacaagctgagaggcatgagagaaattgtgtcagttcataagcgatggttgattaagatctgagggtgacaatgaaattttagaatgggaatttgcgacatggcaaatgctgtgtcgagccatagatatcatggatatagagagcagctatgaacaatcaagagcaccttgagaatcattcggcgtcatctcaagtattgaaattgttctggattca

SEQ ID NO: 38462 - DNA, 804 bp, Muscodor strobelii
  misc_feature: SGI cDNA ID NO. 573366
  misc_feature: Elevated expression when VOC is produced
  misc_feature: Encodes the peptide sequence at SEQ ID NO 38463
atgacggttacaccggaatcgccgccatctgaggtgcgcaataaagaggagggcacgattacagatatcgagtcgcaagcccaggacgggaagaacagcatcagcgctacgaactctccagactcgcctctcacgaaggatggatccaattacagaaaaccagccgagaaattgacaacacgattgaaagtgaaaattttcgtcatcgattcgctcacttccgcaatcttagcagcagccattaattttggcatagcatacggcacatatcacgatcaacctgctggcgtacatctgttcagtttcccgaacgctctcgccgccgactgcagcttcacgctgctcgctcaattcattgtcacttggcttgtggaggtttttattgtcaacaatgatctacggagaggatgggtggactcgattggtttcctacccgaaccgaaaggaaaatttttgagatggtatttcctcctcgacagggcagaccagatgccgcaccaggtcaagggttggtggaagtgggtgaggtttatctggtcgcatgtcctccgatcggtcttcctcttcctcatcttcttcccgccggcgtttggagtaagcatcggcgcgctcacagccgtcggcgaaaagacagatgacggagactggaattttcccaatatgtacacgccccaaatttacaagctcattctcggtgtcgtcattggatctatcggcacgccgctcatgtcactgtacaccatcgtgcgagtcggttgggtactgaaggctgctcaaaatcacgccgcggcagcttctccgtag

SEQ ID NO: 38463 - protein, 267 aa, Muscodor strobelii
  misc_feature: SGI Peptide ID NO. 573366
  misc_feature (40)..(256): NCBI GI: 261361511 Blast Desc: conserved [Verticillium albo-atrum VaMs.102]
  misc_feature (53)..(253): NCBI GI: 46110639 Blast Desc: FG02201.1 [Gibberella zeae PH-1]
  misc_feature (53)..(265): NCBI GI: 256724870 Blast Desc: NECHADRAFT_58684 [Nectria haematococca mpVI 77-13-4]
  misc_feature (50)..(258): NCBI GI: 145611222 Blast Desc: MGG_00576 [Magnaporthe grisea 70-15] gi|145018523|gb|EDK02802.1| MGG_00576 [Magnaporthe grisea 70-15]
  misc_feature (56)..(255): NCBI GI: 171682266 Blast Desc: protein product [Podospora anserina] gi|170941092|emb|CAP66742.1| protein product [Podospora anserina]
  misc_feature (63)..(241): NCBI GI: 213406093 Blast Desc: conserved [Schizosaccharomyces japonicus yFS275] gi|212001865|gb|EEB07525.1| conserved [Schizosaccharomyces japonicus yFS275]
  misc_feature (63)..(263): NCBI GI: 19075288 Blast Desc: conserved fungal protein [Schizosaccharomyces pombe] gi|74582465|sp|O74505.1|YJD2_SCHPO RecName: Full=Uncharacterized protein C594.02c gi|3560219|emb|CAA20661.1| conserved fungal
  misc_feature (70)..(267): NCBI GI: 254585553 Blast Desc: ZYRO0G08030p [Zygosaccharomyces rouxii] gi|238941238|emb|CAR29411.1| ZYRO0G08030p [Zygosaccharomyces rouxii]
  misc_feature (66)..(253): NCBI GI: 156840875 Blast Desc: Kpol_1044p16 [Vanderwaltozyma polyspora DSM 70294] gi|156114441|gb|EDO15957.1| Kpol_1044p16 [Vanderwaltozyma polyspora DSM 70294]
  misc_feature (66)..(250): NCBI GI: 82795253 Blast Desc: of function; YHL026C is not an essential gene; in 2005 the start site was moved 141 nt upstream (see Locus History) [Saccharomyces cerevisiae] gi|97537682|sp|P38740.2|YHC6_YEAST of
  misc_feature: Useful for introducing or modulating the production of volatile compounds
MTVTPESPPSEVRNKEEGTITDIESQAQDGKNSISATNSPDSPLTKDGSNYRKPAEKLTTRLKVKIFVIDSLTSAILAAAINFGIAYGTYHDQPAGVHLFSFPNALAADCSFTLLAQFIVTWLVEVFIVNNDLRRGWVDSIGFLPEPKGKFLRWYFLLDRADQMPHQVKGWWKWVRFIWSHVLRSVFLFLIFFPPAFGVSIGALTAVGEKTDDGDWNFPNMYTPQIYKLILGVVIGSIGTPLMSLYTIVRVGWVLKAAQNHAAAASP

SEQ ID NO: 38464 - DNA, 3504 bp, Muscodor strobelii
  misc_feature: SGI EST ID NO. CUFF.92485.0
  misc_feature: Variant of the nucleotide sequence at SEQ ID NO 38462
ggctcttggagccctttcaagtgtcaagcgagaaaccaattatgtgaatgtttaaggactacgtaagcctcgagtcatcagttttgtgtcgctcgagtcctcgacgcctttttctctcggctatctcacgaaacgatccacaactccgctctggtgcctccatcgtcaacccctagccgcatgccaacccgccatggtattactagtacaccggcatttggaaccgtggggatgggtggctggtttccgacaggccccagtaagtttgaacacagcagagattcgatatcactgcttaacgcatgatgatcccctaatcgggcagaaatcgggaccgcgttggcatatttggccgttgaaggatttgtgatatcctagcaagttgaattgagcttcgttaaaatttccctcgtccactcgtatatgacgctcactagttcctaccttgtgcttacctagcttcctgcgcgcttccatccttcatcccacaagcgcatcacaccatatcgaactctatatctatttacgcgagacacccaaaatcaattttgcaatagcggccgtactattgctctcccgtctccatacataattctactacggttatttatctcgactcaaacaggagtattctttataacttctctcggtcagggacgagccgatatcttggaagcactagagacgaattgcaaatattaacatctgcttcatgatgacggttacaccggaatcgccgccatctgaggtgcgcaataaagaggagggcacgattacagatatcgagtcgcaagcccaggacgggaagaacagcatcagcgctacgaactctccagactcgcctctcacgaaggatggatccaattacagaaaaccagccgagaaattgacaacacgattgaaagtgaaaattttcgtcatcgattcgctcacttccgcaatcttagcagcagccattaattttggcatagcatacggcacatatcacgatcaacctgctggcgtacatctgttcagtttcccgaacgctctcgccgccgactgcagcttcacgctgctcgctcaattcattgtcacttggcttgtggaggtttttattgtcaacaatgatctacggagaggatgggtggactcgattggtttcctacccgaaccgaaaggaaaatttttgagatggtatttcctcctcgacagggcagaccagatgccgcaccaggtcaagggttggtggaagtgggtgaggtttatctggtcgcatgtcctccgatcggtcttcctcttcctcatcttcttcccgccggcgtttggagtaagcatcggcgcgctcacagccgtcggcgaaaagacagatgacggagactggaattttcccaatatgtacacgccccaaatttacaagctcattctcggtgtcgtcattggatctatcggcacgccgctcatgtcactgtacaccatcgtgcgagtcggttgggtactgaaggctgctcaaaatcacgccgcggcagcttctccgtagctatagagcttgaaagaacgcaggagttggcatgaaagaagcaaaaatgtttgacggctgctttacgacgtatgaatctaacgtataccccgatataatacaagctaggaactgttttgagtcagaatcataacaccacacgatcaccgtttagccgtatcgcacatctccttttccttctctaaaccagtcgtctgatgctagcgactctaccgctgaggcgtagttgataattgtgctctttgcggttgtgtaagcatgatatgcttcaatgccattttccgtgccgagcccactcgacgactttgatcctccccacggactgctggggtcattacgatgatgggtgttcacccaagtaatgccggaatcgatctgctcagcaacgcggaatgcttgggacaggtcttgtgtccaaatgcccgctccgagaccgaattgactgtcgttcgcaagctcgatggcttcttcttccttatcgaaaccgacgacgacgatgactggtccgaaggcttcttcgcgccatatccgtgtgtcaaggacacttcggcttgcttcatcgcttgagacgatgatagtaggctcgtgataatgaccgttcgatagatttgtgccgtctaattgactcttgcccaacatgcgttgtcccccaacggcgactttgccattgccacacgtgacagcctcgcctacaaatctcctcacattctccaattgttttgctgatatcagtggccccatcatcgactccgaattcgtaggcgcaccaatccgacgtgtaattgactccgtcttcgccttcagaagatccatcaaaggctcttgtatgcttttctgcacgatgattcgtgtggcggcgatgcatgtctgaccactcgccataaagctcccaaacacgatcccattgactgcaagctgcagatctgccttttcgaagacaatgaccggtgccttgccgccgagctctgctgtatacctcgcaaggtttccacctgtgattgctccgatcgcccgtcctgcagtcgtgccgcccgtgagatcaacttttcgaatgagaggatgtgatacaagggctttgccggtgtctttgccctctcctggaagtactgtaaatacgccgtccggtatcccagcctccttcaagatcggccctaacttcagtgttgtaagaggtgtgagctcactcggttttacaatcacggagtttcctgctgcgagtgccggtgcaagcttctttactgcaatgagtagtgggtgattgaacggcgttatttgtgcgacaacaccaagaggtacccgatcgatgaagttgtggagttttcccatggttggaagtagagagcgctcttctgtgcgtaggagtgaggcgtagtatttgaaccatcgggtcagagatgggacttgggctttcacttgagtttaaaagcatgggtaagtacttgcctaagcctggcgtatgagtgggcgtgggagactgattcttactttcacggatcgctcgtcctgtctgctggacttcgaggtcgatcaactcaggcaacgcggcggtgagaagcgatgcgcatttgtcgaggacatctgctcggtggtgtctggatgcgcgagaccatactcctgacttgaaggcggcgtgggcgactgtaaccgcattgtgaacatctttctctgaggctgtgtgacatctgtatgaagattaggaaatatgagaatttaaaaatatgaaagcgactgaccgcgcgaatatctgtccgtttgctgggttttctacaagtaggctgctggtggctcgagttaatcccggtggcaccattctttgcaatctagactgagggtatcttacgcaggtttgtattcgccttcgatttctcgcccatcaacccacatcaaatatgtatcagtcatcgtgtaaaatagtctctaaagttgtatgtgccaaaacgatgaaattgaaacatctagtgttctagcaattgcccgcgacgtga

SEQ ID NO: 38465 - DNA, 1566 bp, Muscodor strobelii
  misc_feature: SGI cDNA ID NO. 573367
  misc_feature: Elevated expression when VOC is produced
  misc_feature: Encodes the peptide sequence at SEQ ID NO 38466
atgactgatacatatttgatgtgggttgatgggcgagaaatcgaaggcgaatacaaacctgccagcctacttgtagaaaacccagcaaacggacagatattcgcgcgatgtcacacagcctcagagaaagatgttcacaatgcggttacagtcgcccacgccgccttcaagtcaggagtatggtctcgcgcatccagacaccaccgagcagatgtcctcgacaaatgcgcatcgcttctcaccgccgcgttgcctgagttgatcgacctcgaagtccagcagacaggacgagcgatccgtgaaatgaaagcccaagtcccatctctgacccgatggttcaaatactacgcctcactcctacgcacagaagagcgctctctacttccaaccatgggaaaactccacaacttcatcgatcgggtacctcttggtgttgtcgcacaaataacgccgttcaatcacccactactcattgcagtaaagaagcttgcaccggcactcgcagcaggaaactccgtgattgtaaaaccgagtgagctcacacctcttacaacactgaagttagggccgatcttgaaggaggctgggataccggacggcgtatttacagtacttccaggagagggcaaagacaccggcaaagcccttgtatcacatcctctcattcgaaaagttgatctcacgggcggcacgactgcaggacgggcgatcggagcaatcacaggtggaaaccttgcgaggtatacagcagagctcggcggcaaggcaccggtcattgtcttcgaaaaggcagatctgcagcttgcagtcaatgggatcgtgtttgggagctttatggcgagtggtcagacatgcatcgccgccacacgaatcatcgtgcagaaaagcatacaagagcctttgatggatcttctgaaggcgaagacggagtcaattacacgtcggattggtgcgcctacgaattcggagtcgatgatggggccactgatatcagcaaaacaattggagaatgtgaggagatttgtaggcgaggctgtcacgtgtggcaatggcaaagtcgccgttgggggacaacgcatgttgggcaagagtcaattagacggcacaaatctatcgaacggtcattatcacgagcctactatcatcgtctcaagcgatgaagcaagccgaagtgtccttgacacacggatatggcgcgaagaagccttcggaccagtcatcgtcgtcgtcggtttcgataaggaagaagaagccatcgagcttgcgaacgacagtcaattcggtctcggagcgggcatttggacacaagacctgtcccaagcattccgcgttgctgagcagatcgattccggcattacttgggtgaacacccatcatcgtaatgaccccagcagtccgtggggaggatcaaagtcgtcgagtgggctcggcacggaaaatggcattgaagcatatcatgcttacacaaccgcaaagagcacaattatcaactacgcctcagcggtagagtcgctagcatcagacgactggtttagagaaggaaaaggagatgtgcgatacggctaa

SEQ ID NO: 38466 - protein, 521 aa, Muscodor strobelii
  misc_feature: SGI Peptide ID NO. 573367
  misc_feature (8)..(494): Pfam Id: PF00171 Pfam Desc: Aldehyde dehydrogenase family
  misc_feature (5)..(521): NCBI GI: 255951290 Blast Desc: Pc22g25250 [Penicillium chrysogenum Wisconsin 54-1255] gi|211593429|emb|CAP99813.1| Pc22g25250 [Penicillium chrysogenum Wisconsin 54-1255]
  misc_feature (3)..(521): NCBI GI: 189194301 Blast Desc: betaine aldehyde dehydrogenase [Pyrenophora tritici-repentis Pt-1C-BFP] gi|187979053|gb|EDU45679.1| betaine aldehyde dehydrogenase [Pyrenophora tritici-repentis Pt-1C-BFP]
  misc_feature (3)..(521): NCBI GI: 169610992 Blast Desc: SNOG_08605 [Phaeosphaeria nodorum SN15] gi|160702195|gb|EAT83773.2| SNOG_08605 [Phaeosphaeria nodorum SN15]
  misc_feature (1)..(521): NCBI GI: 261358711 Blast Desc: aldehyde dehydrogenase [Verticillium albo-atrum VaMs.102]
  misc_feature (25)..(521): NCBI GI: 85113586 Blast Desc: NCU00715 [Neurospora crassa OR74A] gi|28926335|gb|EAA35313.1| conserved [Neurospora crassa OR74A]
  misc_feature (3)..(521): NCBI GI: 256721206 Blast Desc: NECHADRAFT_82311 [Nectria haematococca mpVI 77-13-4]
  misc_feature (3)..(521): NCBI GI: 145604949 Blast Desc: MGG_01991 [Magnaporthe grisea 70-15] gi|145012857|gb|EDJ97498.1| MGG_01991 [Magnaporthe grisea 70-15]
  misc_feature (23)..(521): NCBI GI: 170091676 Blast Desc: [Laccaria bicolor S238N-H82] gi|164648553|gb|EDR12796.1| [Laccaria bicolor S238N-H82]
  misc_feature (5)..(498): NCBI GI: 242795284 Blast Desc: aldehyde dehydrogenase family protein, [Talaromyces stipitatus ATCC 10500] gi|218719140|gb|EED18560.1| aldehyde dehydrogenase family protein, [Talaromyces stipitatus ATCC 10500]
  misc_feature (8)..(521): NCBI GI: 119474395 Blast Desc: aldehyde dehydrogenase family protein, [Neosartorya fischeri NRRL 181] gi|119407226|gb|EAW17176.1| aldehyde dehydrogenase family protein, [Neosartorya fischeri NRRL 181]
  misc_feature (7)..(500): SWISSPROT Homolog: EC 1.2.1.8 Betaine-aldehyde dehydrogenase
  misc_feature: Useful for introducing or modulating the production of volatile compounds
  misc_feature: Useful for fungicidal and/or biocontrol applications
MTDTYLMWVDGREIEGEYKPASLLVENPANGQIFARCHTASEKDVHNAVTVAHAAFKSGVWSRASRHHRADVLDKCASLLTAALPELIDLEVQQTGRAIREMKAQVPSLTRWFKYYASLLRTEERSLLPTMGKLHNFIDRVPLGVVAQITPFNHPLLIAVKKLAPALAAGNSVIVKPSELTPLTTLKLGPILKEAGIPDGVFTVLPGEGKDTGKALVSHPLIRKVDLTGGTTAGRAIGAITGGNLARYTAELGGKAPVIVFEKADLQLAVNGIVFGSFMASGQTCIAATRIIVQKSIQEPLMDLLKAKTESITRRIGAPTNSESMMGPLISAKQLENVRRFVGEAVTCGNGKVAVGGQRMLGKSQLDGTNLSNGHYHEPTIIVSSDEASRSVLDTRIWREEAFGPVIVVVGFDKEEEAIELANDSQFGLGAGIWTQDLSQAFRVAEQIDSGITWVNTHHRNDPSSPWGGSKSSSGLGTENGIEAYHAYTTAKSTIINYASAVESLASDDWFREGKGDVRYG

SEQ ID NO: 38467 - DNA, 2295 bp, Muscodor strobelii
  misc_feature: SGI EST ID NO. CUFF.92486.2
  misc_feature: Variant of the nucleotide sequence at SEQ ID NO 38465
gtttcaatttcatcgttttggcacatacaactttagagactattttacacgatgactgatacatatttgatgtgggttgatgggcgagaaatcgaaggcgaatacaaacctgccagcctacttgtagaaaacccagcaaacggacagatattcgcgcgatgtcacacagcctcagagaaagatgttcacaatgcggttacagtcgcccacgccgccttcaagtcaggagtatggtctcgcgcatccagacaccaccgagcagatgtcctcgacaaatgcgcatcgcttctcaccgccgcgttgcctgagttgatcgacctcgaagtccagcagacaggacgagcgatccgtgaaatgaaagcccaagtcccatctctgacccgatggttcaaatactacgcctcactcctacgcacagaagagcgctctctacttccaaccatgggaaaactccacaacttcatcgatcgggtacctcttggtgttgtcgcacaaataacgccgttcaatcacccactactcattgcagtaaagaagcttgcaccggcactcgcagcaggaaactccgtgattgtaaaaccgagtgagctcacacctcttacaacactgaagttagggccgatcttgaaggaggctgggataccggacggcgtatttacagtacttccaggagagggcaaagacaccggcaaagcccttgtatcacatcctctcattcgaaaagttgatctcacgggcggcacgactgcaggacgggcgatcggagcaatcacaggtggaaaccttgcgaggtatacagcagagctcggcggcaaggcaccggtcattgtcttcgaaaaggcagatctgcagcttgcagtcaatgggatcgtgtttgggagctttatggcgagtggtcagacatgcatcgccgccacacgaatcatcgtgcagaaaagcatacaagagcctttgatggatcttctgaaggcgaagacggagtcaattacacgtcggattggtgcgcctacgaattcggagtcgatgatggggccactgatatcagcaaaacaattggagaatgtgaggagatttgtaggcgaggctgtcacgtgtggcaatggcaaagtcgccgttgggggacaacgcatgttgggcaagagtcaattagacggcacaaatctatcgaacggtcattatcacgagcctactatcatcgtctcaagcgatgaagcaagccgaagtgtccttgacacacggatatggcgcgaagaagccttcggaccagtcatcgtcgtcgtcggtttcgataaggaagaagaagccatcgagcttgcgaacgacagtcaattcggtctcggagcgggcatttggacacaagacctgtcccaagcattccgcgttgctgagcagatcgattccggcattacttgggtgaacacccatcatcgtaatgaccccagcagtccgtggggaggatcaaagtcgtcgagtgggctcggcacggaaaatggcattgaagcatatcatgcttacacaaccgcaaagagcacaattatcaactacgcctcagcggtagagtcgctagcatcagacgactggtttagagaaggaaaaggagatgtgcgatacggctaaacggtgatcgtgtggtgttatgattctgactcaaaacagttcctagcttgtattatatcggggtatacgttagattcatacgtcgtaaagcagccgtcaaacatttttgcttctttcatgccaactcctgcgttctttcaagctctatagctacggagaagctgccgcggcgtgattttgagcagccttcagtacccaaccgactcgcacgatggtgtacagtgacatgagcggcgtgccgatagatccaatgacgacaccgagaatgagcttgtaaatttggggcgtgtacatattgggaaaattccagtctccgtcatctgtcttttcgccgacggctgtgagcgcgccgatgcttactccaaacgccggcgggaagaagatgaggaagaggaagaccgatcggaggacatgcgaccagataaacctcacccacttccaccaacccttgacctggtgcggcatctggtctgccctgtcgaggaggaaataccatctcaaaaattttcctttcggttcgggtaggaaaccaatcgagtccacccatcctctccgtagatcattgttgacaataaaaacctccacaagccaagtgacaatgaattgagcgagcagcgtgaagctgcagtcggcggcgagagcgttcgggaaactgaacagatgtacgccagcaggttg

SEQ ID NO: 38468 - DNA, 594 bp, Muscodor strobelii
  misc_feature: SGI cDNA ID NO. 573368
  misc_feature: Elevated expression when VOC is produced
  misc_feature: Encodes the peptide sequence at SEQ ID NO 38469
atgatggggccactgatatcagcaaaacaattggagaatgtgaggagatttgtaggcgaggctgtcacgtgtggcaatggcaaagtcgccgttgggggacaacgcatgttgggcaagagtcaattagacggcacaaatctatcgaacggtcattatcacgagcctactatcatcgtctcaagcgatgaagcaagccgaagtgtccttgacacacggatatggcgcgaagaagccttcggaccagtcatcgtcgtcgtcggtttcgataaggaagaagaagccatcgagcttgcgaacgacagtcaattcggtctcggagcgggcatttggacacaagacctgtcccaagcattccgcgttgctgagcagatcgattccggcattacttgggtgaacacccatcatcgtaatgaccccagcagtccgtggggaggatcaaagtcgtcgagtgggctcggcacggaaaatggcattgaagcatatcatgcttacacaaccgcaaagagcacaattatcaactacgcctcagcggtagagtcgctagcatcagacgactggtttagagaaggaaaaggagatgtgcgatacggctaa

SEQ ID NO: 38469 - protein, 197 aa, Muscodor strobelii
  misc_feature: SGI Peptide ID NO. 573368
  misc_feature (2)..(170): Pfam Id: PF00171 Pfam Desc: Aldehyde dehydrogenase family
  misc_feature (2)..(197): NCBI GI: 255951290 Blast Desc: Pc22g25250 [Penicillium chrysogenum Wisconsin 54-1255] gi|211593429|emb|CAP99813.1| Pc22g25250 [Penicillium chrysogenum Wisconsin 54-1255]
  misc_feature (1)..(197): NCBI GI: 85113586 Blast Desc: NCU00715 [Neurospora crassa OR74A] gi|28926335|gb|EAA35313.1| conserved [Neurospora crassa OR74A]
  misc_feature (1)..(197): NCBI GI: 169610992 Blast Desc: SNOG_08605 [Phaeosphaeria nodorum SN15] gi|160702195|gb|EAT83773.2| SNOG_08605 [Phaeosphaeria nodorum SN15]
  misc_feature (1)..(197): NCBI GI: 261358711 Blast Desc: aldehyde dehydrogenase [Verticillium albo-atrum VaMs.102]
  misc_feature (1)..(197): NCBI GI: 189194301 Blast Desc: betaine aldehyde dehydrogenase [Pyrenophora tritici-repentis Pt-1C-BFP] gi|187979053|gb|EDU45679.1| betaine aldehyde dehydrogenase [Pyrenophora tritici-repentis Pt-1C-BFP]
  misc_feature (1)..(197): NCBI GI: 145604949 Blast Desc: MGG_01991 [Magnaporthe grisea 70-15] gi|145012857|gb|EDJ97498.1| MGG_01991 [Magnaporthe grisea 70-15]
  misc_feature (2)..(197): NCBI GI: 256721206 Blast Desc: NECHADRAFT_82311 [Nectria haematococca mpVI 77-13-4]
  misc_feature (2)..(185): NCBI GI: 238607391 Blast Desc: MPER_02692 [Moniliophthora perniciosa FA553] gi|215470499|gb|EEB97894.1| MPER_02692 [Moniliophthora perniciosa FA553]
  misc_feature (2)..(197): NCBI GI: 170091676 Blast Desc: [Laccaria bicolor S238N-H82] gi|164648553|gb|EDR12796.1| [Laccaria bicolor S238N-H82]
  misc_feature (1)..(197): NCBI GI: 71020589 Blast Desc: UM04378.1 [Ustilago maydis 521] gi|46100420|gb|EAK85653.1| UM04378.1 [Ustilago maydis 521]
  misc_feature (2)..(134): SWISSPROT Homolog: EC 1.2.1.19 Aminobutyraldehyde dehydrogenase
  misc_feature: Useful for introducing or modulating the production of volatile compounds
  misc_feature: Useful for fungicidal and/or biocontrol applications
MMGPLISAKQLENVRRFVGEAVTCGNGKVAVGGQRMLGKSQLDGTNLSNGHYHEPTIIVSSDEASRSVLDTRIWREEAFGPVIVVVGFDKEEEAIELANDSQFGLGAGIWTQDLSQAFRVAEQIDSGITWVNTHHRNDPSSPWGGSKSSSGLGTENGIEAYHAYTTAKSTIINYASAVESLASDDWFREGKGDVRYG

SEQ ID NO: 38470 - DNA, 2295 bp, Muscodor strobelii; identical to SEQ ID NO: 38467
  misc_feature: SGI EST ID NO. CUFF.92486.2
  misc_feature: Variant of the nucleotide sequence at SEQ ID NO 38468

SEQ ID NO: 38471 - DNA, 1227 bp, Muscodor strobelii
  misc_feature: SGI cDNA ID NO. 573369
  misc_feature: Encodes the peptide sequence at SEQ ID NO 38472
atgcccgaagacatgacactccagtatatgcttgcacggcgatacttcgctcacttggacgcaggccacgccacggcacgtttaccaggcgaagacgtcaaactaaacacctctctgactctggctgaggttgaagagtacagtcggctcttggatgtcttgccatggagcgatgactcgttgaagttcgcgacctgttcacagtgtctgcaatcggagattgaatctataacggtgtccttagatgctgatattctcaaaatatttgttcggagcgcgatcaacacactcgctggtatcaatgtcaaacaagtcataaacgagcttgaacgagcagagtggcttaggtctggcctattgacattcatgaataccttcaacgtcgactttacagcgttcgatatacaactgtcgatttgcctgcatcagcaattacagaacgacaagcatatgttgccatttgtcaactacaacaaccacccacttagtctcagtcgcgcgcaaaaggcagcatacaacaacatcaaactctcgatattaagaggcacacacgagtctggtcgttcgactctaatcccattcttcgagcatcttatgcaaccaagagaaagacgcgagtgtatcgtgtgcatgaaagtacgcacagaatttgcccccgctgatgttgccccatgggtgaatttcacctttcgtggttggaaatggaaaatcttcaagttcccgacaaatatgacattgcccgaatgtgaacatgatctcgacgtttgccgatggtgcttcaaagaacacattgcatcgcaactaggaacgcgcggtcgcgccgctgtaaacagtatcccgtgcccatcgtacgattgcgaccatatcctcacgcacgcagaagtccgagatcatagcaccgacgaagccttcacgcagtacgacaacttctccacgctctcactcgtctcatcgcttcctgactttcgctggtgtctcaacccggcatgttcgtttggggccgtatacgatgtcttggcgtctcgcttggagccagaatcgaagcaagatgacaaaggcgatgtagataataataacgacaacgaagacgatggttatgacgaagccgacgcaggcaacaaaggcgatggggaccccgtcctcgaatgcgaaatcaaacgggacgggtctcgaattacgttatgtcatgcactcaatacatggagcatcgcgaagaaatcatcctaa

SEQ ID NO: 38472 - protein, 408 aa, Muscodor strobelii
  misc_feature: SGI Peptide ID NO. 573369
  misc_feature (172)..(337): NCBI GI: 256720578 Blast Desc: NECHADRAFT_85406 [Nectria haematococca mpVI 77-13-4]
  misc_feature (240)..(340): NCBI GI: 256731926 Blast Desc: NECHADRAFT_80796 [Nectria haematococca mpVI 77-13-4]
  misc_feature (249)..(395): NCBI GI: 85114236 Blast Desc: NCU11208 [Neurospora crassa OR74A] gi|16945411|emb|CAC10096.2| conserved [Neurospora crassa] gi|28926451|gb|EAA35425.1| [Neurospora crassa OR74A]
  misc_feature (238)..(340): NCBI GI: 169615298 Blast Desc: SNOG_10806 [Phaeosphaeria nodorum SN15] gi|111061080|gb|EAT82200.1| SNOG_10806 [Phaeosphaeria nodorum SN15]
  misc_feature (238)..(336): NCBI GI: 170091398 Blast Desc: [Laccaria bicolor S238N-H82] gi|164648414|gb|EDR12657.1| [Laccaria bicolor S238N-H82]
  misc_feature (201)..(325): NCBI GI: 189202972 Blast Desc: conserved [Pyrenophora tritici-repentis Pt-1C-BFP] gi|187984921|gb|EDU50409.1| conserved [Pyrenophora tritici-repentis Pt-1C-BFP]
  misc_feature (247)..(399): NCBI GI: 116180776 Blast Desc: CHGG_01016 [Chaetomium globosum CBS 148.51] gi|88185313|gb|EAQ92781.1| CHGG_01016 [Chaetomium globosum CBS 148.51]
  misc_feature (201)..(343): NCBI GI: 169596090 Blast Desc: SNOG_00796 [Phaeosphaeria nodorum SN15] gi|111071171|gb|EAT92291.1| SNOG_00796 [Phaeosphaeria nodorum SN15]
  misc_feature (205)..(341): NCBI GI: 116205373 Blast Desc: CHGG_10570 [Chaetomium globosum CBS 148.51] gi|88176698|gb|EAQ84166.1| CHGG_10570 [Chaetomium globosum CBS 148.51]
  misc_feature (240)..(337): NCBI GI: 154317160 Blast Desc: BC1G_03482 [Botryotinia fuckeliana B05.10] gi|150844899|gb|EDN20092.1| BC1G_03482 [Botryotinia fuckeliana B05.10]
MPEDMTLQYMLARRYFAHLDAGHATARLPGEDVKLNTSLTLAEVEEYSRLLDVLPWSDDSLKFATCSQCLQSEIESITVSLDADILKIFVRSAINTLAGINVKQVINELERAEWLRSGLLTFMNTFNVDFTAFDIQLSICLHQQLQNDKHMLPFVNYNNHPLSLSRAQKAAYNNIKLSILRGTHESGRSTLIPFFEHLMQPRERRECIVCMKVRTEFAPADVAPWVNFTFRGWKWKIFKFPTNMTLPECEHDLDVCRWCFKEHIASQLGTRGRAAVNSIPCPSYDCDHILTHAEVRDHSTDEAFTQYDNFSTLSLVSSLPDFRWCLNPACSFGAVYDVLASRLEPESKQDDKGDVDNNNDNEDDGYDEADAGNKGDGDPVLECEIKRDGSRITLCHALNTWSIAKKSS

SEQ ID NO: 38473 - DNA, 876 bp, Muscodor strobelii
  misc_feature: SGI cDNA ID NO. 573370
  misc_feature: Encodes the peptide sequence at SEQ ID NO 38474
atgcggtcatctagattgagcttggcactggtcgcatgcagttcgtccctctgcgcggcgcatagcttcatctccaacatcaacattgaccgactgtactacgatggattcttcccatctgtatccagccccgacccactagcaatcggatggtcaacgacggctgtcgaccagggatatgtgaaccagacaggttacactactgatgagatcatctgccaccgaggatcccgcaatgcccgcgctcacgttctggtcaaagccggcgatcggatacagcttcaatggcacggttggcctcaatctcacaaaggacccgtcatggactacctcgcttcctgcggggagaacaagccttgtgaaacagttgacaagaacgacctacggttcttcaagatcgatgagatgggcttgatcaacgggaccaacaatacggtcggaggaccgggcggtctgtgggcttcagacttgctcattgcaaataacaactcttgggttgtcgagattccatcccagatcaagccgggattctacgtcctccggacagagatcatcgccctgcataatgccagcaatgctctcggagcacagaactaccctcagtgccttaatctacgcattgcgggcaatggcaatctactaccgagtgggacgcttggaaaggagttgtacagccccgatgatcccagtgtgcacctagatatctacaaaggactttctacatataagattccgggccccactccgatctcagtcgcgacaactgtatcactgagccatccggtgccgacaagtgatggacccatctacaccggtactgcgaccacgccggtaaccactctagtcaccactacggccactacaagtcatcgttaa

SEQ ID NO: 38474 - protein, 291 aa, Muscodor strobelii
  misc_feature: SGI Peptide ID NO. 573370
  misc_feature (4)..(244): Pfam Id: PF03443 Pfam Desc: Glycosyl hydrolase family 61
  misc_feature (3)..(260): NCBI GI: 85090783 Blast Desc: NCU05969 [Neurospora crassa OR74A] gi|28919956|gb|EAA29347.1| NCU05969 [Neurospora crassa OR74A]
  misc_feature (21)..(275): NCBI GI: 256724981 Blast Desc: NECHADRAFT_103611 [Nectria haematococca mpVI 77-13-4]
  misc_feature (1)..(290): NCBI GI: 119495445 Blast Desc: endoglucanase, [Neosartorya fischeri NRRL 181] gi|119412669|gb|EAW22610.1| endoglucanase, [Neosartorya fischeri NRRL 181]
  misc_feature (19)..(280): NCBI GI: 145246562 Blast Desc: An12g04610 [Aspergillus niger] gi|134080248|emb|CAK97151.1| protein product [Aspergillus niger]
  misc_feature (20)..(274): NCBI GI: 70986426 Blast Desc: endo-1,4-beta-glucanase [Aspergillus fumigatus Af293] gi|66846336|gb|EAL86669.1| endo-1,4-beta-glucanase, [Aspergillus fumigatus Af293] gi|159128122|gb|EDP53237.1| [Aspergillus A1163]
  misc_feature (19)..(248): NCBI GI: 242775172 Blast Desc: endoglucanase, [Talaromyces stipitatus ATCC 10500] gi|218722209|gb|EED21627.1| endoglucanase, [Talaromyces stipitatus ATCC 10500]
  misc_feature (1)..(259): NCBI GI: 115391767 Blast Desc: conserved [Aspergillus terreus NIH2624] gi|114194312|gb|EAU36012.1| conserved [Aspergillus terreus NIH2624]
  misc_feature (19)..(278): NCBI GI: 159122044 Blast Desc: endoglucanase/cellulase, [Aspergillus fumigatus A1163]
  misc_feature (10)..(247): NCBI GI: 169768592 Blast Desc: [Aspergillus oryzae RIB40] gi|83766624|dbj|BAE56764.1| protein product [Aspergillus oryzae]
  misc_feature (1)..(261): NCBI GI: 154319179 Blast Desc: BC1G_02541 [Botryotinia fuckeliana B05.10] gi|150856972|gb|EDN32164.1| BC1G_02541 [Botryotinia fuckeliana B05.10]
  misc_feature (21)..(251): SWISSPROT Homolog: EC 3.2.1.4 Cellulase
MRSSRLSLALVACSSSLCAAHSFISNINIDRLYYDGFFPSVSSPDPLAIGWSTTAVDQGYVNQTGYTTDEIICHRGSRNARAHVLVKAGDRIQLQWHGWPQSHKGPVMDYLASCGENKPCETVDKNDLRFFKIDEMGLINGTNNTVGGPGGLWASDLLIANNNSWVVEIPSQIKPGFYVLRTEIIALHNASNALGAQNYPQCLNLRIAGNGNLLPSGTLGKELYSPDDPSVHLDIYKGLSTYKIPGPTPISVATTVSLSHPVPTSDGPIYTGTATTPVTTLVTTTATTSHR

SEQ ID NO: 38475 - DNA, 1788 bp, Muscodor strobelii
  misc_feature: SGI EST ID NO. CUFF.92456.0
  misc_feature: Variant of the nucleotide sequence at SEQ ID NO 38473
ctcattttcatttatctcgagctttcgttacgtgataatatctgccaatatacgacccctggtttgaattcaacggcctagcagtcaaacatccactttgccctgactggcttacatcgtcacctgaacaagctcaatacgcgttatgcttgtcgcgctgcggacatacatcagcatccacgagagagaagatcgcataggcccacagcgcgccgtgagacccgaaagacccgagatcctcgaaatttatactagaatcgtccactgagttgattccccatcacaacacgccttgctgcttggtggaatcaactttgcgctcagccgccttgtttcaaatacatccaagaccaacgcgcaatcatgccatggaagctatgctctgagccgttcttcaacggaaccaattactatggctcacagacgtggccctgccatgtgtagtaattaggcaaaagggcacttccgtgggttcggtctgggatctcataaagcttgtatatcagccttgtcccgtccattttcatcatgccggagactcttatgtgttggattgtcagtgtgtctgctgcgaacctggtacctggacttttccacacctgatcgacccggtctagagaagaatatagatctggaagcacatgcttctgcatcgcactactaccgacagacgtcattgaacatgcggtcatctagattgagcttggcactggtcgcatgcagttcgtccctctgcgcggcgcatagcttcatctccaacatcaacattgaccgactgtactacgatggattcttcccatctgtatccagccccgacccactagcaatcggatggtcaacgacggctgtcgaccagggatatgtgaaccagacaggttacactactgatgagatcatctgccaccgaggatcccgcaatgcccgcgctcacgttctggtcaaagccggcgatcggatacagcttcaatggcacggttggcctcaatctcacaaaggacccgtcatggactacctcgcttcctgcggggagaacaagccttgtgaaacagttgacaagaacgacctacggttcttcaagatcgatgagatgggcttgatcaacgggaccaacaatacggtcggaggaccgggcggtctgtgggcttcagacttgctcattgcaaataacaactcttgggttgtcgagattccatcccagatcaagccgggattctacgtcctccggacagagatcatcgccctgcataatgccagcaatgctctcggagcacagaactaccctcagtgccttaatctacgcattgcgggcaatggcaatctactaccgagtgggacgcttggaaaggagttgtacagccccgatgatcccagtgtgcacctagatatctacaaaggactttctacatataagattccgggccccactccgatctcagtcgcgacaactgtatcactgagccatccggtgccgacaagtgatggacccatctacaccggtactgcgaccacgccggtaaccactctagtcaccactacggccactacaagtcatcgttaaatctacgttctcaactccatctatgcttgaagtttcgggcgaattgatgatgtcaacgcccctggttcccagtccattttggtactgcatttgtggcgtattgtgctaagcagcatttgtatatactcggtgacttctagtaaatcttagtacatcttgctctagataagactggtcctaattgctattgatcatgtggtagcctcatgtcgagtagaatccaccgcttt

SEQ ID NO: 38476 - DNA, 600 bp, Muscodor strobelii
  misc_feature: SGI cDNA ID NO. 573371
  misc_feature: Elevated expression when VOC is produced
  misc_feature: Encodes the peptide sequence at SEQ ID NO 38477
atgcgattgaccaagttccgaaagaaggtcaaagacctcttgaagcgccgtggcgacagcgaccatggccgcggcgacagcaccaaggacgaggacaagccgcatagctctctatcatccgataccatttcgcctcctttcattgctcagtctcagaatagtcgcacacctcatggccaaccaagcgccggagctcgtaatcagcccgcctcatcctcgcaacacatgaccgccgaagcgcagtggcacaaccgagcacctagcagccagctccctcccggcctaaagcttcgagacagaaatccacgagatttgcagcaccatcttggtttaacagactacccggctaagttccgcaacgacgatttcatggcctacgttccgccttcgggcaactgggtgcagtgttggagctgctgcggtgagaagattggaatgacctccggctgtgttagtaatcgtcatgttgccaagcccgttggtcgctcgtccgcccccgccaacgcgcccgtattcgagcccagagaacgccgcggccgcacgccccctatcgccaaccatagcatccgaggagagtcgtcgcgaatttggctcggatag

SEQ ID NO: 38477 - protein, 199 aa, Muscodor strobelii
  misc_feature: SGI Peptide ID NO. 573371
  misc_feature: Useful for introducing or modulating the production of volatile compounds
MRLTKFRKKVKDLLKRRGDSDHGRGDSTKDEDKPHSSLSSDTISPPFIAQSQNSRTPHGQPSAGARNQPASSSQHMTAEAQWHNRAPSSQLPPGLKLRDRNPRDLQHHLGLTDYPAKFRNDDFMAYVPPSGNWVQCWSCCGEKIGMTSGCVSNRHVAKPVGRSSAPANAPVFEPRERRGRTPPIANHSIRGESSRIWLG

SEQ ID NO: 38478 - DNA, 738 bp, Muscodor strobelii
  misc_feature: SGI cDNA ID NO. 573372
  misc_feature: Encodes the peptide sequence at SEQ ID NO 38479
atgatcgccagcaagcttctctctattgccgtgctcgcaggcagcgcaattgctcagaatgcaacgatccgcttcatgcccttcggtgactccatcacggagattatttgctggcgtgcattgctttgggagaagttgcagagcactgaattcgcctcggtgaactgggttgggtccaacaatgatgacgaaggaaactgcaacgacgcaaaatacaacaagcacaatgagggacactcaggatttcttgccatcaacattgcaaacaacaagcagcttgtcggctggcttaagaccaaccctgctgatgttatcacaatgcatcttggcacaaatgatattgtgcagcagaacaaacctacggatcaaatcattgcggctttcacgacactcgtcagtaacatgagagatagtaatcccaatatgaagattattgttgcacaaattatccccttgggccttggtaattacaataccgcgatccaaaacctgaacaaggccatcataccgtgggcccaaggcttgaacaagaccgagtctcctatctgggtcgtggatcagtacaccggctttagctcgtctgacctgcgtgatggtgttcatcccaacatcgctggggacaccaagatggccaatgtctggtacccggctatcatgaatgcattcgctgttgcaaaggcggacaagattgcacttgcagcagaacctgagaagattgcaacaccgttcacagcatga

SEQ ID NO: 38479 - protein, 245 aa, Muscodor strobelii
  misc_feature: SGI Peptide ID NO. 573372
  misc_feature (25)..(214): Pfam Id: PF00657 Pfam Desc: GDSL-like Lipase/Acylhydrolase
  misc_feature (23)..(231): NCBI GI: 169623128 Blast Desc: SNOG_14793 [Phaeosphaeria nodorum SN15] gi|111056865|gb|EAT77985.1| SNOG_14793 [Phaeosphaeria nodorum SN15]
  misc_feature (1)..(220): NCBI GI: 171677576 Blast Desc: protein product [Podospora anserina] gi|170936856|emb|CAP61514.1| protein product [Podospora anserina]
  misc_feature (1)..(220): NCBI GI: 85093612 Blast Desc: NCU05751 [Neurospora crassa OR74A] gi|28921177|gb|EAA30490.1| conserved [Neurospora crassa OR74A]
  misc_feature (4)..(227): NCBI GI: 171694714 Blast Desc: protein product [Podospora anserina] gi|170947599|emb|CAP59760.1| protein product [Podospora anserina]
  misc_feature (23)..(223): NCBI GI: 32487269 Blast Desc: [Nonomuraea sp. ATCC 39727]
  misc_feature (18)..(218): NCBI GI: 271967014 Blast Desc: Sros_5719 [Streptosporangium roseum DSM 43021] gi|270510189|gb|ACZ88467.1| Sros_5719 [Streptosporangium roseum DSM 43021]
  misc_feature (23)..(223): NCBI GI: 270498267 Blast Desc: cellulose-binding family II [Micromonospora aurantiaca ATCC 27029] gi|270325025|gb|EFA35933.1| cellulose-binding family II [Micromonospora aurantiaca ATCC 27029]
  misc_feature (6)..(215): NCBI GI: 116199031 Blast Desc: CHGG_07671 [Chaetomium globosum CBS 148.51] gi|88178950|gb|EAQ86418.1| CHGG_07671 [Chaetomium globosum CBS 148.51]
  misc_feature (9)..(236): NCBI GI: 171691086 Blast Desc: protein product [Podospora anserina] gi|170945491|emb|CAP71603.1| protein product [Podospora anserina]
  misc_feature (6)..(229): NCBI GI: 39942516 Blast Desc: MGG_03338 [Magnaporthe grisea 70-15] gi|145015649|gb|EDK00139.1| MGG_03338 [Magnaporthe grisea 70-15]
MIASKLLSIAVLAGSAIAQNATIRFMPFGDSITEIICWRALLWEKLQSTEFASVNWVGSNNDDEGNCNDAKYNKHNEGHSGFLAINIANNKQLVGWLKTNPADVITMHLGTNDIVQQNKPTDQIIAAFTTLVSNMRDSNPNMKIIVAQIIPLGLGNYNTAIQNLNKAIIPWAQGLNKTESPIWVVDQYTGFSSSDLRDGVHPNIAGDTKMANVWYPAIMNAFAVAKADKIALAAEPEKIATPFTA

SEQ ID NO: 38480 - DNA, 540 bp, Muscodor strobelii
  misc_feature: SGI cDNA ID NO. 573373
  misc_feature: Encodes the peptide sequence at SEQ ID NO 38481
atgccttccactatcagtagcttcgagggcagcgacaaagcatctcctgatcttgggttcatgcagaatatcctcagctccgctgaacgagctgatcctcgtggatgttactacattcaaccgacatggcgcataaacgagctaccatcgccgacaagagcgagcctcgaccccttcccgaccaaccctctttcaaagaaaacacaatccgaacagaccgcacgcacaaggaaactgccttttcgagagctattacgccacctgtctcgctccgagcttcgagaggtgatcatgaatgcctcactcagagacttcgatgctcaccgcgacgtggtacaaatcttgaaggacatgcatgcacgaaagcctcggcctatcggtaatgatgtcaagcgacctgtggctggcctatatttgtactgtcgcagtcagaaagaattggtagacattgttcttgagctggagcggaacgataccacgggcaacttcaagcgggatgtcaaagatctgatcatggttatgaaggagaaaggcgattga

SEQ ID NO: 38481 - protein, 179 aa, Muscodor strobelii
  misc_feature: SGI Peptide ID NO. 573373
MPSTISSFEGSDKASPDLGFMQNILSSAERADPRGCYYIQPTWRINELPSPTRASLDPFPTNPLSKKTQSEQTARTRKLPFRELLRHLSRSELREVIMNASLRDFDAHRDVVQILKDMHARKPRPIGNDVKRPVAGLYLYCRSQKELVDIVLELERNDTTGNFKRDVKDLIMVMKEKGD

SEQ ID NO: 38482 - DNA, 390 bp, Muscodor strobelii
  misc_feature: SGI cDNA ID NO. 573374
  misc_feature: Encodes the peptide sequence at SEQ ID NO 38483
atgccttccactatcagtagcttcgagggcagcgacaaagcatctcctgatcttgggttcatgcagaatatcctcagctccgctgaacgagctgatcctcgtgggtacgtcatgttactacattcaaccgacatggcgcataaacgagctaccatcgccgacaagagcgagcctcgaccccttcccgaccaaccctctttcaaagaaaacacaatccgaacagaccgcacgcacaaggaaactgccttttcgagagctattacgccacctgtctcgctccgagcttcgagaggtgatcatgaatgcctcactcagagacttcgatgctcaccgcgacgtggtacaaatcttgaaggacatgcatgcacgaaagcctcggcctatcggtaa

SEQ ID NO: 38483 - protein, 129 aa, Muscodor strobelii
  misc_feature: SGI Peptide ID NO. 573374
MPSTISSFEGSDKASPDLGFMQNILSSAERADPRGYVMLLHSTDMAHKRATIADKSEPRPLPDQPSFKENTIRTDRTHKETAFSRAITPPVSLRASRGDHECLTQRLRCSPRRGTNLEGHACTKASAYR

SEQ ID NO: 38484 - DNA, 312 bp, Muscodor strobelii
  misc_feature: SGI cDNA ID NO. 573375
  misc_feature: Elevated expression when VOC is produced
  misc_feature: Encodes the peptide sequence at SEQ ID NO 38485
atggctgaccatgccgatagaagcgaggcggtgtttcgtggcaaatatacagcaaactcggtcaacgagtctccgacgaatccaaacaagactgtttctgagacaaagacaggacatcgctgggtgattctcggcttgcttacccagatttatacaaccttcaaggcatatgaagtgtataaagatttccatagttgggatggtctacgccgacaggagaagttttggcttgtctggggtgtggttcataccttagttatgggtttccagatatttcttgaattttacatgaagtatctgtaccatcgctga

SEQ ID NO: 38485 - protein, 103 aa, Muscodor strobelii
  misc_feature: SGI Peptide ID NO. 573375
  misc_feature: Useful for introducing or modulating the production of volatile compounds
MADHADRSEAVFRGKYTANSVNESPTNPNKTVSETKTGHRWVILGLLTQIYTTFKAYEVYKDFHSWDGLRRQEKFWLVWGVVHTLVMGFQIFLEFYMKYLYHR

SEQ ID NO: 38486 - DNA, 1395 bp, Muscodor strobelii
  misc_feature: SGI EST ID NO. CUFF.92572.1
  misc_feature: Variant of the nucleotide sequence at SEQ ID NO 38484
ggccatcacattttatatcttaagtatatcggtcaaatgagggagtgagatgatcatgggttcatgcgcctctgatacgaagaaaacatctagatcggcatcaagatccaaggcagagcctgtctccgatgatgtgtgcctttctcatccatctcatcgtctcacgagataccactgaacgattgatctgcggcttgaatgttgctaattgtggatgttagtaagctcatcatggcggccatattcgcagaaacccggggcaagtaggtcgagcgccgcactccattgcttagatgggttctgatcgccacgatgtagcaaatagccttgcggcctggatgcgtgtgttcggtgagatagaacaatgcagtgttacagagaaacacgtcatgtaaaagagattccccggcgttgttatccttcaaaccactcagcctttccctaaagggaccaacagagtatattcaacttcactgttggttgctgtggactgatgcgcacggcacgaaaaccttgatgggctgagctttcgtggctgttgagctgacagccaacggaaaaccatttgatgccttgacctagcactggtcgtcactaacttggtgggtaaggtgtggtccacagggcagcccatcgattggtcacaattgccaccaacagctacaatgcatatgcctcccttctccataacaataattgcgcacgcagtcgcactttatctggccaccacgtcgagtacttccgtcataccagtgttgcccaactattctgtcttggaagcacgcgactcccgagccagcaggaaacatggctgaccatgccgatagaagcgaggcggtgtttcgtggcaaatatacagcaaactcggtcaacgagtctccgacgaatccaaacaagactgtttctgagacaaagacaggacatcgctgggtgattctcggcttgcttacccagatttatacaaccttcaaggcatatgaagtgtataaagatttccatagttgggatggtctacgccgacaggagaagttttggcttgtctggggtgtggttcataccttagttatgggtttccagatatttcttgaattttacatgaagtatctgtaccatcgctgacttcaaaatggacgaaagcggacagatacatcacgttgacaaaattaccgaatgctgaattttgtggggatgatggtcaatgatgcaacaaactaggctttagactgcttcgagaattgctcgaggacttctaaagttttacaatcagggctgtggaccagacatcgagcagagagaccgccgctgggtggtgggcgtggacatgccctgcgaacatgtaattacaataataccacgttgcttcaatattcttccattacccccccttgaacttgg

SEQ ID NO: 38487 - DNA, 1005 bp, Muscodor strobelii
  misc_feature: SGI cDNA ID NO. 573376
  misc_feature: Elevated expression when VOC is produced
  misc_feature: Encodes the peptide sequence at SEQ ID NO 38488
atgcagtacaacagctacctgccagagttgccgcctgggtggcccaagcttgctcctgccaagatcgaagccatgagggaaaaagcaaagagtctgtcacttcgaccagggactgatatcgctaccagggacgacgaatcagcctttgtcaaatactgtagactgggttccaaactgttccttctcggtactggcgtagtcaattggtacagcttggtttcatcctgtctgcaatttcaggatccagggagcggcgtgcaatgcgttttcggcgctattactacagtcatcggagctgttacactaggtcattcgggatatgttttgcgcggccagctggcagaacaattgactgacaacggatggcacattcccggaatcaacaaacgtgatgagtgggccagcatcttagcccgtggcttgtctgccggattcaaaactgaagtaaggcatctcggaacatgggatccaagcagcacctctcaaaagcgagtttccgatttcgagccgctaccccgagaggttttcggactccaataccgcggtcatgactatcattttacctatctggggcgagaccctagtggcaagaagtcgtggaagtttggtcttggtaacggcacttcatggccagagaacgtcgacaagcgggccggaatttcgtactctaactattacttcagctcaggtggcatcgacttcgaagtggaatctgtcgaagacttatcggccactgagtggagttgggtatcgacctcagatgatctcgaagtcgaggacatttataactcggtcgcctgctactttggcgcaaacgaagtgagtcaagttgcgcaggaattagctctgcagaacaacgcccttagtttccaggtttacgattcttacatggactatactctatctgctggcattatgtcgcccttctcagccgacgaagaatctgtcatccgatacatgaaacttgaaggaggtcttggtgtgagtgattgtggaaatctgtag

SEQ ID NO: 38488 - protein, 334 aa, Muscodor strobelii
  misc_feature: SGI Peptide ID NO. 573376
  misc_feature: Useful for introducing or modulating the production of volatile compounds
MQYNSYLPELPPGWPKLAPAKIEAMREKAKSLSLRPGTDIATRDDESAFVKYCRLGSKLFLLGTGVVNWYSLVSSCLQFQDPGSGVQCVFGAITTVIGAVTLGHSGYVLRGQLAEQLTDNGWHIPGINKRDEWASILARGLSAGFKTEVRHLGTWDPSSTSQKRVSDFEPLPREVFGLQYRGHDYHFTYLGRDPSGKKSWKFGLGNGTSWPENVDKRAGISYSNYYFSSGGIDFEVESVEDLSATEWSWVSTSDDLEVEDIYNSVACYFGANEVSQVAQELALQNNALSFQVYDSYMDYTLSAGIMSPFSADEESVIRYMKLEGGLGVSDCGNL

SEQ ID NO: 38489 - DNA, 1807 bp, Muscodor strobelii
  misc_feature: SGI EST ID NO. CUFF.92504.0
  misc_feature: Variant of the nucleotide sequence at SEQ ID NO 38487
tagcagagaaactttttccagcatcagactttgtcatttagtcagtccgaagtcttatagttcaccatgcgagcgaaccacctgatctcctttctttgggccgccattccaacgcttgctctggtctctgggccaagatgctctgacacaaagacttgcaaggcaagcttcgaaccgagtctcaggtcgaaatctacagatacttcagagctaacacacattgaaacattcgccatgcagtacaacagctacctgccagagttgccgcctgggtggcccaagcttgctcctgccaagatcgaagccatgagggaaaaagcaaagagtctgtcacttcgaccagggactgatatcgctaccagggacgacgaatcagcctttgtcaaatactgtagactgggttccaaactgttccttctcggtactggcgtagtcaattggtacagcttggtttcatcctgtctgcaatttcaggatccagggagcggcgtgcaatgcgttttcggcgctattactacagtcatcggagctgttacactaggtcattcgggatatgttttgcgcggccagctggcagaacaattgactgacaacggatggcacattcccggaatcaacaaacgtgatgagtgggccagcatcttagcccgtggcttgtctgccggattcaaaactgaagtaaggcatctcggaacatgggatccaagcagcacctctcaaaagcgagtttccgatttcgagccgctaccccgagaggttttcggactccaataccgcggtcatgactatcattttacctatctggggcgagaccctagtggcaagaagtcgtggaagtttggtcttggtaacggcacttcatggccagagaacgtcgacaagcgggccggaatttcgtactctaactattacttcagctcaggtggcatcgacttcgaagtggaatctgtcgaagacttatcggccactgagtggagttgggtatcgacctcagatgatctcgaagtcgaggacatttataactcggtcgcctgctactttggcgcaaacgaagtgagtcaagttgcgcaggaattagctctgcagaacaacgcccttagtttccaggtttacgattcttacatggactatactctatctgctggcattatgtcgcccttctcagccgacgaagaatctgtcatccgatacatgaaacttgaaggaggtcttggtgtgagtgattgtggaaatctgtagactatctctagagctggtttcttacactaaagcgtgtaatctatgtctcacctgctttttgattttaattcatatctgtctttgtcgcatagaactccgtgagggtcgtctcttctcgataggggtcgtcacttttctaatgagctttgcagtgtctagttgatgcaggagtgtgctacttgtagcagtacgcatgattcctcggccgtgaaatgaatggtgtccacgccggtcaagatattgtaaaggggcatggcttagttggccaagttccataagcaacatagatcccgatcttatgtgtgcattggcaatgtttttgaatttttcccgagagaaaactctagatagctgacccgccacacgggtcggtattagtttggcggagcacggcgacttatgcgcagtcgcttcgctcggaggcggatcttgagccttctactgggtctctgtgcgcgggagcacggcaggaatgatggaattcccggggctattgaagcctctctttatcaccgtaaagcttcaacgacttgggaacaggcattgaaatgttgcaaaatgattttca

SEQ ID NO: 38490 - DNA, 636 bp, Muscodor strobelii
  misc_feature: SGI cDNA ID NO. 573377
  misc_feature: Encodes the peptide sequence at SEQ ID NO 38491
atggcgtctcatacggcccagacgacagccttggtcggccccccactggctccgccgcctcctgccatgcccgactactacgcagacctcggcgcgactcccatggacaatgccacccagctcctcgaggccctctaccacaagcttcgcgccacccaccccgacatcgctgccgtcaactttgcagctgatcatcgagactaccagcgtgcccgcgcagcctacgacttcctctcagaccctcagcgcagacaggcttacgacatcgactactctgagctgcacgatgagtggcgtgactactaccgtctcgtcccttctgcccagcccatgcggcgacccaagcccgtccccaagggaaagcgagacccacgcgatcagtacgatgtcaaggcagccaggtatgagaaccagatcgctcagttcgaggaagacctccgtaccgtcgagtggcagattgcgacgggtgccttgcctgatcatccccagaacatcggaatcgagcgactcaggaaggataagaaggcgctgcagaagctcagcaagaggcttagcaaggagtttaaggacctgcccaccaaggatcccgctcttgagggtgccctgggcttgcgcaagtaccgtcgctttcgctga

SEQ ID NO: 38491 - protein, 211 aa, Muscodor strobelii
  misc_feature: SGI Peptide ID NO. 573377
  misc_feature (25)..(88): Pfam Id: PF00226 Pfam Desc: DnaJ domain
  misc_feature (23)..(88): NCBI GI: 261337777 Blast Desc: dTDP-glucose 4,6-dehydratase [Bifidobacterium gallicum DSM 20093] gi|270277230|gb|EFA23084.1| dTDP-glucose 4,6-dehydratase [Bifidobacterium gallicum DSM 20093]
  misc_feature (22)..(87): NCBI GI: 33862976 Blast Desc: DnaJ2 protein [Prochlorococcus marinus str. MIT 9313] gi|33634893|emb|CAE20879.1| DnaJ2 protein [Prochlorococcus marinus str. MIT 9313]
  misc_feature (18)..(101): NCBI GI: 189206960 Blast Desc: PTRG_09482 [Pyrenophora tritici-repentis Pt-1C-BFP] gi|187975907|gb|EDU42533.1| PTRG_09482 [Pyrenophora tritici-repentis Pt-1C-BFP]
  misc_feature (25)..(88): NCBI GI: 284051938 Blast Desc: heat shock protein DnaJ-like [Arthrospira platensis str. Paraca]
MASHTAQTTALVGPPLAPPPPAMPDYYADLGATPMDNATQLLEALYHKLRATHPDIAAVNFAADHRDYQRARAAYDFLSDPQRRQAYDIDYSELHDEWRDYYRLVPSAQPMRRPKPVPKGKRDPRDQYDVKAARYENQIAQFEEDLRTVEWQIATGALPDHPQNIGIERLRKDKKALQKLSKRLSKEFKDLPTKDPALEGALGLRKYRRFR

SEQ ID NO: 38492 - DNA, 1272 bp, Muscodor strobelii
  misc_feature: SGI cDNA ID NO. 573378
  misc_feature: Encodes the peptide sequence at SEQ ID NO 38493
atgccgttcgtcaagcgcagactcgtgaccgtgcgacggatcgcaaagattacgcctatccccaagtcgcataggcatgtcctaatcaagatcgacggctggaacgtcgtcgcccacgttaaggaaggctttcaagagggccaaattgttctttacatcgagatcgacagccaaatccccaacacgggcgcattctgggagttcttcgccgcgaataacaagatgatgcacggaaagctcgcgtgcgtcgttcagacgcaggtggttgcgaagcaattatcgcaaggtctcattctcccgctgcaccgctttccagaggtcaatgagtcaattgagagcctcaaggttagaaacacgaaggaggaattcgacagaatcttgatgaataagtcgttcgagaacctgctgggtgtgactaaatatgagattccagagagatttctcaagcgcaaccacaagtcactcggcttgccgcccgtctttgttgagcagcctagcagtatacgtgcacaaaacatcccaaatttgttttccaagcacgcgcatacaactttccagatcactgagaagctcgacggtgtcccaatgacggtgtatcaaatccggcgatcatctcaatggtgggccgggctcaatcccctgacagaagagagcagcaatgcaaacaatgatgacgcagaccagacatgccggatcggtgtttgcagtcgctcctccgacagggcagaaactccaaacgacatcttctggaaagctgccaacgactccctgatactccatgatatccggtctaagactatttttcgagacaggaacatcgctatacaaggcgagctatgtggcagctcgataatgagtaacagcctcggactcgatcctggtgttcatatattctttgtctttgacatttacgacattgacttgcaagcatatattcctccacgcagtgtctgggatatttgctacacacgcagatggaaacacgtacccctcgtggaagcaagtgtcaagctacatcaattcgctggaagcctagaggagttgttgaaaaaggctgagggaaagggcaagtttgggaagatgagagagggtttggtatttaaggcgatgagcggacagcgcaacatcttcaaggttatctcgaatgagtggttgcttaccactggaaaaaatgatgatgagattcttgagcgcttggatgcctcaaatgactggggtgatttcgcgactgacttcacgacgggacatcagggtgaagcggtgatgaagtga

SEQ ID NO: 38493 - protein, 423 aa, Muscodor strobelii
  misc_feature: SGI Peptide ID NO. 573378
  misc_feature (6)..(383): Pfam Id: PF09513 Pfam Desc: RNA ligase (RNA_lig_DRB0094)
  misc_feature (4)..(390): NCBI GI: 256735213 Blast Desc: NECHADRAFT_74821 [Nectria haematococca mpVI 77-13-4]
  misc_feature (5)..(390): NCBI GI: 38567100 Blast Desc: [Neurospora crassa]
  misc_feature (4)..(390): NCBI GI: 46107398 Blast Desc: FG00582.1 [Gibberella zeae PH-1]
  misc_feature (6)..(385): NCBI GI: 39972911 Blast Desc: MGG_07750 [Magnaporthe grisea 70-15] gi|145012519|gb|EDJ97173.1| MGG_07750 [Magnaporthe grisea 70-15]
  misc_feature (2)..(395): NCBI GI: 85104623 Blast Desc: NCU06516 [Neurospora crassa OR74A] gi|28923345|gb|EAA32537.1| [Neurospora crassa OR74A]
  misc_feature (6)..(385): NCBI GI: 284082813 Blast Desc: [Naegleria gruberi]
  misc_feature (6)..(385): NCBI GI: 284083600 Blast Desc: [Naegleria gruberi]
  misc_feature (6)..(386): NCBI GI: 269121496 Blast Desc: RNA ligase, DRB0094 family [Sebaldella termitidis ATCC 33386] gi|268615374|gb|ACZ09742.1| RNA ligase, DRB0094 family [Sebaldella termitidis ATCC 33386]
  misc_feature (5)..(386): NCBI GI: 109290186 Blast Desc: PHG25ORF200c [Aeromonas phage 25] gi|104345859|gb|ABF72759.1| PHG25ORF200c [Aeromonas phage 25]
  misc_feature (5)..(386): NCBI GI: 37651690 Blast Desc: 44RRORF209c [Aeromonas phage 44RR2.8t] gi|34732990|gb|AAQ81527.1| 44RRORF209c [Aeromonas phage 44RR2.8t]
MPFVKRRLVTVRRIAKITPIPKSHRHVLIKIDGWNVVAHVKEGFQEGQIVLYIEIDSQIPNTGAFWEFFAANNKMMHGKLACVVQTQVVAKQLSQGLILPLHRFPEVNESIESLKVRNTKEEFDRILMNKSFENLLGVTKYEIPERFLKRNHKSLGLPPVFVEQPSSIRAQNIPNLFSKHAHTTFQITEKLDGVPMTVYQIRRSSQWWAGLNPLTEESSNANNDDADQTCRIGVCSRSSDRAETPNDIFWKAANDSLILHDIRSKTIFRDRNIAIQGELCGSSIMSNSLGLDPGVHIFFVFDIYDIDLQAYIPPRSVWDICYTRRWKHVPLVEASVKLHQFAGSLEELLKKAEGKGKFGKMREGLVFKAMSGQRNIFKVISNEWLLTTGKNDDEILERLDASNDWGDFATDFTTGHQGEAVMK

SEQ ID NO: 38494 - DNA, 847 bp, Muscodor strobelii
  misc_feature: SGI EST ID NO. CUFF.92510.0
  misc_feature: Variant of the nucleotide sequence at SEQ ID NO 38492
gcagcctagcagtatacgtgcacaaaacatcccaaatttgttttccaagcacgcgcatacaactttccagatcactgagaagctcgacggtgtcccaatgacggtgtatcaaatccggcgatcatctcaatggtgggccgggctcaatcccctgacagaagagagcagcaatgcaaacaatgatgacgcagaccagacatgccggatcggtgtttgcagtcgctcctccgacagggcagaaactccaaacgacatcttctggaaagctgccaacgactccctgatactccatgatatccggtctaagactatttttcgagacaggaacatcgctatacaaggcgagctatgtggcagctcgataatgagtaacagcctcggactcgatcctggtgttcatatattctttgtctttgacatttacgacattgacttgcaagcatatattcctccacgcagtgtctgggatatttgctacacacgcagatggaaacacgtacccctcgtggaagcaagtgtcaagctacatcaattcgctggaagcctagaggagttgttgaaaaaggctgagggaaagggcaagtttgggaagatgagagagggtttggtatttaaggcgatgagcggacagcgcaacatcttcaaggttatctcgaatgagtggttgcttaccactggaaaaaatgatgatgagattcttgagcgcttggatgcctcaaatgactggggtgatttcgcgactgacttcacgacgggacatcagggtgaagcggtgatgaagtgatgggaggatatatgagtgaagggacgagcaacgactataaacatcatagggctcatgtttttt

SEQ ID NO: 38495 - DNA, 1548 bp, Muscodor strobelii
  misc_feature: SGI cDNA ID NO. 573379
  misc_feature: Encodes the peptide sequence at SEQ ID NO 38496
atggtatcatcttcaacttctcgggaatctatcgagaacccacgagataacacggacgccgcccaaaatgcgaccgatgccaacatttctaatgatcaattccccaaattgaaagcagaagcggcggcagacaagaatgaaggcgactacttgcgagcaatcgaacttgtacccgttttcatcgctatggcccttgctatattcatactaggacttgacaacacgatcgtaggaacagcgacaccgacgattacgaacgaattccattctctcagtgactttgcctggtatggctcagcataccgacttgcgaccacatcaagtcaattcctattcagcaagatatataaacaatttcgcgtcaaatgggttcttattaccgctgttggcattcttctgatcgggtctatcgtatctgccgctgcgccgaactctgctgctttgattgttgggagggctatcgctgggtttgggtcgacaggcattcttacaggtgtctacatcttctggatcaatctgcccgttggtgggttcaccatactggtactcgtgatgctgttcagaaacccgcgaagtcagaaagttcctgaaggctctacacgaagcaaactcaagcgactcgacatttccgctctgctcatacttactggaagtatcgtcgcactcttattggcccttcaatggggcggttctacatatgcttggagcaatgctagaatcatcgcacttgtagttatctctgctgtcgcatttggtgcatttctcgcgctggagacattgcgcaagggtcgcgcgacgattcctcgatccgttatatttaacagaacagctgggctatgtgtgctgtatgcgttttgttcatcggcagcttttaatgtcgttgattacttcctgccgatatggttccaagcgataaaaggcgcctcggcagcttcatcgggactgatgcttctaccctcaatcataggactctctgttgctgcgatcggctctggcttcatcgtctcatttatcgggtactatacacctctgatgctgcttgggtcaacgatgatggcaatcggctttgggttccttacaacattcacgccgactacctcggaggcttcctggattgggtggcaggtcctcttcggagcgggaataggattcgcattccctcaaccgttctctgctattcagacaacactggatatgcaagatataccggcaggactatcagccgtctcatttgctattagtatcggagccgcattattcatagcaatttcgcagaacattttcaacaacctccttcgggatgggttatcatctttctctaaaatagacgtcgaggacatcatatcccatggtgctacagatctactaacgactttacctgtttccgaaagagagatagtcatcactgcctacaactacgctgtcacgaggacattcttggcttgtgttgcagtggctattctaggattttttgctgctctgtgtatgaagtggaagtctgtcaagacaccaaagccaattaccgaggatgctacacaggcgctgtaa

SEQ ID NO: 38496 - protein, 515 aa, Muscodor strobelii
  misc_feature: SGI Peptide ID NO. 573379
  misc_feature (63)..(421): Pfam Id: PF07690 Pfam Desc: Major Facilitator Superfamily
  misc_feature (63)..(166): Pfam Id: PF07690 Pfam Desc: Major Facilitator Superfamily
  misc_feature (167)..(421): Pfam Id: PF07690 Pfam Desc: Major Facilitator Superfamily
  misc_feature (16)..(505): NCBI GI: 238503580 Blast Desc: efflux pump antibiotic resistance protein, [Aspergillus flavus NRRL3357] gi|220690494|gb|EED46843.1| efflux pump antibiotic resistance protein, [Aspergillus flavus NRRL3357]
  misc_feature (72)..(505): NCBI GI: 169765125 Blast Desc: [Aspergillus oryzae RIB40] gi|83764888|dbj|BAE55032.1| protein product [Aspergillus oryzae]
  misc_feature (10)..(505): NCBI GI: 156036306 Blast Desc: conserved [Sclerotinia sclerotiorum 1980] gi|154698247|gb|EDN97985.1| conserved [Sclerotinia sclerotiorum 1980]
  misc_feature (10)..(505): NCBI GI: 238844737 Blast Desc: major facilitator superfamily transporter [Microsporum canis CBS 113480]
  misc_feature (3)..(502): NCBI GI: 242801936 Blast Desc: efflux pump antibiotic resistance protein, [Talaromyces stipitatus ATCC 10500] gi|218717217|gb|EED16638.1| efflux pump antibiotic resistance protein, [Talaromyces ATCC
  misc_feature (5)..(505): NCBI GI: 14389419 Blast Desc: AF238225_1 DHA14-like major facilitator [Botryotinia fuckeliana]
  misc_feature (1)..(505): NCBI GI: 238499375 Blast Desc: efflux pump antibiotic resistance protein, [Aspergillus flavus NRRL3357] gi|220692675|gb|EED49021.1| efflux pump antibiotic resistance protein, [Aspergillus flavus NRRL3357]
  misc_feature (9)..(505): NCBI GI: 110265121 Blast Desc: major facilitator superfamily transporter [Mycosphaerella graminicola]
  misc_feature (3)..(511): NCBI GI: 169601798 Blast Desc: SNOG_03774 [Phaeosphaeria nodorum SN15] gi|111067859|gb|EAT88979.1| SNOG_03774 [Phaeosphaeria nodorum SN15]
  misc_feature (4)..(505): NCBI GI: 145247328 Blast Desc: An12g08620 [Aspergillus niger] gi|134080647|emb|CAK41312.1| protein product [Aspergillus niger]
MVSSSTSRESIENPRDNTDAAQNATDANISNDQFPKLKAEAAADKNEGDYLRAIELVPVFIAMALAIFILGLDNTIVGTATPTITNEFHSLSDFAWYGSAYRLATTSSQFLFSKIYKQFRVKWVLITAVGILLIGSIVSAAAPNSAALIVGRAIAGFGSTGILTGVYIFWINLPVGGFTILVLVMLFRNPRSQKVPEGSTRSKLKRLDISALLILTGSIVALLLALQWGGSTYAWSNARIIALVVISAVAFGAFLALETLRKGRATIPRSVIFNRTAGLCVLYAFCSSAAFNVVDYFLPIWFQAIKGASAASSGLMLLPSIIGLSVAAIGSGFIVSFIGYYTPLMLLGSTMMAIGFGFLTTFTPTTSEASWIGWQVLFGAGIGFAFPQPFSAIQTTLDMQDIPAGLSAVSFAISIGAALFIAISQNIFNNLLRDGLSSFSKIDVEDIISHGATDLLTTLPVSEREIVITAYNYAVTRTFLACVAVAILGFFAALCMKWKSVKTPKPITEDATQAL

SEQ ID NO: 38497 - DNA, 784 bp, Muscodor strobelii
  misc_feature: SGI EST ID NO. CUFF.92526.0
  misc_feature: Variant of the nucleotide sequence at SEQ ID NO 38495
cgaaattctatctcagaacaaacaattccatcagtgtttccctataacgagaatggtatcatcttcaacttctcgggaatctatcgagaacccacgagataacacggacgccgcccaaaatgcgaccgatgccaacatttctaatgatcaattccccaaattgaaagcagaagcggcggcagacaagaatgaaggcgactacttgcgagcaatcgaacttgtacccgttttcatcgctatggcccttgctatattcatactaggacttgacaacacgatcgtaggaacagcgacaccgacgattacgaacgaattccattctctcagtgactttgcctggtatggctcagcatgtaagtgacttagcatcgcgaacacaaatatcatgagcgcatcacattacatcaattgacgggaagcttcctattagaccgacttgcgaccacatcaagtcaattcctattcagcaagatatataaacaatttcgcgtcaaatgggttcttattaccgctgttggcattcttctgatcgggtctatcgtatctgccgctgcgccgaactctgctgctttgattgttgggagggctatcgctgggtttgggtcgacaggcattcttacaggtgtctacatgtgagctgtcgctgttccccaaatagacctcgagagttgcctggaaatttcaattccgacggatgaagtctacagtgcgattacgcattctgtaccgcctcgttggcgaccgatctgcaatagtacggtcggcggcgtcgagtgcattgcca

SEQ ID NO: 38498 - DNA, 4500 bp, Muscodor strobelii
  misc_feature: SGI cDNA ID NO. 573380
  misc_feature: Encodes the peptide sequence at SEQ ID NO 38499
atgctgtccgtccgggtggtcactgcggagctggcgacgaagcggaatgactgccccattctcaagctggaatcgtcaaccacgattgggactctgcacaaaaagatcgcctcctgcatgggaatcgattcagccttaacccaaaatgctcctctttacgagtgcaattgcacattgggtagagagcttgcttctggtatttccgatcctgaccacgttcttgtcatatatggcaagagcaaagttgagcgcattcccgtctcggacgcttcgaaagcagctgtcatggctgctatctcggatcgttttggtacaaatctggagggtgccacaaaactcaacatcatacacggagacaaggacgaggctcaggatggggaacaacgagatgaagacagcagcgtatacaagaagatgccggtcgttgcgatctgttccaagcaccgacatgttcctccccactggcgagtcagaatcgatcaacccaacggccagtcacaccaagtactcgacattcatacctccgaactccctgttcatcctagttctttcgatgctacactcgagaaagctggcctgggcctgctggcaactgacggtatgatcgatatctttgccgtgcttcgcgcaaccacgggcaatgatcctccccctattggcaaatcttctatattctcatcgcgagcttgttgggagccccacgtgaagcaatctgatcgcggagttgccatgatgctttcatgcttgagagttttctcttccatcgtgcaaaatatcaaggacgatgacccgtggcgcgatgccattctccacacatttgaccttttcaccaatttcccgccagctctccgctgcctctatattttgatgcatgacatgacgcctacagcctcagagtgcgccgctctgagtcacgctatgttctatgccctggagaagttcgttccatctgtcctaattggctcaaatgcttcccgtgtttacgaaggcacacgtctccttctgggattcatcttggaagctgccaggagcatcaaattaccacagaacaccgagacaaggccttctactatcttcgatttcccctatctatcctcgtttcagaagttcgacatccgtgattgcaaatcaggcgaaggtgttcagcacgcagtccaaacaactgaaggcttgatcgaggccagcttttttgaggctctccaagatggaggtcttttatcgaaaactcacctcgagtcatccttcatgcgagtggacctaagtcctgatactgctcgctatactttactcagcgggggatcttctgccgacatcctgatactcgatattcaagtcatgaagcaacgcaatcggtacaaaggtagcgatgataacgttctgccagaaattgattttgagcaggtgtctaacttgaaccaccttgccgtcattgctgctcggcgtggtctatctgttcagatgccctcgttcctcaactctacgctcgcgccgtgcctcacctttgatcgccatgcccatgtcgctgtttacacaggagagcaaccgtgcgggcaaccaggaaaatcttctgttctgtttcggccacaacatggcgaggaggttgtggatgtcagtattgttgagcagctaatcgctccgatcctggaaacaaatatggcgaacggaactgctgtctttgacgctcttgggagcacttcgtctctgcgacgtattaggcaggctccggacgagatattaatgttctgtattgactgcagcaaaagcatggataatgtacctgactttgatgacggtaatgaagaaagtgtcggcctattcgacggcggtcatcaagtcgaggtcgaatctacgttagacccgaatctgttcactcaggttactctggatgacacaaaggagaacttgatcagctatgaaagcttccaggacatgattgcgattgttgcgtcagccaacggtcgaaaagcgcgtcgcgatcttgcgggtaaaacgttgatgattttaaggaacattctctcggaagaaatcttgacaaagtcgaaactgacttcgaggagtcgtcatggatttctccggctttcacgacgctctctcgacgaagacgttagtagcctaaaaaggttcttagcaggcctcaagactcatgaaagacatttggtagatttgcttctttatcgaagcgcaaccgtatcgcaaaacgatagcagtcgtcgatggatgtggtctgtgggggacgcgctaccgactgcaaccatggcgcgacgcattgcccctctcaataacgacatcattgaaattcctgataggctgcgatgccctatttctcacatgttgatggaagatgccgtcgttgcgtctgatggcaacacctacaatcgtgccgatatcaaacaatggttttcaatcagattatcatcgccacttcatgggctatccctgaccgatgattctctgattactaatcgtgttatttgtgacgcagccgcacaatggattcttggagaggatgtgttggcggacccgattcctcgccaggtctttcgcacctttagggtaacgttcgacagccagtttgggtccttcacgagagtggtaccggcgagtctcagtttgaaggaactttacagattagcgttcagaggactcaaaggaagacatacggcttttcaactccactcagagtcaacaggctctattgatccgtcgtccgaggccactctgcaatcttgtgatattcacgaccgtcatcgagtcactatccgcactgccgagattcaacaactcgccggggatcctatacagccaagcaccttgtcgatttctgataatatgtgcattataaaagtctacagcaatccggatgatcagatgaagtttggctactggaccaatcgagacctaccccagacagtaggctccgtattgtggaaatattatcgctttcactcagagcatcacgattatagttaccttgatggcttagaccagtgtgtttgcactgagcttgaaccgataggtgacgggaactgggcgggccattcccaacatagccatcaattgctgggtcatctactcactacagagtattgcactgggcatctcggctcggaaaagggttggtccgaggctctcccagatgatgaggcggatcaagtcacagatcatagctcggacggagacgaagacgacagcggttccagcgccgacgccctcgttctaaaagtaagcatcgcgtttagacaagcctcgtgggagagagagcctagactcagccgactagatgtactaaagcaaatgtttgaggctttgatcaacagaatgcttgcttacaagtacaatatgcatgtcgggcttattaggttctctactaccggtcgagttgccatgcccataactcacctattggagaacttgcgccaagcgaccaatggaatggcagccggtggtgacacggcgctatgggatgctcttgcgctcgcagctgatcaagttaacgagtacgcgaagaagtatccagaagccaagaaacgtatcattgtcatatcagacggcgctgacacaagctcgaaaaccaacgaccaacatgatgtgtgcctccagcttatgagagccaacatcatgatcgatagtatttgtatcggctacgacgaagaccatgaggacctgaagaagctatcatttgttatgaatagctatggttttaaccccgactcgcttgcgaatgcgatgacaatttgtgaaatggaaccatttctgtccttgacagaacgaccgccagttgaactgccagtgttcacagatcagcaacacaaattccaacgctggtacaatagaaaatcgcggttggcatggtttaccgttgtcgccgatgacgatgttccaccgcgtcgaaaacatcctggtctagagcacgagttttcaccgttgaatgccggggctcttcggcgtccccttagaaccagcgaaggtgcacaacctggcttctgggccggacgtgtgatgcgggaaatacaaaacatggtctctgggggcgtgaatcctaaatatgatgtttacattagcgacacagacatgtcgttctggaaggtggtgatggagggccctgacgagagtccatactcagatgggacattcttgctctacttgcacgccggttccgactatcccacacatgcgccagaggtccggtttatcactaaaatgaagcacccgaacatcaatgcgcatggccgcgtgtgtcacagcttatttgaccgggattggacgagtgatctcagtatgaggactgtgctggatactgtcttcggcctattatttcaacccgagcatagcgacccagtcaataccatggccacgctcaattatcatcacgatgtggtcgagtacgctgaggaggtgagagagcacgtcctagagcatgcgagccgctcgagagagcaatggaaggctactatactgggagaggaagaggatgatgacgatcaagaagacaactattaa

SEQ ID NO: 38499 - protein, 1499 aa, Muscodor strobelii
  misc_feature: SGI Peptide ID NO. 573380
  misc_feature (765)..(838): Pfam Id: PF04564 Pfam Desc: U-box domain
  misc_feature (1332)..(1470): Pfam Id: PF00179 Pfam Desc: Ubiquitin-conjugating enzyme
  misc_feature (1070)..(1243): Pfam Id: PF00092 Pfam Desc: von Willebrand factor type A domain
  misc_feature (765)..(799): Pfam Id: PF04564 Pfam Desc: U-box domain
  misc_feature (1092)..(1243): Pfam Id: PF00092 Pfam Desc: von Willebrand factor type A domain
  misc_feature (2)..(1487): NCBI GI: 169624118 Blast Desc: SNOG_15311 [Phaeosphaeria nodorum SN15] gi|111056124|gb|EAT77244.1| SNOG_15311 [Phaeosphaeria nodorum SN15]
  misc_feature (563)..(1351): NCBI GI: 189190514 Blast Desc: ubiquitin-conjugating enzyme E2E 3 [Pyrenophora tritici-repentis Pt-1C-BFP] gi|187973202|gb|EDU40701.1| ubiquitin-conjugating enzyme E2E 3 [Pyrenophora tritici-repentis
  misc_feature (1090)..(1481): NCBI GI: 55819661 Blast Desc: MIMI_R795 [Acanthamoeba polyphaga mimivirus] gi|82050821|sp|Q5UQ40.1|UBC4_MIMIV RecName: Full= bifunctional E2/E3 enzyme R795; Includes: RecName: Full=E3 ubiquitin-protein
  misc_feature (2)..(452): NCBI GI: 189190514 Blast Desc: ubiquitin-conjugating enzyme E2E 3 [Pyrenophora tritici-repentis Pt-1C-BFP] gi|187973202|gb|EDU40701.1| ubiquitin-conjugating enzyme E2E 3 [Pyrenophora tritici-repentis
  misc_feature (1090)..(1496): NCBI GI: 145539690 Blast Desc: [Paramecium tetraurelia strain d4-2] gi|124423343|emb|CAK88138.1| protein product [Paramecium tetraurelia]
  misc_feature (1066)..(1493): NCBI GI: 145482427 Blast Desc: [Paramecium tetraurelia strain d4-2] gi|124394316|emb|CAK59838.1| protein product [Paramecium tetraurelia]
  misc_feature (1086)..(1487): NCBI GI: 145502106 Blast Desc: [Paramecium tetraurelia strain d4-2] gi|124404179|emb|CAK69635.1| protein product [Paramecium tetraurelia]
  misc_feature (1086)..(1487): NCBI GI: 1510110 Blast Desc: ubiquitin-conjugating enzyme [Paramecium tetraurelia]
  misc_feature (1069)..(1482): NCBI GI: 66805723 Blast Desc: DDB_G0288697 [Dictyostelium discoideum AX4] gi|60464969|gb|EAL63080.1| DDB_G0288697 [Dictyostelium discoideum AX4]
  misc_feature (1068)..(1491): NCBI GI: 118388916 Blast Desc: Ubiquitin-conjugating enzyme family protein [Tetrahymena thermophila] gi|89309322|gb|EAS07310.1| Ubiquitin-conjugating enzyme family protein [Tetrahymena SB210]
MLSVRVVTAELATKRNDCPILKLESSTTIGTLHKKIASCMGIDSALTQNAPLYECNCTLGRELASGISDPDHVLVIYGKSKVERIPVSDASKAAVMAAISDRFGTNLEGATKLNIIHGDKDEAQDGEQRDEDSSVYKKMPVVAICSKHRHVPPHWRVRIDQPNGQSHQVLDIHTSELPVHPSSFDATLEKAGLGLLATDGMIDIFAVLRATTGNDPPPIGKSSIFSSRACWEPHVKQSDRGVAMMLSCLRVFSSIVQNIKDDDPWRDAILHTFDLFTNFPPALRCLYILMHDMTPTASECAALSHAMFYALEKFVPSVLIGSNASRVYEGTRLLLGFILEAARSIKLPQNTETRPSTIFDFPYLSSFQKFDIRDCKSGEGVQHAVQTTEGLIEASFFEALQDGGLLSKTHLESSFMRVDLSPDTARYTLLSGGSSADILILDIQVMKQRNRYKGSDDNVLPEIDFEQVSNLNHLAVIAARRGLSVQMPSFLNSTLAPCLTFDRHAHVAVYTGEQPCGQPGKSSVLFRPQHGEEVVDVSIVEQLIAPILETNMANGTAVFDALGSTSSLRRIRQAPDEILMFCIDCSKSMDNVPDFDDGNEESVGLFDGGHQVEVESTLDPNLFTQVTLDDTKENLISYESFQDMIAIVASANGRKARRDLAGKTLMILRNILSEEILTKSKLTSRSRHGFLRLSRRSLDEDVSSLKRFLAGLKTHERHLVDLLLYRSATVSQNDSSRRWMWSVGDALPTATMARRIAPLNNDIIEIPDRLRCPISHMLMEDAVVASDGNTYNRADIKQWFSIRLSSPLHGLSLTDDSLITNRVICDAAAQWILGEDVLADPIPRQVFRTFRVTFDSQFGSFTRVVPASLSLKELYRLAFRGLKGRHTAFQLHSESTGSIDPSSEATLQSCDIHDRHRVTIRTAEIQQLAGDPIQPSTLSISDNMCIIKVYSNPDDQMKFGYWTNRDLPQTVGSVLWKYYRFHSEHHDYSYLDGLDQCVCTELEPIGDGNWAGHSQHSHQLLGHLLTTEYCTGHLGSEKGWSEALPDDEADQVTDHSSDGDEDDSGSSADALVLKVSIAFRQASWEREPRLSRLDVLKQMFEALINRMLAYKYNMHVGLIRFSTTGRVAMPITHLLENLRQATNGMAAGGDTALWDALALAADQVNEYAKKYPEAKKRIIVISDGADTSSKTNDQHDVCLQLMRANIMIDSICIGYDEDHEDLKKLSFVMNSYGFNPDSLANAMTICEMEPFLSLTERPPVELPVFTDQQHKFQRWYNRKSRLAWFTVVADDDVPPRRKHPGLEHEFSPLNAGALRRPLRTSEGAQPGFWAGRVMREIQNMVSGGVNPKYDVYISDTDMSFWKVVMEGPDESPYSDGTFLLYLHAGSDYPTHAPEVRFITKMKHPNINAHGRVCHSLFDRDWTSDLSMRTVLDTVFGLLFQPEHSDPVNTMATLNYHHDVVEYAEEVREHVLEHASRSREQWKATILGEEEDDDDQEDNY

SEQ ID NO: 38500 - DNA, 903 bp, Muscodor strobelii
  misc_feature: SGI cDNA ID NO. 573381
  misc_feature: Encodes the peptide sequence at SEQ ID NO 38501
atggggattgttactacgatcagcaacgtgacagtagacggcatcgacgtcttctaccgagaagctggaccggcaaatgcgccagtccttcttctcctccatggctttccgagctcgtcgttcatgtttcgaaacctgattcctctccttgctctcacttacagagtggttgcacctgatcttccgggctttggcttcactgaagttcccgcgtcacgaaactatcgatacacttttgccaacttcaataagaccttgggtgcattcgtggatgcactcaaaatcgagaagttttcattgtacatcttcgattatggagcgccagccggtctccgattagcattggaacgccctgacgcggtccaatccatcattacacaaaatggcaatgcctacgacgaaggatttggacacgatttctgggcgccaatcatgaagtattgggagaccggcagcaacgaggatcgtgaagcattacgcgctgggttgacatttgaatcgacgaagtcacagtatacactcgggtggcccaatcccagcgctgttgatcccgccccgtcctacctcgaccaaactttgatggagcagccaggaagggacgagatcatgttggatctgttctacgactatcgaaccaacccaccaatctaccctgagtttcagcagtatttccgcgactcaaaggtaccggttctcgctgtctggggaaagaacgatgtcacattcattccacccggggcagaggcctttgcacgggatgtgaagcccgagaacttcgaactgcatttcttggaggctgggcattttgcgctggagaccaatgagataaccatggcgaaatacattgacgggttcttgaagaaacatggtataagaggaaataacggtcattgttcggaataa

SEQ ID NO: 38501 - protein, 300 aa, Muscodor strobelii
  misc_feature: SGI Peptide ID NO. 573381
  misc_feature (54)..(284): Pfam Id: PF00561 Pfam Desc: alpha/beta hydrolase fold
  misc_feature (4)..(291): NCBI GI: 116200600 Blast Desc: CHGG_10845 [Chaetomium globosum CBS 148.51] gi|88175559|gb|EAQ83027.1| CHGG_10845 [Chaetomium globosum CBS 148.51]
  misc_feature (17)..(291): NCBI GI: 212544964 Blast Desc: hydrolase, [Penicillium marneffei ATCC 18224] gi|210065605|gb|EEA19699.1| hydrolase, [Penicillium marneffei ATCC 18224]
  misc_feature (6)..(288): NCBI GI: 91786453 Blast Desc: twin-arginine translocation pathway signal [Polaromonas sp. JS666] gi|91695678|gb|ABE42507.1| Twin-arginine translocation pathway signal [Polaromonas sp. JS666]
  misc_feature (17)..(291): NCBI GI: 242814271 Blast Desc: hydrolase, [Talaromyces stipitatus ATCC 10500] gi|218714676|gb|EED14099.1| hydrolase, [Talaromyces stipitatus ATCC 10500]
  misc_feature (5)..(288): NCBI GI: 206559519 Blast Desc: hydrolase [Burkholderia cenocepacia J2315] gi|198035557|emb|CAR51438.1| hydrolase [Burkholderia cenocepacia J2315]
  misc_feature (4)..(294): NCBI GI: 229590434 Blast Desc: hydrolase [Pseudomonas fluorescens SBW25] gi|229362300|emb|CAY49202.1| hydrolase [Pseudomonas fluorescens SBW25]
  misc_feature (13)..(282): NCBI GI: 226946728 Blast Desc: alpha/beta fold hydrolase [Azotobacter vinelandii DJ] gi|226721655|gb|ACO80826.1| alpha/beta fold hydrolase [Azotobacter vinelandii DJ]
  misc_feature (8)..(290): NCBI GI: 168700167 Blast Desc: hydrolase [Gemmata obscuriglobus UQM 2246]
  misc_feature (6)..(288): NCBI GI: 272537514 Blast Desc: alpha/beta hydrolase fold protein [Burkholderia sp. CCGE1002] gi|270349068|gb|EFA52361.1| alpha/beta hydrolase fold protein [Burkholderia sp. CCGE1002]
  misc_feature (4)..(282): NCBI GI: 163858205 Blast Desc: hydrolase [Bordetella petrii DSM 12804] gi|163261933|emb|CAP44235.1| hydrolase [Bordetella petrii]
MGIVTTISNVTVDGIDVFYREAGPANAPVLLLLHGFPSSSFMFRNLIPLLALTYRVVAPDLPGFGFTEVPASRNYRYTFANFNKTLGAFVDALKIEKFSLYIFDYGAPAGLRLALERPDAVQSIITQNGNAYDEGFGHDFWAPIMKYWETGSNEDREALRAGLTFESTKSQYTLGWPNPSAVDPAPSYLDQTLMEQPGRDEIMLDLFYDYRTNPPIYPEFQQYFRDSKVPVLAVWGKNDVTFIPPGAEAFARDVKPENFELHFLEAGHFALETNEITMAKYIDGFLKKHGIRGNNGHCSE

SEQ ID NO: 38502 - DNA, 458 bp, Muscodor strobelii
  misc_feature: SGI EST ID NO. CUFF.92546.0
  misc_feature: Variant of the nucleotide sequence at SEQ ID NO 38500
aaactatcgatacacttttgccaacttcaataagaccttgggtgcattcgtggatgcactcaaaatcgagaagttttcattgtacatcttcgattatggagcgccagccggtctccgattagcattggaacgccctgacgcggtccaatccatcattacacaaaatggcaatgcctacgacgaaggatttggacacgatttctgggcgccaatcatgaagtattgggagaccggcagcaacgaggatcgtgaagcattacgcgctgggttgacatttgaatcgacgaagtcacagtatacactcgggtggcccaatcccagcgctgttgatcccgccccgtcctacctcgaccaaactttgatggagcagccaggaagggacgagatcatgttggatctgttctacgactatcgaaccaacccaccaatctaccctgagtttcagcagtatttccgcg

SEQ ID NO: 38503 - DNA, 1230 bp, Muscodor strobelii
  misc_feature: SGI cDNA ID NO. 573382
  misc_feature: Encodes the peptide sequence at SEQ ID NO 38504
atggcggttcttcgccacgtcccacgaggcgcgacgacagtaccttccccggatccgaacgataccagtgtagggctacaagtcagcgtgcttacaattgttcactttttcgcacttctggtcaccggcttgcgcttgtatagtcgaatatttctagcaaagtcattcggctctgatgacgggacaatagccgcggcgactctcctcgcgtttgtgtcatatatcttgtatttatatcaaataccacatggtctgggagtgcacaatgtcctcgtgtcagctccggatcgctacgtctatggcgcagcctcattcgcccagacgatcctccagttaatcggactgggattcttgaagatatcggtagcgctcgcgctcttacgacttgtcaggaccaaagtgtacaagtgtgtactatgggcgactatcgctttcgtgtcaatctacacactcttcgccattctcacattacttttgtactgccagccaatcgacggattctggaatcccggctcaggggccaagtgttacccccttcaactcttcatccaatttggcctggcaaattcgggtctcagtatcttcactgatatcttactcgcaacactaccgattccagtcatctggcagctgcaaatccaaatcaagacgcgtgtatacttgatcttagtgctcgcacttggctgggccgcagtcgcaattggcatcgtcaagacaatcaatcagatcaattacaatccatttggagacacgatgtatgaggttagcgttgttttctgggcattcgttcaactcaacgtcagtatcatagcaacctgcgcgccgtcgctcaagaaaatcctcaaacctatcttgcgcctgagtacgacgcgcggcacgtcgacgaacaaccgatatctatacggcgacggctcccgacaccagcacacgaagggaggcacgagcagtcgcacgttcacgaagggtggcgcaagcgtaagcgggcggtactaccggcaagagagcacgaacgatgtcgaactcgacgagcggccgatcgtgaaggaggaagggtacctcgcatcggtgcaagcaccgtcgcagacaacatcgcgcagccaagcagggagtgcgcagcagaggagtgggagtctaagtagcgatgactctatatttaatccgattgagagcaggggcaaatcgacagcgggtattactaggaccaccgaagtcgtcatatcgagggaatag

SEQ ID NO: 38504 - protein, 409 aa, Muscodor strobelii
  misc_feature: SGI Peptide ID NO. 573382
  misc_feature (14)..(370): NCBI GI: 46140029 Blast Desc: FG11529.1 [Gibberella zeae PH-1]
  misc_feature (20)..(406): NCBI GI: 115388723 Blast Desc: [Aspergillus terreus NIH2624] gi|114195951|gb|EAU37651.1| [Aspergillus terreus NIH2624]
  misc_feature (18)..(406): NCBI GI: 121700442 Blast Desc: conserved [Aspergillus clavatus NRRL 1] gi|119396628|gb|EAW07060.1| conserved [Aspergillus clavatus NRRL 1]
  misc_feature (75)..(368): NCBI GI: 169602565 Blast Desc: SNOG_04286 [Phaeosphaeria nodorum SN15] gi|160706199|gb|EAT88046.2| SNOG_04286 [Phaeosphaeria nodorum SN15]
  misc_feature (28)..(408): NCBI GI: 171681345 Blast Desc: protein product [Podospora anserina] gi|170940631|emb|CAP65859.1| protein product [Podospora anserina]
  misc_feature (166)..(407): NCBI GI: 116204391 Blast Desc: CHGG_10079 [Chaetomium globosum CBS 148.51] gi|88176207|gb|EAQ83675.1| CHGG_10079 [Chaetomium globosum CBS 148.51]
  misc_feature (40)..(406): NCBI GI: 145234575 Blast Desc: An03g00290 [Aspergillus niger] gi|134057607|emb|CAK38007.1| protein product [Aspergillus niger]
  misc_feature (19)..(343): NCBI GI: 242798118 Blast Desc: conserved [Talaromyces stipitatus ATCC 10500] gi|218716449|gb|EED15870.1| conserved [Talaromyces stipitatus ATCC 10500]
  misc_feature (16)..(228): NCBI GI: 145604244 Blast Desc: MGG_13946 [Magnaporthe grisea 70-15] gi|145012280|gb|EDJ96936.1| MGG_13946 [Magnaporthe grisea 70-15]
  misc_feature (37)..(409): NCBI GI: 67538284 Blast Desc: AN5312.2 [Aspergillus nidulans FGSC A4] gi|40743282|gb|EAA62472.1| AN5312.2 [Aspergillus nidulans FGSC A4] gi|259485247|tpe|CBF82118.1| TPA: conserved [Aspergillus FGSC
MAVLRHVPRGATTVPSPDPNDTSVGLQVSVLTIVHFFALLVTGLRLYSRIFLAKSFGSDDGTIAAATLLAFVSYILYLYQIPHGLGVHNVLVSAPDRYVYGAASFAQTILQLIGLGFLKISVALALLRLVRTKVYKCVLWATIAFVSIYTLFAILTLLLYCQPIDGFWNPGSGAKCYPLQLFIQFGLANSGLSIFTDILLATLPIPVIWQLQIQIKTRVYLILVLALGWAAVAIGIVKTINQINYNPFGDTMYEVSVVFWAFVQLNVSIIATCAPSLKKILKPILRLSTTRGTSTNNRYLYGDGSRHQHTKGGTSSRTFTKGGASVSGRYYRQESTNDVELDERPIVKEEGYLASVQAPSQTTSRSQAGSAQQRSGSLSSDDSIFNPIESRGKSTAGITRTTEVVISRE

SEQ ID NO: 38505 - DNA, 1458 bp, Muscodor strobelii
  misc_feature: SGI EST ID NO. CUFF.92568.1
  misc_feature: Variant of the nucleotide sequence at SEQ ID NO 38503
gtcctcgtgtcagctccggatcgctacgtctatggcgcagcctcattcgcccagacgatcctccagttaatcggactgggattcttgaagatatcggtagcgctcgcgctcttacgacttgtcaggaccaaagtgtacaagtgtgtactatgggcgactatcgctttcgtgtcaatctacacactcttcgccattctcacattacttttgtactgccagccaatcgacggattctggaatcccggctcaggggccaagtgttacccccttcaactcttcatccaatttggcctggcaaattcgggtctcagtatcttcactgatatcttactcgcaacactaccgattccagtcatctggcagctgcaaatccaaatcaagacgcgtgtatacttgatcttagtgctcgcacttggctgggccgcagtcgcaattggcatcgtcaagacaatcaatcagatcaattacaatccatttggagacacgatgtatgaggttagcgttgttttctgggcattcgttcaactcaacgtcagtatcatagcaacctgcgcgccgtcgctcaagaaaatcctcaaacctatcttgcgcctgagtacgacgcgcggcacgtcgacgaacaaccgatatctatacggcgacggctcccgacaccagcacacgaagggaggcacgagcagtcgcacgttcacgaagggtggcgcaagcgtaagcgggcggtactaccggcaagagagcacgaacgatgtcgaactcgacgagcggccgatcgtgaaggaggaagggtacctcgcatcggtgcaagcaccgtcgcagacaacatcgcgcagccaagcagggagtgcgcagcagaggagtgggagtctaagtagcgatgactctatatttaatccgattgagagcaggggcaaatcgacagcgggtattactaggaccaccgaagtcgtcatatcgagggaatagatctgtcatttatcttatcaattgacggtcagggcattaaaaagtaaagtattttaattatgatgattcgacaacagtgaaacttgaactacctgtatcatagagttcagagttgaagatcaatggaaaacaggacattgagttaactccctacgtatcgagatctgggatctaatgaggatctttgcgtctctagtcgtgcgcatcgctattagtctattagaatcgatagattttcacttcatgctcgtttacgttgacttcaaatgttgtctaatcgagccagactagtgacacccaagattcgaatccagacatctcggcgcccgcacgctccgccgaagcgctgaaagatggtcgctgctaagcaactaaacagccctcagcctaccattgcccgctgtgaaagaattcaggagaaatagagatggagtctaagaaagaagaatgaaaagacaagggagaagacgatacaccgggcaacgtggagcctat

SEQ ID NO: 38506 - DNA, 2439 bp, Muscodor strobelii
  misc_feature: SGI cDNA ID NO. 573383
  misc_feature: Elevated expression when VOC is produced
  misc_feature: Encodes the peptide sequence at SEQ ID NO 38507
atgtctaacacaacgctccccactctagaacggtccgactctatcgacagtttcgaggaagttggtaccaaggtactcaaagcaactgacccccctgagtctactggcgtactcaaggtagatggcaaagtcccatcggttctgcatgtcctcaaatacatcggttggaacgatgctgttgtagaatgccgtcagagtctcacacctttcaagcgcatccctcagttcagagatgaaaaggatggtctaaaggaggtccaaatcggcgattacggcgacgaggatgatgagaagcctgtgcttgatattgtctacaggatcagcaagccagccagtgactacagacgaagcaaccgtggaaatcccaatgaaaagcctattacagccgcattcgacttgaacgattaccgatatgatgatggcgactcggacgatgagggtcaggcggcagccacctcagccccaaagccaacaatcaacatgaatatacactcccagtatcttgttaacgccctccaagccgtcatcagctactatcctcgtgtgaaccttcaagagtgcccggttagcgtccccgctccatatcgtcttctatatcttcatcgtgaagagctggctcgttatcgcgattcccaaccggcatcccataccccggaggtcgccgagattaccgctcgacatatcaatgttctgctcaaatttctggaggacaacatgggcgataccttgaagaaggaggaagcattgcacaagctggaacatccctcggcgactttcgatctcttctggttactcctgaagcctggtcaggtgatctatgctaagcgctttggtctctggactccatttgtgattagtagcatcaaggccggttcaaacactacctttgaccagtatcgggttaattgttggtatttggaaacgaatggcgtcgtagtcaagcgctacatggagacgttccgggttcagccttggactggtgagcaactcatcagcagcctgcccgtcattccggaagcattctggattgagaacatggcaacacagggcggccaaacaatgagagaaaagtgcattaaggagggacgtctgtactgggaattactcaagaagccaacctacatgaactacgacgggcagcttgtcaacccttcatctagcaatggtcaagccgttggtatggttggtcagctgaatggacgcgtcatctgcgatcctgttggctttgaccgcttctacacagcatctccagatctaagctctggtaaccgcgcaagcctcaattcttcacgtatgggttcacccatgccaccaccgctagatcaccttccccgcagcctgccacgatgtggttgcgatgcatgcaccgaagcccgcgatccaaccaaagggaacgacgggccctacgctgggttcagagaactggatgcaacgtgcgattcaccaccggacagtgatatcttctatcaggttctgagtaacgtcattcctagcttcgtccctggcagccgtcggtgggcttgtgtcaatgtggcaaacctaagcccaatcaagggccacagagatgcattcaaggatctcgtccttgatgatgaaatcaagatgacggtccgggctcttattggcaagttcgccaccgaagccgagggtcgtctcctcccatggaacacggacatcgtccagaacaagggcgaaggtcgtatcttcttgctacatggtacacctggcgttggcaagacaagcacagccgaatgcatcgccgaatcaacgggacgcccgctcatcgccatcactagtggcgatcttggagtggatagctatcgtgtggagtcgtctcttcagtactttttggatcttggacagcgctatggcgcacttctgctccttgatgaggctgatgtgtaccttgagcgccgtcgcagcaaggacatcgctcgcaatggtctcgtcagcacgttcttgcgcgcgctcgagtactaccgcggtgtgttgttcctcaccaccaatcgcgtgcaagccttcgacagtgcgtttatgagccgaattcacgtcgcgctccactacaagaacttgcgtgatgaggatcgggagcgtatttgggcgaacaccttcgagcgcctcgagcgtgagtcgaacggaagcattcgcatctcaactgcagctcgcagtctgttgctgagcggtacggacaacaacgaggctcgcagccgtctacgggctctcaagtggaatggtcgtgagattcgcaacgctatgcaaatgatgatggcaatggccgagtctgaggcgcgcgaggaaggcagcaaggtggtcactgtgggccagaagcatgtcttcgctgttgtcaacatgagtggagatttccgcgactacctgaagaagactacgcctgttgagggaattaaggatgtggaggttgagggcgacgattctgattaa

SEQ ID NO: 38507 - protein, 812 aa, Muscodor strobelii
  misc_feature: SGI Peptide ID NO. 573383
  misc_feature (568)..(761): Pfam Id: PF00004 Pfam Desc: ATPase family associated with various cellular activities (AAA)
  misc_feature (568)..(699): Pfam Id: PF00004 Pfam Desc: ATPase family associated with various cellular activities (AAA)
  misc_feature (30)..(810): NCBI GI: 46107594 Blast Desc: FG00680.1 [Gibberella zeae PH-1]
  misc_feature (9)..(793): NCBI GI: 85116024 Blast Desc: NCU03121 [Neurospora crassa OR74A] gi|28926779|gb|EAA35744.1| NCU03121 [Neurospora crassa OR74A]
  misc_feature (163)..(792): NCBI GI: 156033037 Blast Desc: SS1G_13594 [Sclerotinia sclerotiorum 1980] gi|154698997|gb|EDN98735.1| SS1G_13594 [Sclerotinia sclerotiorum 1980]
  misc_feature (157)..(803): NCBI GI: 145244845 Blast Desc: An11g07150 [Aspergillus niger] gi|134079383|emb|CAK40765.1| protein product [Aspergillus niger]
  misc_feature (146)..(792): NCBI GI: 169617698 Blast Desc: SNOG_12031 [Phaeosphaeria nodorum SN15] gi|160703459|gb|EAT80443.2| SNOG_12031 [Phaeosphaeria nodorum SN15]
  misc_feature (161)..(792): NCBI GI: 46111087 Blast Desc: FG02425.1 [Gibberella zeae PH-1]
  misc_feature (149)..(793): NCBI GI: 145604080 Blast Desc: MGG_14098 [Magnaporthe grisea 70-15] gi|145012164|gb|EDJ96820.1| MGG_14098 [Magnaporthe grisea 70-15]
  misc_feature (261)..(792): NCBI GI: 154301437 Blast Desc: BC1G_10388 [Botryotinia fuckeliana B05.10] gi|150856128|gb|EDN31320.1| BC1G_10388 [Botryotinia fuckeliana B05.10]
  misc_feature (158)..(792): NCBI GI: 189192951 Blast Desc: conserved [Pyrenophora tritici-repentis Pt-1C-BFP] gi|187978378|gb|EDU45004.1| conserved [Pyrenophora tritici-repentis Pt-1C-BFP]
  misc_feature (141)..(773): NCBI GI: 256723030 Blast Desc: NECHADRAFT_102062 [Nectria haematococca mpVI 77-13-4]
  misc_feature: Useful for introducing or modulating the production of volatile compounds
MSNTTLPTLERSDSIDSFEEVGTKVLKATDPPESTGVLKVDGKVPSVLHVLKYIGWNDAVVECRQSLTPFKRIPQFRDEKDGLKEVQIGDYGDEDDEKPVLDIVYRISKPASDYRRSNRGNPNEKPITAAFDLNDYRYDDGDSDDEGQAAATSAPKPTINMNIHSQYLVNALQAVISYYPRVNLQECPVSVPAPYRLLYLHREELARYRDSQPASHTPEVAEITARHINVLLKFLEDNMGDTLKKEEALHKLEHPSATFDLFWLLLKPGQVIYAKRFGLWTPFVISSIKAGSNTTFDQYRVNCWYLETNGVVVKRYMETFRVQPWTGEQLISSLPVIPEAFWIENMATQGGQTMREKCIKEGRLYWELLKKPTYMNYDGQLVNPSSSNGQAVGMVGQLNGRVICDPVGFDRFYTASPDLSSGNRASLNSSRMGSPMPPPLDHLPRSLPRCGCDACTEARDPTKGNDGPYAGFRELDATCDSPPDSDIFYQVLSNVIPSFVPGSRRWACVNVANLSPIKGHRDAFKDLVLDDEIKMTVRALIGKFATEAEGRLLPWNTDIVQNKGEGRIFLLHGTPGVGKTSTAECIAESTGRPLIAITSGDLGVDSYRVESSLQYFLDLGQRYGALLLLDEADVYLERRRSKDIARNGLVSTFLRALEYYRGVLFLTTNRVQAFDSAFMSRIHVALHYKNLRDEDRERIWANTFERLERESNGSIRISTAARSLLLSGTDNNEARSRLRALKWNGREIRNAMQMMMAMAESEAREEGSKVVTVGQKHVFAVVNMSGDFRDYLKKTTPVEGIKDVEVEGDDSD

SEQ ID NO: 38508 - DNA, 1839 bp, Muscodor strobelii
  misc_feature: SGI cDNA ID NO. 573384
  misc_feature: Encodes the peptide sequence at SEQ ID NO 38509
atggttggcgtcactgttctctccgcggctctgctcgctgcggcccaggttgtcgttgctaagcctgtcgcacgctccgtttacagcgtcaaggataagcattacgtccccagaggttggaccaagcgttccagagcccccgccgaccatgtcatcaacctgcagattggtctgaagcagagcaacttcgccgagctggagagacatttgtatgaggtctctgacccctctcactcccgttatggacaacacctgtccgcggatcaggtcaaccagcttgtcaagcccactgacgagacttccaatctcgttcacgaatggctcggcgacaatggcattgtgccggagttgtacagcgctgccaatgattggatcactgtatcacttcccgtgagcgccattgaacagctcctcgacaccgagtaccacttgtacgagcacagcgatggcaatgtggttgcacgcgctcctgcttggagtctccccaaccacttgcacgcccatattgacaccattcaacccaccaattccttcttccgtgctaagaaggagattgccagtcacatggacgacatcgcctatgatgatcccagcctgcacgactccgggagcaccacgcccgtcggccttgcctgcaacatcagcaccgtgactcctcagtgtttccaggagctgtaccagaccaagggatacaagactcgttccgcttgcaagaacaaggttggattcaataacttcttaggagagcatcccgtccgcactgacggcctacttttcgtcgacaagtatgcgccagaggagcacaagattgccaagagctatccccaaattactattgcagatggtcctggcgatgttcccctgtctcccgaggatctcgaaaacgccactagcaaagaggccaacctcgacttccaggctattgctggcgtttccgccaagactcctatcatcagcttctccaccggtggctcgccccctttcattcccagtgagagcaccaccgataacaccaacgagccctacctcgtctgggtcaactggctgctctcgcagaagtcgatcccccagatcatcagcacttcttatgccgacgacgagcagactgttcccattgcatacgccaagcgtgtttgcgcacagtttgcccaggttggtgcccgtggtacctcgctcctcttctccagtggtgatgatggtgttggtagtgacggcacttgcgtcagtaacgacggtaccaacaagcgcatgttcacccctctgttccctccctcttgcccttacgtcactgtcgttggcgctacacgagaattcgaaccagaagtcgttgcttaccgtcccgcctacgtcggatccgatggtgttgctcatggcaactacacctcaggtggtggcttcggtaactacttcactgccccggcataccagaagaagactgtcgacgaatacgtcaagaatctcgatggtctctacgatggtctttacaacaaggagggccgtgcctatcccgatatctccgcccaggggttgtacttcgcatacttctggaacggtaccgagggtgtcatcagtggtacctccgccagcacacctctactttccggtattctcacacttgtcaatgacgcccttttggcctctggcaagccccaactgggtttcttgaacccttggctttacaaggtcggctacaaggctctgaatgatgtcaccagtggcagcgcccacggctgtgaggttgacggcttccccgccactaaaggatgggacccagtcaccggtttcggtacccctaatttccccaagctcgtcgagcttgtcggtgccaagttggagtaa

SEQ ID NO: 38509 - protein, 612 aa, Muscodor strobelii
  misc_feature: SGI Peptide ID NO. 573384
  misc_feature (37)..(178): Pfam Id: PF09286 Pfam Desc: Pro-kumamolisin, activation domain
  misc_feature (8)..(606): NCBI GI: 189202128 Blast Desc: tripeptidyl-peptidase 1 precursor [Pyrenophora tritici-repentis Pt-1C-BFP] gi|187984499|gb|EDU49987.1| tripeptidyl-peptidase 1 precursor [Pyrenophora tritici-repentis
  misc_feature (1)..(610): NCBI GI: 156045984 Blast Desc: SS1G_09268 [Sclerotinia sclerotiorum 1980] gi|154693664|gb|EDN93402.1| SS1G_09268 [Sclerotinia sclerotiorum 1980]
  misc_feature (7)..(607): NCBI GI: 169596636 Blast Desc: SNOG_01085 [Phaeosphaeria nodorum SN15] gi|160701357|gb|EAT92580.2| SNOG_01085 [Phaeosphaeria nodorum SN15]
  misc_feature (1)..(610): NCBI GI: 156032449 Blast Desc: SS1G_13922 [Sclerotinia sclerotiorum 1980] gi|154699324|gb|EDN99062.1| SS1G_13922 [Sclerotinia sclerotiorum 1980]
  misc_feature (1)..(607): NCBI GI: 154296093 Blast Desc: tripeptidyl peptidase [Botryotinia fuckeliana B05.10] gi|150843737|gb|EDN18930.1| tripeptidyl peptidase [Botryotinia fuckeliana B05.10]
  misc_feature (1)..(498): NCBI GI: 154321662 Blast Desc: BC1G_00978 [Botryotinia fuckeliana B05.10] gi|150850225|gb|EDN25418.1| BC1G_00978 [Botryotinia fuckeliana B05.10]
  misc_feature (6)..(606): NCBI GI: 226282193 Blast Desc: tripeptidyl-peptidase [Paracoccidioides brasiliensis Pb01]
  misc_feature (6)..(606): NCBI GI: 225680939 Blast Desc: tripeptidyl-peptidase [Paracoccidioides brasiliensis Pb03]
  misc_feature (28)..(606): NCBI GI: 226292652 Blast Desc: tripeptidyl-peptidase [Paracoccidioides brasiliensis Pb18]
  misc_feature (28)..(606): NCBI GI: 226282189 Blast Desc: tripeptidyl-peptidase [Paracoccidioides brasiliensis Pb01]
  misc_feature (32)..(605): SWISSPROT Homolog: EC 3.4.14.9 Tripeptidyl-peptidase I
MVGVTVLSAALLAAAQVVVAKPVARSVYSVKDKHYVPRGWTKRSRAPADHVINLQIGLKQSNFAELERHLYEVSDPSHSRYGQHLSADQVNQLVKPTDETSNLVHEWLGDNGIVPELYSAANDWITVSLPVSAIEQLLDTEYHLYEHSDGNVVARAPAWSLPNHLHAHIDTIQPTNSFFRAKKEIASHMDDIAYDDPSLHDSGSTTPVGLACNISTVTPQCFQELYQTKGYKTRSACKNKVGFNNFLGEHPVRTDGLLFVDKYAPEEHKIAKSYPQITIADGPGDVPLSPEDLENATSKEANLDFQAIAGVSAKTPIISFSTGGSPPFIPSESTTDNTNEPYLVWVNWLLSQKSIPQIISTSYADDEQTVPIAYAKRVCAQFAQVGARGTSLLFSSGDDGVGSDGTCVSNDGTNKRMFTPLFPPSCPYVTVVGATREFEPEVVAYRPAYVGSDGVAHGNYTSGGGFGNYFTAPAYQKKTVDEYVKNLDGLYDGLYNKEGRAYPDISAQGLYFAYFWNGTEGVISGTSASTPLLSGILTLVNDALLASGKPQLGFLNPWLYKVGYKALNDVTSGSAHGCEVDGFPATKGWDPVTGFGTPNFPKLVELVGAKLE

SEQ ID NO: 38510 - DNA, 2066 bp, Muscodor strobelii
  misc_feature: SGI EST ID NO. CUFF.92587.0
  misc_feature: Variant of the nucleotide sequence at SEQ ID NO 38508
cgcgtattgtcatcgtacaagacgcgatggatgatgattatacttaaatgagctgggcgcccagtcgccaatttcttgggtttctcctcacctttctcgctttgtttctaatcgaacggcaagggtgatcgatcgttacaatggttggcgtcactgttctctccgcggctctgctcgctgcggcccaggttgtcgttgctaagcctgtcgcacgctccgtttacagcgtcaaggataagcattacgtccccagaggttggaccaagcgttccagagcccccgccgaccatgtcatcaacctgcagattggtctgaagcagagcaacttcgccgagctggagagacatttgtatgaggtctctgacccctctcactcccgttatggacaacacctgtccgcggatcaggtcaaccagcttgtcaagcccactgacgagacttccaatctcgttcacgaatggctcggcgacaatggcattgtgccggagttgtacagcgctgccaatgattggatcactgtatcacttcccgtgagcgccattgaacagctcctcgacaccgagtaccacttgtacgagcacagcgatggcaatgtggttgcacgcgctcctgcttggagtctccccaaccacttgcacgcccatattgacaccattcaacccaccaattccttcttccgtgctaagaaggagattgccagtcacatggacgacatcgcctatgatgatcccagcctgcacgactccgggagcaccacgcccgtcggccttgcctgcaacatcagcaccgtgactcctcagtgtttccaggagctgtaccagaccaagggatacaagactcgttccgcttgcaagaacaaggttggattcaataacttcttaggagagcatcccgtccgcactgacggcctacttttcgtcgacaagtatgcgccagaggagcacaagattgccaagagctatccccaaattactattgcagatggtcctggcgatgttcccctgtctcccgaggatctcgaaaacgccactagcaaagaggccaacctcgacttccaggctattgctggcgtttccgccaagactcctatcatcagcttctccaccggtggctcgccccctttcattcccagtgagagcaccaccgataacaccaacgagccctacctcgtctgggtcaactggctgctctcgcagaagtcgatcccccagatcatcagcacttcttatgccgacgacgagcagactgttcccattgcatacgccaagcgtgtttgcgcacagtttgcccaggttggtgcccgtggtacctcgctcctcttctccagtggtgatgatggtgttggtagtgacggcacttgcgtcagtaacgacggtaccaacaagcgcatgttcacccctctgttccctccctcttgcccttacgtcactgtcgttggcgctacacgagaattcgaaccagaagtcgttgcttaccgtcccgcctacgtcggatccgatggtgttgctcatggcaactacacctcaggtggtggcttcggtaactacttcactgccccggcataccagaagaagactgtcgacgaatacgtcaagaatctcgatggtctctacgatggtctttacaacaaggagggccgtgcctatcccgatatctccgcccaggggttgtacttcgcatacttctggaacggtaccgagggtgtcatcagtggtacctccgccagcacacctctactttccggtattctcacacttgtcaatgacgcccttttggcctctggcaagccccaactgggtttcttgaacccttggctttacaaggtcggctacaaggctctgaatgatgtcaccagtggcagcgcccacggctgtgaggttgacggcttccccgccactaaaggatgggacccagtcaccggtttcggtacccctaatttccccaagctcgtcgagcttgtcggtgccaagttggagtaattcatgtaaatcattaatactgtaacaaatattacaatggcaatgggccaagaataattgaatataattgcccacgcatctcatgac

SEQ ID NO: 38511 - DNA, 534 bp, Muscodor strobelii
  misc_feature: SGI cDNA ID NO. 573385
  misc_feature: Reduced expression when VOC is produced
  misc_feature: Encodes the peptide sequence at SEQ ID NO 38512
atggcttccaaagcagacaagtcgaaaccttacattccactggcaagtctagcaaccgacggatggtcgaatgacaaggaagcaacggcgacatgtttctgtggtgctgtgcaactctctctcccacttgaacgcccaggactagttgatgtcttcgtttgcaattgctctgattgccgcaagatcacagcatcgatgtttgcatccaacatcatcgtggccgacaagtatttgaagcatctgcgtgggcaggacaacctcaagacatatgcgcagtccaagacgattgcctcgggaggcctgatgacgaattacttctgttctacctgcggtactctgatgtatagagtcggggagaaattccctggtgtgagcattcttcgcttgggtactgtcgacgacttcaatctagcagacacaaagctccggccgggaactgagcaattcatcaaggatcgcgtgagctggttcagtgggtgcgaaggcgcgagaaaaacagatgcaatggcgacatatccctcagagaaactataa

SEQ ID NO: 38512 - protein, 177 aa, Muscodor strobelii
  misc_feature: SGI Peptide ID NO. 573385
  misc_feature (52)..(159): Pfam Id: PF04828 Pfam Desc: Glutathione-dependent formaldehyde-activating enzyme
  misc_feature (1)..(170): NCBI GI: 212526184 Blast Desc: conserved [Penicillium marneffei ATCC 18224] gi|210072647|gb|EEA26734.1| conserved [Penicillium marneffei ATCC 18224]
  misc_feature (3)..(170): NCBI GI: 154313259 Blast Desc: BC1G_05631 [Botryotinia fuckeliana B05.10] gi|150849716|gb|EDN24909.1| BC1G_05631 [Botryotinia fuckeliana B05.10]
  misc_feature (1)..(173): NCBI GI: 255940030 Blast Desc: Pc16g04320 [Penicillium chrysogenum Wisconsin 54-1255] gi|211585407|emb|CAP93102.1| Pc16g04320 [Penicillium chrysogenum Wisconsin 54-1255]
  misc_feature (1)..(171): NCBI GI: 242777845 Blast Desc: conserved [Talaromyces stipitatus ATCC 10500] gi|218722735|gb|EED22153.1| conserved [Talaromyces stipitatus ATCC 10500]
  misc_feature (1)..(175): NCBI GI: 159123927 Blast Desc: conserved [Aspergillus fumigatus A1163]
  misc_feature (3)..(168): NCBI GI: 67902910 Blast Desc: AN8442.2 [Aspergillus nidulans FGSC A4] gi|40747908|gb|EAA67064.1| AN8442.2 [Aspergillus nidulans FGSC A4] gi|259484386|tpe|CBF80562.1| TPA: conserved [Aspergillus FGSC
  misc_feature (1)..(166): NCBI GI: 171695762 Blast Desc: protein product [Podospora anserina] gi|170948123|emb|CAP60287.1| protein product [Podospora anserina]
  misc_feature (8)..(171): NCBI GI: 116195428 Blast Desc: CHGG_04312 [Chaetomium globosum CBS 148.51] gi|88180225|gb|EAQ87693.1| CHGG_04312 [Chaetomium globosum CBS 148.51]
  misc_feature (2)..(165): NCBI GI: 242821398 Blast Desc: conserved [Talaromyces stipitatus ATCC 10500] gi|218712593|gb|EED12018.1| conserved [Talaromyces stipitatus ATCC 10500]
  misc_feature (1)..(173): NCBI GI: 115443516 Blast Desc: conserved [Aspergillus terreus NIH2624] gi|114188434|gb|EAU30134.1| conserved [Aspergillus terreus NIH2624]
  misc_feature: Useful for introducing or modulating the production of volatile compounds
MASKADKSKPYIPLASLATDGWSNDKEATATCFCGAVQLSLPLERPGLVDVFVCNCSDCRKITASMFASNIIVADKYLKHLRGQDNLKTYAQSKTIASGGLMTNYFCSTCGTLMYRVGEKFPGVSILRLGTVDDFNLADTKLRPGTEQFIKDRVSWFSGCEGARKTDAMATYPSEKL

SEQ ID NO: 38513 - DNA, 2374 bp, Muscodor strobelii
  misc_feature: SGI EST ID NO. CUFF.92590.1
  misc_feature: Variant of the nucleotide sequence at SEQ ID NO 38511
gcggcgtttattagggagtaatgctacggctgagttcgtacgttatcgtcatcctagatcgactgaattctagccactggctctacaacgcagattactagggaccaatccaaactaatccgaagtaaccgatcatccgatcctatggttttgatagctttctctccatacttgctctctctgtcctcggactatacatcatcgcgagcctatcgccgttgctcttagtcacaagaggccctccattaaacatagtaccgtctagtagcaactcccttgcgctcactgcagctcgtcatgagtcaacaacgaaatcaatagatgctcaccaatatgtatcgctttacgatagagatttggatagccctcggccgtccttctcttttctccttcggacgcctttgcaaagggccaatgaccaagacgcaaacgcggctctgaagacagttggcctacttgtaccgtcgcgatctgagcctatttcacacgatacgttccaaatcatgtctcgtttcccgttgtcggatatgagattgagttacaaaccaggtaagttgcttgtcggtatgatgtcaccaaacagactccgatggggtgtcttcaagatcctgaccatccctgcttctgatcgcatcaataggacaacccatattcaacagcttgggtttggctccgaagaacacaatgtcaaatcgaccaatactggcgagctatatgcttgataatggagtcatgatatactcggataaatgccaggcaatagaatcaaggcaaagcgacgggatgtgcgattgcttttatgagtttgaaacgagggtctgtggtcttgattagggtgacggcactagtacatagcttcttctccatgattcgtacacacaactttctactttgctttctaccctcgtgaatcatgcttgcaaaggaactaacgaaacgctgcatgctttgcgacgtcgcattccgcggaatctgcttagcaattagcagatgatgcagagcgctaaaaatcagagaaagggagagatgttgaacgtgctgaaggcaagacggcactgatgtatgcaggacgtgtctgacgccgaccgtacgtgacatcggagtcggagtgacggagcgcctattggtggccgaactttgaccctcatgtcagcacgcactagtccacaaaaatgcgcagaggggtacggagttatcgcgctgcctgcagtagtcgatttgaaaccagcgagaagcatatggtttgaagatgcatgctgagataatgacgagatggacgatagaattgcagactggctcatcaggatgaattgtatataagttctcaagattgtcgcaactgcattcaccacctgtacgacacaacacaaagatcttgacatttatcaccacttagatcaaagatagacgatatattcctacgagaacatggcttccaaagcagacaagtcgaaaccttacattccactggcaagtctagcaaccgacggatggtcgaatgacaaggaagcaacggcgacatgtttctgtggtgctgtgcaactctctctcccacttgaacgcccaggactagttgatgtcttcgtttgcaattgctctgattgccgcaagatcacagcatcgatgtttgcatccaacatcatcgtggccgacaagtatttgaagcatctgcgtgggcaggacaacctcaagacatatgcgcagtccaagacgattgcctcgggaggcctgatgacgaattacttctgttctacctgcggtactctgatgtatagagtcggggagaaattccctggtgtgagcattcttcgcttgggtactgtcgacgacttcaatctagcagacacaaagctccggccgggaactgagcaattcatcaaggatcgcgtgagctggttcagtgggtgcgaaggcgcgagaaaaacagatgcaatggcgacatatccctcagagaaactataaataatagagatgccatgttcttcgaagtatagcttgacggtacgctttgtcgcatgctatggtgcttgtatactcttatgtaaagttgatgtgtaggtcaagctgaaaggcaacaacggctcaatccgccgatatcccggccacacagctaagcggatagtggcgggggttgcagtagctccaccctactgtgtctgtgatgattgcgaattcactcaaaaggacgtcgactttaaatacggctcggatatgtaccaataagatgctaaatcatgtgaacaatgtaggagcttcgagggagatagacgattgaacaattaaacattgcttcgcctaatgcaatatcattagcatggtaaatgatgtgttgatccgatgctatcgaaagagccagtacaacccgtgatgtcta

SEQ ID NO: 38514 - DNA, 1116 bp, Muscodor strobelii
  misc_feature: SGI cDNA ID NO. 573386
  misc_feature: Encodes the peptide sequence at SEQ ID NO 38515
atgaattcgacactggccaacctgccaaatacacagacacaactacatacaacccaggcacatgaaacaagtaacaaacaactagaaaaatacacactgtctttcatgcagcaaccgcagcatgccaaggccgcaaatggaaaagataaagatcgaagacctgttgatcctccaccaattctccgattagaagtcgctgctgatcaggacccagacggcgtgtacaagcaaagtccatatctcatggctatcgcatacctcgagtacggtcccgggcaggaacaaggcccggattcgatgcctccagccaacttgatgtcaggaatgattgtgtcatcgctccatcgattaaaagacccaaatgatcaagaaggtgcattttttgtatttggggacttgacgatccgacgagaagggacctaccgcttgcgattcgacttattacagatggagtttggtgtcgactcggatcccggctcgtgggtcactattacctcgatcacaagcaatcccttccgggtgtattcgcaaaagaattttcctaagcagcaaaaaaacgaatcaacgtttttaacacgctcattcagtgatcaaggcgttcggcttcgcgtgcggaaggattccagattgagcttaaataggaagcgaaacgacaaagtcatcgagagacttgacagaaaaagactagctgttgattcgggagcgcagggacgaagaaccttaacacagcatacgggaacgatcgatccctccgacagctattatgaaggagatctttatggaagcgagcccgtcaataagaggagtcgcaccggtagagcgtcactcgcctatcgcacattcgccctatggaagtactacttcccagaattcgatgacatatctttatggttctactccctcccaaaatacaaacacgcaacctatgcatactaccgcaatgagcacaccgagcttatcgaattcttcgccgaggtcacatacgcaaggaacggcatcccctataggtgtgggcatgtatgcaccatcgcaacagatacattcgcgccaagtttcatacgctgcgccggcgtatcacaacatggccaatgccttcgatcacagtactttacatga

SEQ ID NO: 38515 - protein, 371 aa, Muscodor strobelii
  misc_feature: SGI Peptide ID NO. 573386
  misc_feature (27)..(214): NCBI GI: 240105361 Blast Desc: VosA, [Coccidioides posadasii C735 delta SOWgp]
  misc_feature (52)..(233): NCBI GI: 39974473 Blast Desc: MGG_00617 [Magnaporthe grisea 70-15] gi|145018474|gb|EDK02753.1| MGG_00617 [Magnaporthe grisea 70-15]
  misc_feature (27)..(214): NCBI GI: 119194311 Blast Desc: CIMG_01530 [Coccidioides immitis RS]
  misc_feature (33)..(209): NCBI GI: 238843903 Blast Desc: conserved [Microsporum canis CBS 113480]
  misc_feature (29)..(246): NCBI GI: 171682274 Blast Desc: protein product [Podospora anserina] gi|170941096|emb|CAP66746.1| protein product [Podospora anserina]
  misc_feature (27)..(217): NCBI GI: 225559872 Blast Desc: conserved [Ajellomyces capsulatus G186AR] gi|225559921|gb|EEH08203.1| conserved [Ajellomyces capsulatus G186AR]
  misc_feature (27)..(214): NCBI GI: 239607899 Blast Desc: VosA [Ajellomyces dermatitidis ER-3]
  misc_feature (27)..(214): NCBI GI: 261199802 Blast Desc: VosA [Ajellomyces dermatitidis SLH14081] gi|239594510|gb|EEQ77091.1| VosA [Ajellomyces dermatitidis SLH14081]
  misc_feature (27)..(217): NCBI GI: 171948706 Blast Desc: RYP2 [Ajellomyces capsulatus]
  misc_feature (27)..(217): NCBI GI: 240276252 Blast Desc: conserved [Ajellomyces capsulatus H143]
MNSTLANLPNTQTQLHTTQAHETSNKQLEKYTLSFMQQPQHAKAANGKDKDRRPVDPPPILRLEVAADQDPDGVYKQSPYLMAIAYLEYGPGQEQGPDSMPPANLMSGMIVSSLHRLKDPNDQEGAFFVFGDLTIRREGTYRLRFDLLQMEFGVDSDPGSWVTITSITSNPFRVYSQKNFPKQQKNESTFLTRSFSDQGVRLRVRKDSRLSLNRKRNDKVIERLDRKRLAVDSGAQGRRTLTQHTGTIDPSDSYYEGDLYGSEPVNKRSRTGRASLAYRTFALWKYYFPEFDDISLWFYSLPKYKHATYAYYRNEHTELIEFFAEVTYARNGIPYRCGHVCTIATDTFAPSFIRCAGVSQHGQCLRSQYFT

SEQ ID NO: 38516 - DNA, 3647 bp, Muscodor strobelii
  misc_feature: SGI EST ID NO. CUFF.92704.0
  misc_feature: Variant of the nucleotide sequence at SEQ ID NO 38514
ttctaatcatgccatgcttatggccacttgagccgtcatgccaacattaatatactgggctcgaccattcgctatacaagacgaagctgcatacccatgacctcgcagactactgacatattcttctccacacgagctcgctacctaccagaacacgctaatatgcactcgagatccattttcttttcacgacaacatacgaccaaagcaaacatcagcgagttcgttactttacttctctgcggacagaagtacgaggcagggcgaaccgtgaagaaatcctttgtgaattgcgcaaggactcggcattatagagaagcacctcaactgtctggtcgagatactgtagaatccgcgcggtgtgacattcattagtcaaccagctgggcacccaaccagtctatgcatctcactcgacagccataagccccaacatcaaatcaacttctaccaattttacactatacatctacacgagtagatacaactttcctttccaacccaccaacagccctgcgaacatcgacaaccacatccaccaagtttagtgccagggatcgggcagccttcagtccacgttggacatcacggggcacgcttgaggtatcacagattggacgcagcctattacagctaaaaaaccagcactcggcgccacctccatgctattagagagagcgttcgttgtcgcccaccgttttgacgcagaaaaaacagagctgtggcaccgcattcgctaaaaaaaatcacgatttcgatttggagcgagggattgtttacctaccgaccacagagagccccgcctccccatgcgtttcattttctgagaattcaatactcgagtctgttatattaagatatccacacgatcgtttatcgattgcgaccgttgactagaagtgtccgattcaaccagctgtcagagtgttacaacaagaagtcccatttcctcttcgtcgcgatcgtgtcccagcatccggttattagaccgagacgagcattcagtagccatcccaggaattgttcgctgtcacatcgatatccgaaaacaaataactacggaaaccagaacgttggttagcgtgacgtactcgtggaaaccaaaccacttgtcggcgagcgctttacattttcatcttctcgcactactgcagagtatttattgtttctgcgaacccgatcgctgcgatctacgcgtgcggagtcggatatgataaacgtaatggcgtatcagcaaacaccatggggcaatggtccccattatgtgcccatgatgaattcgacactggccaacctgccaaatacacagacacaactacatacaacccaggcacatgaaacaagtaacaaacaactagaaaaatacacactgtctttcatgcagcaaccgcagcatgccaaggccgcaaatggaaaagataaaggtacctagctatacatggagtgcgagcagtgcgcccactatgctaacaatcatgctaaagatcgaagacctgttgatcctccaccaattctccgattagaagtcgctgctgatcaggacccagacggcgtgtacaagcaaagtccatatctcatggctatcgcatacctcgagtacggtcccgggcaggaacaaggcccggattcgatgcctccagccaacttgatgtcaggaatgattgtgtcatcgctccatcgattaaaagacccaaatgatcaagaaggtgcattttttgtatttggggacttgacgatccgacgagaagggacctaccgcttgcgattcgacttattacagatggagtttggtgtcgactcggatcccggctcgtgggtcactattacctcgatcacaagcaatcccttccgggtgtattcgcaaaagaattttcctaagcagcaaaaaaacgaatcaacgtttttaacacgctcattcagtgatcaaggcgttcggcttcgcgtgcggaaggattccagattgagcttaaataggaagcgaaacgacaaagtcatcgagagacttgacagaaaaagactagctgttgattcgggagcgcagggacgaagaaccttaacacagcatacgggaacgatcgatccctccgacagctattatgaaggagatctttatggaagcgagcccgtcaataagaggagtcgcaccgggtcgggtccgttgcaagtcacggctacgccggaagcagggcttgagacacgtccttggggtgcctatcaaccaagctctggagcttcttatccacatcaaggacctgtcggggttatgagtacagcgccatcgacatctgtggcaatgagtgcccctcagatgcctccaccaacaacgcgactcgatacacattttcattcacttcatggagggtctaacatgttcacgtctccagtagagcgtcactcgcctatcgcacattcgccctatggaagtactacttcccagaattcgatgacatatctttatggttctactccctcccaaaatacaaacacgcaacctatgcatactaccgcaatgagcacaccgagcttatcgaattcttcgccgaggtcacatacgcaaggaacggcatcccctataggtgtgggcatgtatgcaccatcgcaacagatacattcgcgccaagtttcatacgctgcgccggcgtatcacaacatggccaatgccttcgatcacagtactttacatgagcatggaatgagcacgccactgaccgggaatttaccaccggaaagtcttaaggggccatataacgatgtctataattcaaaccagaaataattctggctgccacgtatacacttcagttcttacgtcgaggccgaagaagtccttgcagcgatcttccaaggagtaatagaaatgggtctaaaattgtccgaagatagcattattggttaatttggcgcaagggaaaccggcctgggaacgaaggattggactatggaggaaatttgatttcactcactttgccctgtttggtgtcggaagcgggaaaagcatccttctagcaaaagataccctatggcggctgctatgctttttgaaacttttgtcaattatcgaatctctcccttagctagaagtaatacacacgcattataataccatacgagatcgtcctgtcttatgtatgtaatatgcctgtgcctgtaactgtgataaattcaatgctaagcattgaggccctattgagtcagtatgaagtagattaaaatgtctctgcgatatgtagtctctggatggcacccgaccctgtgtttgcttcctctagtgccgcgccccagacgtctcccgaaccaaacaggtttccagatcatggtacctaccgcttcccaatcctgcggagcgggaggtatcaatacgcgaagattgtgcagagcactgtccgtaaaacagtctcgatctcaatatatcagcatgacaaagctcacgctgccggtctctttcgcctgaacgatagacaaacgaacaactgacgttaagatcccagcgcttaacgcggcctagtccaagcgcttaccgccttaagatttccatatatacgacaaggacatcatctacctaatatgaagccttgagagagaaactataagctagcgggatatgacatgtcattagacaaggtcggaacataatgccgagggtagat

SEQ ID NO: 38517 - DNA, 867 bp, Muscodor strobelii
  misc_feature: SGI cDNA ID NO. 573387
  misc_feature: Encodes the peptide sequence at SEQ ID NO 38518
atgaattcgacactggccaacctgccaaatacacagacacaactacatacaacccaggcacatgaaacaagtaacaaacaactagaaaaatacacactgtctttcatgcagcaaccgcagcatgccaaggccgcaaatggaaaagataaagatcgaagacctgttgatcctccaccaattctccgattagaagtcgctgctgatcaggacccagacggcgtgtacaagcaaagtccatatctcatggctatcgcatacctcgagtacggtcccgggcaggaacaaggcccggattcgatgcctccagccaacttgatgtcaggaatgattgtgtcatcgctccatcgattaaaagacccaaatgatcaagaaggtgcattttttgtatttggggacttgacgatccgacgagaagggacctaccgcttgcgattcgacttattacagatggagtttggtgtcgactcggatcccggctcgtgggtcactattacctcgatcacaagcaatcccttccgggtgtattcgcaaaagaattttcctaagcagcaaaaaaacgaatcaactagagcgtcactcgcctatcgcacattcgccctatggaagtactacttcccagaattcgatgacatatctttatggttctactccctcccaaaatacaaacacgcaacctatgcatactaccgcaatgagcacaccgagcttatcgaattcttcgccgaggtcacatacgcaaggaacggcatcccctataggtgtgggcatgtatgcaccatcgcaacagatacattcgcgccaagtttcatacgctgcgccggcgtatcacaacatggccaatgccttcgatcacagtactttacatga

SEQ ID NO: 38518 - protein, 288 aa, Muscodor strobelii
  misc_feature: SGI Peptide ID NO. 573387
  misc_feature (33)..(200): NCBI GI: 238843903 Blast Desc: conserved [Microsporum canis CBS 113480]
  misc_feature (27)..(199): NCBI GI: 240105361 Blast Desc: VosA, [Coccidioides posadasii C735 delta SOWgp]
  misc_feature (27)..(199): NCBI GI: 119194311 Blast Desc: CIMG_01530 [Coccidioides immitis RS]
  misc_feature (27)..(181): NCBI GI: 239607899 Blast Desc: VosA [Ajellomyces dermatitidis ER-3]
  misc_feature (27)..(181): NCBI GI: 261199802 Blast Desc: VosA [Ajellomyces dermatitidis SLH14081] gi|239594510|gb|EEQ77091.1| VosA [Ajellomyces dermatitidis SLH14081]
  misc_feature (27)..(199): NCBI GI: 225559872 Blast Desc: conserved [Ajellomyces capsulatus G186AR] gi|225559921|gb|EEH08203.1| conserved [Ajellomyces capsulatus G186AR]
  misc_feature (27)..(199): NCBI GI: 171948706 Blast Desc: RYP2 [Ajellomyces capsulatus]
  misc_feature (27)..(199): NCBI GI: 240276252 Blast Desc: conserved [Ajellomyces capsulatus H143]
  misc_feature (31)..(199): NCBI GI: 242769435 Blast Desc: developmental regulator VosA [Talaromyces stipitatus ATCC 10500] gi|218724963|gb|EED24380.1| developmental regulator VosA [Talaromyces stipitatus ATCC 10500]
  misc_feature (24)..(194): NCBI GI: 212542223 Blast Desc: developmental regulator VosA [Penicillium marneffei ATCC 18224] gi|210066173|gb|EEA20266.1| developmental regulator VosA [Penicillium marneffei ATCC 18224]
MNSTLANLPNTQTQLHTTQAHETSNKQLEKYTLSFMQQPQHAKAANGKDKDRRPVDPPPILRLEVAADQDPDGVYKQSPYLMAIAYLEYGPGQEQGPDSMPPANLMSGMIVSSLHRLKDPNDQEGAFFVFGDLTIRREGTYRLRFDLLQMEFGVDSDPGSWVTITSITSNPFRVYSQKNFPKQQKNESTRASLAYRTFALWKYYFPEFDDISLWFYSLPKYKHATYAYYRNEHTELIEFFAEVTYARNGIPYRCGHVCTIATDTFAPSFIRCAGVSQHGQCLRSQYFT

SEQ ID NO: 38519 - DNA, 3647 bp, Muscodor strobelii; identical to SEQ ID NO: 38516
  misc_feature: SGI EST ID NO. CUFF.92704.0
  misc_feature: Variant of the nucleotide sequence at SEQ ID NO 38517

SEQ ID NO: 38520 - DNA, 501 bp, Muscodor strobelii
  misc_feature: SGI cDNA ID NO. 573388
  misc_feature: Elevated expression when VOC is produced
  misc_feature: Encodes the peptide sequence at SEQ ID NO 38521
atgggcgacgtcgcagaccccactattaccagtgacgaagtaatcaagtcgcatatcgaaaatcttgtgcgcacgaatctacccaactctgcaatctacaatttcctcctttcagatgtcgccatcgcgtctgcaacacgtggaaacgtgaaagcgcgcctagtcctcaccaagaaccacgtcaactcatctggcgggattcatggcgccgtatcagctaccttcacggactgggcaggcgggatggcgatcgcgacttgggactttcgcgccaagactggcgtttcagtcgatatccacgtgagatacctatcttctgcgagagaaggcgacgagattcaaatcgagggtatcgcggagaagatcgggggctcgattgccttcacgacggttgtgatccggaaagtggtcgacggggttccgggacccgtcattgcatctggaacacataccaagtatgtgaagctgagagaggctccaaagctagtactctcagactga

SEQ ID NO: 38521 - protein, 166 aa, Muscodor strobelii
  misc_feature: SGI Peptide ID NO. 573388
  misc_feature (64)..(142): Pfam Id: PF03061 Pfam Desc: Thioesterase superfamily
  misc_feature (11)..(156): NCBI GI: 169623417 Blast Desc: SNOG_14948 [Phaeosphaeria nodorum SN15] gi|160704978|gb|EAT77800.2| SNOG_14948 [Phaeosphaeria nodorum SN15]
  misc_feature (11)..(156): NCBI GI: 189191846 Blast Desc: thioesterase family protein [Pyrenophora tritici-repentis Pt-1C-BFP] gi|187973868|gb|EDU41367.1| thioesterase family protein [Pyrenophora tritici-repentis
  misc_feature (4)..(159): NCBI GI: 256726558 Blast Desc: NECHADRAFT_39608 [Nectria haematococca mpVI 77-13-4]
  misc_feature (10)..(157): NCBI GI: 156043179 Blast Desc: SS1G_10592 [Sclerotinia sclerotiorum 1980] gi|154694980|gb|EDN94718.1| SS1G_10592 [Sclerotinia sclerotiorum 1980]
  misc_feature (29)..(157): NCBI GI: 154310092 Blast Desc: BC1G_06966 [Botryotinia fuckeliana B05.10] gi|150851527|gb|EDN26720.1| BC1G_06966 [Botryotinia fuckeliana B05.10]
  misc_feature (18)..(154): NCBI GI: 255955401 Blast Desc: Pc21g14380 [Penicillium chrysogenum Wisconsin 54-1255] gi|211590164|emb|CAP96335.1| Pc21g14380 [Penicillium chrysogenum Wisconsin 54-1255]
  misc_feature (4)..(152): NCBI GI: 46124291 Blast Desc: FG06523.1 [Gibberella zeae PH-1]
  misc_feature (29)..(155): NCBI GI: 71000798 Blast Desc: thioesterase family protein [Aspergillus fumigatus Af293] gi|66852718|gb|EAL93042.1| thioesterase family protein [Aspergillus fumigatus Af293]
  misc_feature (10)..(156): NCBI GI: 39950233 Blast Desc: MGG_01194 [Magnaporthe grisea 70-15] gi|145021009|gb|EDK05138.1| MGG_01194 [Magnaporthe grisea 70-15]
  misc_feature (29)..(157): NCBI GI: 67539270 Blast Desc: AN5805.2 [Aspergillus nidulans FGSC A4] gi|40739124|gb|EAA58314.1| AN5805.2 [Aspergillus nidulans FGSC A4]
  misc_feature: Useful for introducing or modulating the production of volatile compounds
MGDVADPTITSDEVIKSHIENLVRTNLPNSAIYNFLLSDVAIASATRGNVKARLVLTKNHVNSSGGIHGAVSATFTDWAGGMAIATWDFRAKTGVSVDIHVRYLSSAREGDEIQIEGIAEKIGGSIAFTTVVIRKVVDGVPGPVIASGTHTKYVKLREAPKLVLSD

SEQ ID NO: 38522 - DNA, 1785 bp, Muscodor strobelii
  misc_feature: SGI EST ID NO. CUFF.92629.0
  misc_feature: Variant of the nucleotide sequence at SEQ ID NO 38520
ctggtgagcattagtttaatattgtggcggtgctctgctattgagatcggacccatcaccttagtttcattcgtgaaatctcccttcaacataaataaacaaattcggtggagggtagatcgataattagtacacgcgccctaattggattactccagagtactaaaccaagaatattcacgatgggcgacgtcgcagaccccactattaccagtgacgaagtaatcaagtcgcatatcgaaaatcttgtgcgcacgaatctacccaactctgcaatctacaatttcctcctttcagatgtcgccatcgcgtctgcaacacgtggaaacgtgaaagcgcgcctagtcctcaccaagaaccacgtcaactcatctggcgggattcatggcgccgtatcagctaccttcacggactgggcaggcgggatggcgatcgcgacttgggactttcgcgccaagactggcgtttcagtcgatatccacgtgagatacctatcttctgcgagagaaggcgacgagattcaaatcgagggtatcgcggagaagatcgggggctcgattgccttcacgacggttgtgatccggaaagtggtcgacggggttccgggacccgtcattgcatctggaacacataccaagtatgtgaagctgagagaggctccaaagctagtactctcagactgaggttgagggcgatgtcatcgatgaccaagagcaatctcatgcttgtggtcattgggtcattgcgctgcatgcgactgggcaggcgatgtggatgttttgcaaatacaatccgcactgaagaatatcgaggggctcatcaatgacctaaaggaatataatttagcatgaaattcgctagacatactgtctttactacttccgcttgtaggaagggtcggagagacattagagtgtcagcagcagtagacggcctagagatgggaatagacacaacctattaatgtttccaggacaatgaagattattcattcgccattaccgctttgatatattcggaccaagcacggattcggagttccgtctatggttaaaacaactgccgcgaatagcaaatccgtagctttgagaagtgataaaaatcgaattcgtgcagtcgcgcacacagcttgtagtcaaagagttgccggttgaactacttgagctgattgttcatttgtgctgtctaatcgttcaacggcttgggaaaatgcgcatagatgttccaaacctgaataggggcagcgatccaccctataagatacagatttagttcatcacgccttggtgtgtacaaagaactttcgaatcaatagcttgatgtaacttaaggcagccatccatttagactcatttcttaagacaattgatagaaatatggtagcgcaacagtcttcatagtgattgaactatgtccattggaggtctttcgcgtcggctgcttgcttcggttctataaatgcattggttttgtctgcaatgagggtggctgctacatagtttatcctagaactgtgcgcaccaactggtcaagcgagacgtcatagcctggaacaaggagtcaaatagcatgaaggtggtcacttctgtatgaatatgcgctatgggtcaaatatctactgtggtgcgaggttgggaatttagcgtgtggtaaactgagggccgggctgacaaggagcagattggcgttcttctctatgtttgatccaatagatgcttgacaagacactggtcgcagacacttgcacatcagcttcgggctttgccaccacatccgcgattcccg

SEQ ID NO: 38523 - DNA, 669 bp, Muscodor strobelii
  misc_feature: SGI cDNA ID NO. 573389
  misc_feature: Encodes the peptide sequence at SEQ ID NO 38524
atgtcacatcactgccacgacgaacaccatgaccacgatcacgagcacgaccacacagatgacatcacaccagctcttcagcacagtctgtaccagcacatcagcttcgacgacatcacgacgatgaacgaggccgagaccggatcaggaatagcgattgtgaagaagacttgggccgaccggctcagagccgagcccgaactcactagtgatgccgatgaacagattctcatgaatgtgcccttcacgggccaaataaaactccactcaatcctcctgcgttcctccccctccccctccgccccacgaaccctctcagtattcatcaaccggaccgacctagacttcgatactgcttccgaattatccccaacacagaccttcgaattatcacaaacgtcggaaatccaagagctgccggtaaaacgcgcgttattcgggaaagtccagcgcttgacactgttcttcgtggataatttcgatgaagatggggatgaagaggagacgaagttgagttatctggggtttaagggggagtggatgcagcttggacgtgcaccggttaatattttgtatgaggcggcgccgaaccctaatgatcataagattaaggggactagtagtaatgctatggggagtgggattggtggtggggggcgtggtgtttag

SEQ ID NO: 38524 - protein, 222 aa, Muscodor strobelii
  misc_feature: SGI Peptide ID NO. 573389
  misc_feature (63)..(180): Pfam Id: PF06201 Pfam Desc: Domain of Function (DUF1000)
  misc_feature (19)..(216): NCBI GI: 156044214 Blast Desc: SS1G_10210 [Sclerotinia sclerotiorum 1980] gi|154694599|gb|EDN94337.1| SS1G_10210 [Sclerotinia sclerotiorum 1980]
  misc_feature (1)..(211): NCBI GI: 116199557 Blast Desc: CHGG_07934 [Chaetomium globosum CBS 148.51] gi|88179213|gb|EAQ86681.1| CHGG_07934 [Chaetomium globosum CBS 148.51]
  misc_feature (19)..(216): NCBI GI: 154305470 Blast Desc: BC1G_08504 [Botryotinia fuckeliana B05.10] gi|150853291|gb|EDN28483.1| BC1G_08504 [Botryotinia fuckeliana B05.10]
  misc_feature (15)..(215): NCBI GI: 171689540 Blast Desc: protein product [Podospora anserina] gi|170944732|emb|CAP70843.1| protein product [Podospora anserina]
  misc_feature (4)..(211): NCBI GI: 256730784 Blast Desc: [Nectria haematococca mpVI 77-13-4]
  misc_feature (17)..(219): NCBI GI: 85110567 Blast Desc: NCU06751 [Neurospora crassa OR74A] gi|28881353|emb|CAD70395.1| conserved [Neurospora crassa] gi|28925206|gb|EAA34287.1| conserved [Neurospora crassa OR74A]
  misc_feature (20)..(211): NCBI GI: 261354478 Blast Desc: conserved [Verticillium albo-atrum VaMs.102]
  misc_feature (20)..(211): NCBI GI: 46109316 Blast Desc: FG01540.1 [Gibberella zeae PH-1]
  misc_feature (19)..(211): NCBI GI: 39946674 Blast Desc: MGG_08563 [Magnaporthe grisea 70-15] gi|145012420|gb|EDJ97076.1| MGG_08563 [Magnaporthe grisea 70-15]
  misc_feature (16)..(217): NCBI GI: 119496137 Blast Desc: NFIA_016410 [Neosartorya fischeri NRRL 181] gi|119413004|gb|EAW22945.1| conserved [Neosartorya fischeri NRRL 181]
MSHHCHDEHHDHDHEHDHTDDITPALQHSLYQHISFDDITTMNEAETGSGIAIVKKTWADRLRAEPELTSDADEQILMNVPFTGQIKLHSILLRSSPSPSAPRTLSVFINRTDLDFDTASELSPTQTFELSQTSEIQELPVKRALFGKVQRLTLFFVDNFDEDGDEEETKLSYLGFKGEWMQLGRAPVNILYEAAPNPNDHKIKGTSSNAMGSGIGGGGRGV

SEQ ID NO: 38525 - DNA, 4522 bp, Muscodor strobelii
  misc_feature: SGI EST ID NO. CUFF.92657.0
  misc_feature: Variant of the nucleotide sequence at SEQ ID NO 38523
ttccagtattgctcattttgctgttcgaataactgtcggcttttatctgctctcgaaacttctatatatagtgcatattgaatgcatcgctatgctcatcagacatatcacgataacggaaaggaacccttcagagctagcttctccgaatgactgaacatcgcttatttgaatcggcaatcggactcccaggacgcctttcacaagttccatttggcgttgacaagccgggggatggcgggtggttctcttctcgcgaatcgagccatgataccccgatattgagagagctgggcccctgcaggacatggatacaagctgaaacccgtcacatcatcgactcggggccaagcgaggaaagggaatatgacaagaaccgcagacaacgaagatggctgctgagacatcatgccgaagccagtctcgaccctgacattctacgcgaatatctcggcgaagggaactcacgcttttcatcacgagaagacatcggctctcattccagcttcctagcattaggcgagctcacggatcttagcaaccttggggggacttctggggcgccattactcgtcaccgtcgtaggtgaagggaacaatgctctccggttctcgagactaaatcaggaagaaactcaatggcctaagcagccagatgctatagtccggctgatcgggatatcgaacgatgaaccagccttatgggcagaggatcataccgatcctgttcatcgtatcaaatgctttgttgatctgcaacggttcaatccaacccgctgggtagcagctcaacgagattccggcacgaccatatttcgcacagagtatcacaagataccaccagtccgaggcataggacaggcaccctcacacatctctgcaaaccccctattcgatgtcccgaagcatgtcaccggaggtaacgtccacacggatttggccttcaatccgccgacccgctcgaatccagcacagctcggtattgttgacgagcgaggattctggagcgtatgggatgttttgcatcccaaggcgagggcatcagggccaacacctagactcaagatgtgcggccatatcgaacttggtgttctcgaccatttacccgatgggagtgctgccgagatgaaatggcataagatcgtctgggttgggtcctcagaggatgagctggacatgttcaagtctcttgatcttgacgcagatgacgaggagccagaatccagtgccgcctttccgcccttaaagcgcagctctctattacttgtttacaacttcttcgaagcaaggcttttcgacttgagtactggatcacatctacctgaccttgcattcacgagcgtaacgtcacctgatggcatagtggacatccaacccgatcccgagaatccggagtattattacgtgttgaccacattgagattgtttgtcgttcgaacagtttcgaagcctggcgtaacttgggatagacctgagagatcatcgtctatcttatattcgacgcctcactttagaagctttttcgatcggagtttaagactcattgcgacccggggtgttcgatcgaaccagactatctcttctcttcttttcatccattcatcaatatatccatggaacgatgtcttccacgttgaaatttcgaaacaatatcccaacagagtcagatgccaacggaatactacggccttcgaagaactccagaacatcactttaaagaacccaatgcaaacagtgaacatcagtcctgtaggaactgcgggtaacactgctctaaaactggccggccagcgtttaatgctctaccagattactgccttgacgtcaaatcgctccgtagtctcgacaatgtgtatgtctcccgggctaccaaaccaccacattgggatgcccagagacaaggtcgttcgatcaatgagccagaaactgaaccggcgacacattctccaagatttgacataccgctttgttgttccagatgatctcacaattctggaagaaaagccacttatgaaatcgaccaaaacgaaggccttacccggtaatggcacaccagagccttatcagaggttcatcaagcctttctatgattatctcagcgagatcgttgcaagtcggctggatccacaggtcgccgaatcatcggaaggtgatacctttggatccaaccccttcgacgcagctcattactacatagaggaagcgcttgaaagagggagccttccccttcgtaatcttaatgaagtgatgcccagctttgacgaagcagcgaaacatccaggtctatcactagactggagcaatgaagttgaaagactggatcgtgcccatccggacatatctatcgtcacatttgatctgctgcgctctagcttatgcttgtcgccagatgcttcgtttcaagaggcctctagcgtcttgcttgacatgataggaagtcaagtaggagctgacgaggccgaccatgtaaatcaacagcacagagccatgatctttgggcagatgcgatatgatctcttcctttcacttttcggtcttggatatcgtagacctgagatgactgagcctgagctgccaaatactgcgactgcaaggcaacaaagcgtcgcaagcgaagcaatgacaatagacagccagaccgagaccttaccaagcagccctgcaagatcgcaatctccaagtacttcgtcgcaaaggtcaatttcggaggcagtcgaggaagaagatcctgtaatgacatcgctgagatcgtacatcggcatggggaagttcgtatcccggaaggagttcgagctcctagataaatggcagctaggagttccgccatctgaatacgtgtttgatatagacagagaaacggatgcagggcctatggcgcggacaagggccaagcaacttgccagacaagatcgcaaacgacgtcgggcagagactttgctgaagtttagtcgagagcctcagttgcctaatacgcaaccactaccagagacacgcttcttcagcagccagcccagagccgcagagtcgcaatcacaatttcagtctgatccagtgcaggccatgtcgcagcccatagctggagcgcatggagtacgaccgcagaagaaagtaaagaagcgaaagggcggtttttgaactacgaataattgtacatatgaaatatcactatttttgttggtttatacgcggatgatcttatgtaaatttgcatagcagatctgatttatgatcaggataatacaccaatgatcgcagttcataaaacgtccataagcttttgttgaaaatgtcggtgattcaatctgtgacgtccagtatgccggcgcccggttgtttgtgacatggtaatacctgccgcctactggcgtaacatttcaatcaatcagcacctccgccactagccgtccagaacttaaaccaccagcacccactctcacaatcacattccaccccagctcacaaccgcaactcataaattaaatctcatagtcctcttacaaattgaacgtttgtctgaagttatcatattcaaaatgtcacatcactgccacgacgaacaccatgaccacgatcacgagcacgaccacacagatgacatcacaccagctcttcagcacagtctgtaccagcacatcagcttcgacgacatcacgacgatgaacgaggccgagaccggatcaggaatagcgattgtgaagaagacttgggccgaccggctcagagccgagcccgaactcactagtgatgccgatgaacagattctcatgaatgtgcccttcacgggccaaataaaactccactcaatcctcctgcgttcctccccctccccctccgccccacgaaccctctcagtattcatcaaccggaccgacctagacttcgatactgcttccgaattatccccaacacagaccttcgaattatcacaaacgtcggaaatccaagagctgccggtaaaacgcgcgttattcgggaaagtccagcgcttgacactgttcttcgtggataatttcgatgaagatggggatgaagaggagacgaagttgagttatctggggtttaagggggagtggatgcagcttggacgtgcaccggttaatattttgtatgaggcggcgccgaaccctaatgatcataagattaaggggactagtagtaatgctatggggagtgggattggtggtggggggcgtggtgtttaggggttttgaaagggcagagaaagggagggaaaggaggcggtggtgagcgttgggcaggaggcggaatcggaagatttatgcttcgttgggagctatgaaatgttaggtcttattctgctatgagttcgacgtggtggtcctgcaaatctagagatgaagatatgcagaggggggttaaggtgagggggtctgacagggtcctcgtatgatagaaacccaagatcaagagaccatgcaagattatgaaagtcaaagtcgcgaagaacttcatcttttacaaatgtgtcacgtttaatgatgtgataaagcaagaaggtcggc

SEQ ID NO: 38526 - DNA, 2985 bp, Muscodor strobelii
  misc_feature: SGI cDNA ID NO. 573390
  misc_feature: Encodes the peptide sequence at SEQ ID NO 38527
atgactgaacatcgcttatttgaatcggcaatcggactcccaggacgcctttcacaagttccatttggcgttgacaagccgggggatggcgggtggttctcttctcgcgaatcgagccatgataccccgatattgagagagctgggcccctgcaggacatggatacaagctgaaacccgtcacatcatcgactcggggccaagcgaggaaagggaatatgacaagaaccgcagacaacgaagatggctgctgagacatcatgccgaagccagtctcgaccctgacattctacgcgaatatctcggcgaagggaactcacgcttttcatcacgagaagacatcggctctcattccagcttcctagcattaggcgagctcacggatcttagcaaccttggggggacttctggggcgccattactcgtcaccgtcgtaggtgaagggaacaatgctctccggttctcgagactaaatcaggaagaaactcaatggcctaagcagccagatgctatagtccggctgatcgggatatcgaacgatgaaccagccttatgggcagaggatcataccgatcctgttcatcgtatcaaatgctttgttgatctgcaacggttcaatccaacccgctgggtagcagctcaacgagattccggcacgaccatatttcgcacagagtatcacaagataccaccagtccgaggcataggacaggcaccctcacacatctctgcaaaccccctattcgatgtcccgaagcatgtcaccggaggtaacgtccacacggatttggccttcaatccgccgacccgctcgaatccagcacagctcggtattgttgacgagcgaggattctggagcgtatgggatgttttgcatcccaaggcgagggcatcagggccaacacctagactcaagatgtgcggccatatcgaacttggtgttctcgaccatttacccgatgggagtgctgccgagatgaaatggcataagatcgtctgggttgggtcctcagaggatgagctggacatgttcaagtctcttgatcttgacgcagatgacgaggagccagaatccagtgccgcctttccgcccttaaagcgcagctctctattacttgtttacaacttcttcgaagcaaggcttttcgacttgagtactggatcacatctacctgaccttgcattcacgagcgtaacgtcacctgatggcatagtggacatccaacccgatcccgagaatccggagtattattacgtgttgaccacattgagattgtttgtcgttcgaacagtttcgaagcctggcgtaacttgggatagacctgagagatcatcgtctatcttatattcgacgcctcactttagaagctttttcgatcggagtttaagactcattgcgacccggggtgttcgatcgaaccagactatctcttctcttcttttcatccattcatcaatatatccatggaacgatgtcttccacgttgaaatttcgaaacaatatcccaacagagtcagatgccaacggaatactacggccttcgaagaactccagaacatcactttaaagaacccaatgcaaacagtgaacatcagtcctgtaggaactgcgggtaacactgctctaaaactggccggccagcgtttaatgctctaccagattactgccttgacgtcaaatcgctccgtagtctcgacaatgtgtatgtctcccgggctaccaaaccaccacattgggatgcccagagacaaggtcgttcgatcaatgagccagaaactgaaccggcgacacattctccaagatttgacataccgctttgttgttccagatgatctcacaattctggaagaaaagccacttatgaaatcgaccaaaacgaaggccttacccggtaatggcacaccagagccttatcagaggttcatcaagcctttctatgattatctcagcgagatcgttgcaagtcggctggatccacaggtcgccgaatcatcggaaggtgatacctttggatccaaccccttcgacgcagctcattactacatagaggaagcgcttgaaagagggagccttccccttcgtaatcttaatgaagtgatgcccagctttgacgaagcagcgaaacatccaggtctatcactagactggagcaatgaagttgaaagactggatcgtgcccatccggacatatctatcgtcacatttgatctgctgcgctctagcttatgcttgtcgccagatgcttcgtttcaagaggcctctagcgtcttgcttgacatgataggaagtcaagtaggagctgacgaggccgaccatgtaaatcaacagcacagagccatgatctttgggcagatgcgatatgatctcttcctttcacttttcggtcttggatatcgtagacctgagatgactgagcctgagctgccaaatactgcgactgcaaggcaacaaagcgtcgcaagcgaagcaatgacaatagacagccagaccgagaccttaccaagcagccctgcaagatcgcaatctccaagtacttcgtcgcaaaggtcaatttcggaggcagtcgaggaagaagatcctgtaatgacatcgctgagatcgtacatcggcatggggaagttcgtatcccggaaggagttcgagctcctagataaatggcagctaggagttccgccatctgaatacgtgtttgatatagacagagaaacggatgcagggcctatggcgcggacaagggccaagcaacttgccagacaagatcgcaaacgacgtcgggcagagactttgctgaagtttagtcgagagcctcagttgcctaatacgcaaccactaccagagacacgcttcttcagcagccagcccagagccgcagagtcgcaatcacaatttcagtctgatccagtgcaggccatgtcgcagcccatagctggagcgcatggagtacgaccgcagaagaaagtaaagaagcgaaagggcggtttttga

SEQ ID NO: 38527 - protein, 994 aa, Muscodor strobelii
  misc_feature: SGI Peptide ID NO. 573390
  misc_feature (73)..(994): NCBI GI: 256730785 Blast Desc: NECHADRAFT_30508 [Nectria haematococca mpVI 77-13-4]
  misc_feature (73)..(612): NCBI GI: 46109314 Blast Desc: FG01539.1 [Gibberella zeae PH-1]
  misc_feature (10)..(945): NCBI GI: 116199559 Blast Desc: CHGG_07935 [Chaetomium globosum CBS 148.51] gi|88179214|gb|EAQ86682.1| CHGG_07935 [Chaetomium globosum CBS 148.51]
  misc_feature (73)..(696): NCBI GI: 261354479 Blast Desc: conserved [Verticillium albo-atrum VaMs.102]
  misc_feature (10)..(612): NCBI GI: 85110569 Blast Desc: NCU06752 [Neurospora crassa OR74A] gi|28881352|emb|CAD70394.1| [Neurospora crassa] gi|28925207|gb|EAA34288.1| [Neurospora crassa OR74A]
  misc_feature (12)..(620): NCBI GI: 171689522 Blast Desc: protein product [Podospora anserina] gi|170944723|emb|CAP70834.1| protein product [Podospora anserina]
  misc_feature (41)..(994): NCBI GI: 39946670 Blast Desc: MGG_08565 [Magnaporthe grisea 70-15] gi|145012422|gb|EDJ97078.1| MGG_08565 [Magnaporthe grisea 70-15]
  misc_feature (118)..(465): NCBI GI: 225678240 Blast Desc: conserved [Paracoccidioides brasiliensis Pb03]
  misc_feature (118)..(465): NCBI GI: 226280432 Blast Desc: conserved [Paracoccidioides brasiliensis Pb01]
  misc_feature (116)..(464): NCBI GI: 145239015 Blast Desc: An08g00360 [Aspergillus niger] gi|134076657|emb|CAK45188.1| protein product [Aspergillus niger]
MTEHRLFESAIGLPGRLSQVPFGVDKPGDGGWFSSRESSHDTPILRELGPCRTWIQAETRHIIDSGPSEEREYDKNRRQRRWLLRHHAEASLDPDILREYLGEGNSRFSSREDIGSHSSFLALGELTDLSNLGGTSGAPLLVTVVGEGNNALRFSRLNQEETQWPKQPDAIVRLIGISNDEPALWAEDHTDPVHRIKCFVDLQRFNPTRWVAAQRDSGTTIFRTEYHKIPPVRGIGQAPSHISANPLFDVPKHVTGGNVHTDLAFNPPTRSNPAQLGIVDERGFWSVWDVLHPKARASGPTPRLKMCGHIELGVLDHLPDGSAAEMKWHKIVWVGSSEDELDMFKSLDLDADDEEPESSAAFPPLKRSSLLLVYNFFEARLFDLSTGSHLPDLAFTSVTSPDGIVDIQPDPENPEYYYVLTTLRLFVVRTVSKPGVTWDRPERSSSILYSTPHFRSFFDRSLRLIATRGVRSNQTISSLLFIHSSIYPWNDVFHVEISKQYPNRVRCQRNTTAFEELQNITLKNPMQTVNISPVGTAGNTALKLAGQRLMLYQITALTSNRSVVSTMCMSPGLPNHHIGMPRDKVVRSMSQKLNRRHILQDLTYRFVVPDDLTILEEKPLMKSTKTKALPGNGTPEPYQRFIKPFYDYLSEIVASRLDPQVAESSEGDTFGSNPFDAAHYYIEEALERGSLPLRNLNEVMPSFDEAAKHPGLSLDWSNEVERLDRAHPDISIVTFDLLRSSLCLSPDASFQEASSVLLDMIGSQVGADEADHVNQQHRAMIFGQMRYDLFLSLFGLGYRRPEMTEPELPNTATARQQSVASEAMTIDSQTETLPSSPARSQSPSTSSQRSISEAVEEEDPVMTSLRSYIGMGKFVSRKEFELLDKWQLGVPPSEYVFDIDRETDAGPMARTRAKQLARQDRKRRRAETLLKFSREPQLPNTQPLPETRFFSSQPRAAESQSQFQSDPVQAMSQPIAGAHGVRPQKKVKKRKGGF

SEQ ID NO: 38528 - DNA, 4522 bp, Muscodor strobelii; identical to SEQ ID NO: 38525
  misc_feature: SGI EST ID NO. CUFF.92657.0
  misc_feature: Variant of the nucleotide sequence at SEQ ID NO 38526

SEQ ID NO: 38529 - DNA, 780 bp, Muscodor strobelii
  misc_feature: SGI cDNA ID NO. 573391
  misc_feature: Encodes the peptide sequence at SEQ ID NO 38530
atgtcgaccacattctcgtcgtcgctctcctcgagccagcacggccgcccaactatgtcagcaagtgcgccaaacgtagcagatcaactgcccagtatcgacttcggattcgacgacctacgcgatcgcatggcgaaattcagcgccaagttcgacgctttcatcgagcaagggcgcaagcgcgtgctagaagagcgcaaccaattccgaatcaacgtcgcagagctacaagaggaccaacgcatgaagaaaaaagacatggaaatagtccaacacaagataaacacccaccaacaaacccgctccaaagaagacgccgaacgcgccgaaatggaagcctcgatcctgcaactgacaacccaacgcgacaccaatctcgcagcgcgggactcactgaaagcccagatcgcgtccacccaacgcgaaatcgacgcgaggctgaaagctcagcgggaatatgcccaaaggatcgagcagcagtctcggttcaatgtgcccgagctcgacttctgggttacgaacctgtgtctgaggattgagggcgcgggacaaaatgataggctcaagtttgtgtatacgcatatcgatgagagggattgggagagggaggcttggttcgaactctgtaccgagagtaaggattatgatgttaggcattgcagaccgaaacttgagagggagaaggtggagggcgtgctggagagggttaatgagagtagggagttgccggcgttgttgaagggtatgagggaactctttgttgaggctatgaagtcttga

SEQ ID NO: 38530 - protein, 259 aa, Muscodor strobelii
  misc_feature: SGI Peptide ID NO. 573391
  misc_feature (171)..(253): Pfam Id: PF08234 Pfam Desc: Kinetochore protein Spc25
  misc_feature (1)..(259): NCBI GI: 164424555 Blast Desc: NCU11159 [Neurospora crassa OR74A] gi|74619976|sp|Q873B7.1|SPC25_NEUCR RecName: Full= kinetochore protein spc-25 gi|28881351|emb|CAD70393.1| conserved [Neurospora
  misc_feature (1)..(259): NCBI GI: 110816427 Blast Desc: NCU11159 [Neurospora crassa OR74A] gi|74619976|sp|Q873B7.1|SPC25_NEUCR RecName: Full= kinetochore protein spc-25 gi|28881351|emb|CAD70393.1| conserved [Neurospora
  misc_feature (1)..(259): NCBI GI: 116199561 Blast Desc: CHGG_07936 [Chaetomium globosum CBS 148.51] gi|88179215|gb|EAQ86683.1| CHGG_07936 [Chaetomium globosum CBS 148.51]
  misc_feature (19)..(259): NCBI GI: 256730570 Blast Desc: [Nectria haematococca mpVI 77-13-4]
  misc_feature (1)..(259): NCBI GI: 46109312 Blast Desc: FG01538.1 [Gibberella zeae PH-1]
  misc_feature (9)..(259): NCBI GI: 154305474 Blast Desc: BC1G_08506 [Botryotinia fuckeliana B05.10] gi|150853293|gb|EDN28485.1| BC1G_08506 [Botryotinia fuckeliana B05.10]
  misc_feature (25)..(259): NCBI GI: 171689524 Blast Desc: protein product [Podospora anserina] gi|170944724|emb|CAP70835.1| protein product [Podospora anserina]
  misc_feature (17)..(259): NCBI GI: 156044210 Blast Desc: SS1G_10208 [Sclerotinia sclerotiorum 1980] gi|154694597|gb|EDN94335.1| SS1G_10208 [Sclerotinia sclerotiorum 1980]
  misc_feature (1)..(259): NCBI GI: 39946668 Blast Desc: MGG_08566 [Magnaporthe grisea 70-15] gi|145012423|gb|EDJ97079.1| MGG_08566 [Magnaporthe grisea 70-15]
  misc_feature (1)..(258): NCBI GI: 119184887 Blast Desc: CIMG_07194 [Coccidioides immitis RS] gi|240110016|gb|EER28185.1| CPC735_035210 [Coccidioides posadasii C735 delta SOWgp]
MSTTFSSSLSSSQHGRPTMSASAPNVADQLPSIDFGFDDLRDRMAKFSAKFDAFIEQGRKRVLEERNQFRINVAELQEDQRMKKKDMEIVQHKINTHQQTRSKEDAERAEMEASILQLTTQRDTNLAARDSLKAQIASTQREIDARLKAQREYAQRIEQQSRFNVPELDFWVTNLCLRIEGAGQNDRLKFVYTHIDERDWEREAWFELCTESKDYDVRHCRPKLEREKVEGVLERVNESRELPALLKGMRELFVEAMKS

SEQ ID NO: 38531 - DNA, 1174 bp, Muscodor strobelii
  misc_feature: SGI EST ID NO. CUFF.92641.0
  misc_feature: Variant of the nucleotide sequence at SEQ ID NO 38529
agctcgattggatttcatattgcgattcttcagcttttcagtcacaaacccccatttacaacaatcacaacgacgaacactttcgagccttaagagcgcgcattgcaatttcaattccttgcgaccatcgcgatacttgaaacaacacaatgtcgaccacattctcgtcgtcgctctcctcgagccagcacggccgcccaactatgtcagcaagtgcgccaaacgtagcagatcaactgcccagtatcgacttcggattcgacgacctacgcgatcgcatggcgaaattcagcgccaagttcgacgctttcatcgagcaagggcgcaagcgcgtgctagaagagcgcaaccaattccgaatcaacgtcgcagagctacaagaggaccaacgcatgaagaaaaaagacatggaaatagtccaacacaagataaacacccaccaacaaacccgctccaaagaagacgccgaacgcgccgaaatggaagcctcgatcctgcaactgacaacccaacgcgacaccaatctcgcagcgcgggactcactgaaagcccagatcgcgtccacccaacgcgaaatcgacgcgaggctgaaagctcagcgggaatatgcccaaaggatcgagcagcagtctcggttcaatgtgcccgagctcgacttctgggttacgaacctgtgtctgaggattgagggcgcgggacaaaatgataggctcaagtttgtgtatacgcatatcgatgagagggattgggagagggaggcttggttcgaactctgtaccgagagtaaggattatgatgttaggcattgcagaccgaaacttgagagggagaaggtggagggcgtgctggagagggttaatgagagtagggagttgccggcgttgttgaagggtatgagggaactctttgttgaggctatgaagtcttgatttgggagcagagtatgaatatggatatggatgtgaattggcatggggttgttcggcgcatggagttctgtacgaggcatggtggattgaacgcgatgactttgagatatacccaggcattctctattcttgcagtgcttcgcagcacatttacatatggatacttattccgtcgtggtgctgttgctacaacttagtcgtcatgaaaatacattcgatgccgagcatatcatgtcttgcgcgag

SEQ ID NO: 38532 - DNA, 237 bp, Muscodor strobelii
  misc_feature: SGI cDNA ID NO. 573392
  misc_feature: Encodes the peptide sequence at SEQ ID NO 38533
atgccaccaccaacagacaacgaaaaacaagcagcagcacaacaagccgtcgacatcctacacgagatctctacgatcctgaacacacatctcgaccgccgaacattatcggtctgtataagcatgatcgagaatggtgttaatcccgaggctttagccaatgtcgtccagttcctcaggaaagaggcgcagaaagtgaacttcgctaaggaggctgtggagagtaataagatgtga

SEQ ID NO: 38533 - protein, 78 aa, Muscodor strobelii
  misc_feature: SGI Peptide ID NO. 573392
  misc_feature (7)..(53): NCBI GI: 171689526 Blast Desc: protein product [Podospora anserina] gi|170944725|emb|CAP70836.1| protein product [Podospora anserina]
  misc_feature (3)..(65): NCBI GI: 119184751 Blast Desc: CIMG_07141 [Coccidioides immitis RS] gi|121754141|sp|Q1DRC2.1|U582_COCIM RecName: Full=UPF0582 protein CIMG_07141 gi|240109970|gb|EER28139.1| CPC735_034750 posadasii
  misc_feature (1)..(65): NCBI GI: 116199565 Blast Desc: [Chaetomium globosum CBS 148.51] gi|121780506|sp|Q2GVR6.1|U582_CHAGB RecName: Full=UPF0582 protein CHGG_07938 gi|88179217|gb|EAQ86685.1| [Chaetomium globosum CBS
  misc_feature (7)..(55): NCBI GI: 164424557 Blast Desc: NCU11158 [Neurospora crassa OR74A] gi|74619977|sp|Q873B8.1|YB160_NEUCR RecName: Full=Uncharacterized protein B24N11.060 gi|28881350|emb|CAD70392.1| [Neurospora crassa
  misc_feature (1)..(53): NCBI GI: 256730571 Blast Desc: NECHADRAFT_29629 [Nectria haematococca mpVI 77-13-4]
  misc_feature (1)..(53): NCBI GI: 46109310 Blast Desc: FG01537.1 [Gibberella zeae PH-1]
  misc_feature (7)..(63): NCBI GI: 225678283 Blast Desc: [Paracoccidioides brasiliensis Pb03]
  misc_feature (7)..(63): NCBI GI: 226290672 Blast Desc: [Paracoccidioides brasiliensis Pb18]
  misc_feature (1)..(63): NCBI GI: 67521808 Blast Desc: AN1361.2 [Aspergillus nidulans FGSC A4] gi|74598260|sp|Q5BDL9.1|U582_EMENI RecName: Full=UPF0582 protein AN1361 gi|40746388|gb|EAA65544.1| AN1361.2 [Aspergillus nidulans
  misc_feature (1)..(69): NCBI GI: 119496131 Blast Desc: NFIA_016380 [Neosartorya fischeri NRRL 181] gi|119413001|gb|EAW22942.1| conserved [Neosartorya fischeri NRRL 181]
MPPPTDNEKQAAAQQAVDILHEISTILNTHLDRRTLSVCISMIENGVNPEALANVVQFLRKEAQKVNFAKEAVESNKM

SEQ ID NO: 38534 - DNA, 3444 bp, Muscodor strobelii
  misc_feature: SGI EST ID NO. CUFF.92710.0
  misc_feature: Variant of the nucleotide sequence at SEQ ID NO 38532
aaaccacaacacctcagacatcgaccaacatcccaccactcgcaaaaccaatcaacaactacaaatcaaaatgccaccaccaacagacaacgaaaaacaagcagcagcacaacaagccgtcgacatcctacacgagatctctacgatcctgaacacacatctcgaccgccgaacattatcggtctgtataagcatgatcgagaatggtgttaatcccgaggctttagccaatgtcgtccagttcctcaggaaagaggcgcagaaagtgaacttcgctaaggaggctgtggagagtaataagatgtgagcttgttttgtgatgatgtggatgggtatgggatggaggatattgtcaaacctgacacggtcgcgagaggtatggcgttgggcgtcacggaagcatgatgcgggataccaaagtttcactttaccggaaaagagagcattggttaaaataattcaatattgcatatcctattcgtttgtctgccagcgagtgatccagcgatttctatttaccatcatgcacccatccgtgttcagactacccgcccataccacaggaaaagaccgaccgaatccaatgcgctcaatattgcctcctaacccaatgtcatggtatcttttcttctctcatgcttgctatgccacacctaacgccgtcccgatgtccatgcgatcccaaatgaaatctaggtgccaaccctatcgatgccccagcagttcaaattcgtcatcttccgactcgtctccgtcgtcttctagttcttcttcatctgtgctcatctcgtcgcctgattcttcttcgtcatcgttttttccgtcgttgcttgttatgctacgcggcacgcgactccagaatcctaggatatctccgtcttcgtcctcttcttctagatcgaaatagcctctaactgtcgattcatgtagagagtgtcctgggttaggcgtagggatgggtgatactgagcgtgcgagtcgatctggatctgggttgaaggagtttgggtctggtcgtgcgacgacggatgaatgacgccggcggatatcgacaccacctgggcctgtaagaccagcgacacctggtgccatggataaagtcattcctgacgtttgtgctagattactaccgctgctttcgatggcctcagagcctcgcccgatgacttgtagctgagctgtgttgtaggactggcatacgctacatttgagtccgagaaagtgatattgtgtggagctctttgccgaacaatcatgacataaaataatggcccgggtgtctctgtattctgggggcataggttgagaaaggatctccagctcgaatttccggaattgggactccatgttctcgacactcttgttgcagatgggacacttatacgaagatttgatatggtcttggtagcaagtcctgtggatgctgtgcccgcacttcatgaaaactactggtttaggcgaggtgaacatgtagtcgccacatattgggcagttgcaatctgtaactcgttcgatgcaccgatgagtatctcttgtggagatagcgatacatgcgctgcatttctgtcttgttgttagcagattgataggagccagtagtaggggatcatactttgcaatggtaaaagtctttcccaatcccatgtcctatcctgcaaataccacattcatcgcagtggtaggtgggtttgtcgggattgttttgccatagcttgcatatgtcgcagtagtatctggcggcgaatgcttcacagttcacacacgtctgaccggctttttgcgcagtgccgcaaaacatgcacagcatgttcctggtctccttggggatgagactatgattctccgccttgtcgtggcaaaagcgacaagtataccagcgacggcatattgagcactgtaactttacgttgcgccggtagtgttcgcatccaagcggtctgctatcttcatcgtggtccgccgtgtcatgcagaggatttgctgacgtttgtctaggaacataggtgggttcgagatccttactcgatacttcgaaatactcctcttccttattctcgcccagattttgccagaacctgagcaaatccaacgggccgagattttgcgacacacgccgttcgaaagatcgtgggctgggtaggggaaagacctgttcgacctgaaccgggactggaatgcttgatttggtgtaacgctctatcagcaattggtgcatcaagtgagctttcgcggtactgtcgatgtctctagactgtatgtcaagtatccgcttccgcaatgctcccattccgtcatcttccggtagctcgggtctccgcggggtgccgggcaaaacatcatcttctgggggtgatggtgttgccgtacgctcggcaggcaaagcgggtggttgtggtgctgtgatatcgagagagtcgagagcggttcgaagcgaggcggtggtttcggctacggccccgggcgtggtgccaggcgggattctgcatggttctggttgcatttcgtctgaatggggcagcggtttcgacggcggagagctccgggacgactgtcgcgaagacacactgtcttcaccatcgtcccgcaggtaggagtcctcttcggtttcggatatcacatcatcatgctccggcgtcctctggaggggagctgtgcggaggggagactcgggttcggaagggctggaggtgaaagatgagcgtgagagggaaaagcggcgggcttgtcggatgactgggttgaccaggaactcggcgacaagggacgtcattggcccccgatttttatgcgcgagagcagagctggaggtgtgtagacggtaggaatactaggtaggcactcggatatatagatgagatatgtaaatgagatacccgatctttaagtcacggaatcatgctttctagacgactgcaatcgtcggccggaacaaggcagtcataaacaatgctgtgaagggagacaataccaaagcactgggaagcgaggagatgatgatgagaccgaaacgaataggaaacgaaactttgagagcaactgattactaactgcctcacaagggcaactccgacttattgtagtgcaagccggtggcatacagaagtttaaatcgtgcaacgcatctagaagcaaagctcgtatgtcgagtaatgacagtcgtagcccatgagaccggagtagtaagtaggaagaacctcgagagaagcgcccaggctcgtcaggccagtcaggcgacagtgacatcaattcatttttctacttgcagtagcacgacgatggccgacgatgtaattcgcacgatccgatctggacgagcagaacggtctccgcgggcgtgctttaagtgctgttgctaaactactagttgctggctgagaggcggatggttcggtatgctattcgttgacatcggggcgaaatgtcagcggcttgcgatggttccgg

SEQ ID NO: 38535 - DNA, 2016 bp, Muscodor strobelii
  misc_feature: SGI cDNA ID NO. 573393
  misc_feature: Encodes the peptide sequence at SEQ ID NO 38536
atgacgtcccttgtcgccgagttcctggtcaacccagtcatccgacaagcccgccgcttttccctctcacgctcatctttcacctccagcccttccgaacccgagtctcccctccgcacagctcccctccagaggacgccggagcatgatgatgtgatatccgaaaccgaagaggactcctacctgcgggacgatggtgaagacagtgtgtcttcgcgacagtcgtcccggagctctccgccgtcgaaaccgctgccccattcagacgaaatgcaaccagaaccatgcagaatcccgcctggcaccacgcccggggccgtagccgaaaccaccgcctcgcttcgaaccgctctcgactctctcgatatcacagcaccacaaccacccgctttgcctgccgagcgtacggcaacaccatcacccccagaagatgatgttttgcccggcaccccgcggagacccgagctaccggaagatgacggaatgggagcattgcggaagcggatacttgacatacagtctagagacatcgacagtaccgcgaaagctcacttgatgcaccaattgctgatagagcgttacaccaaatcaagcattccagtcccggttcaggtcgaacaggtctttcccctacccagcccacgatctttcgaacggcgtgtgtcgcaaaatctcggcccgttggatttgctcaggttctggcaaaatctgggcgagaataaggaagaggagtatttcgaagtatcgagtaaggatctcgaacccacctatgttcctagacaaacgtcagcaaatcctctgcatgacacggcggaccacgatgaagatagcagaccgcttggatgcgaacactaccggcgcaacgtaaagttacagtgctcaatatgccgtcgctggtatacttgtcgcttttgccacgacaaggcggagaatcatagtctcatccccaaggagaccaggaacatgctgtgcatgttttgcggcactgcgcaaaaagccggtcagacgtgtgtgaactgtgaagcattcgccgccagatactactgcgacatatgcaagctatggcaaaacaatcccgacaaacccacctaccactgcgatgaatgtggtatttgcaggataggacatgggattgggaaagacttttaccattgcaaaaaatgcagcgcatgtatcgctatctccacaagagatactcatcggtgcatcgaacgagttacagattgcaactgcccaatatgtggcgactacatgttcacctcgcctaaaccagtagttttcatgaagtgcgggcacagcatccacaggacttgctaccaagaccatatcaaatcttcgtataagtgtcccatctgcaacaagagtgtcgagaacatggagtcccaattccggaaattcgagctggagatcctttctcaacctatgcccccagaatacagagacacccgggccattattttatgtcatgattgttcggcaaagagctccacacaatatcactttctcggactcaaatgtagcgtatgccagtcctacaacacagctcagctacaagtcatcgggcgaggctctgaggccatcgaaagcagcggtagtaatctagcacaaacgtcaggaatgactttatccatggcaccaggtgtcgctggtcttacaggcccaggtggtgtcgatatccgccggcgtcattcatccgtcgtcgcacgaccagacccaaactccttcaacccagatccagatcgactcgcacgctcagtatcacccatccctacgcctaacccaggacactctctacatgaatcgacagttagaggctatttcgatctagaagaagaggacgaagacggagatatcctaggattctggagtcgcgtgccgcgtagcataacaagcaacgacggaaaaaacgatgacgaagaagaatcaggcgacgagatgagcacagatgaagaagaactagaagacgacggagacgagtcggaagatgacgaatttgaactgctggggcatcgatag

SEQ ID NO: 38536 - protein, 671 aa, Muscodor strobelii
  misc_feature: SGI Peptide ID NO. 573393
  misc_feature (411)..(452): Pfam Id: PF00097 Pfam Desc: Zinc finger, C3HC4 type (RING finger)
  misc_feature (282)..(356): Pfam Id: PF05495 Pfam Desc: CHY zinc finger
  misc_feature (1)..(647): NCBI GI: 46109308 Blast Desc: FG01536.1 [Gibberella zeae PH-1]
  misc_feature (1)..(520): NCBI GI: 171689418 Blast Desc: protein product [Podospora anserina] gi|170944671|emb|CAP70782.1| protein product [Podospora anserina]
  misc_feature (1)..(546): NCBI GI: 28881349 Blast Desc: conserved [Neurospora crassa]
  misc_feature (1)..(652): NCBI GI: 238485089 Blast Desc: CHY and RING finger domain protein, [Aspergillus flavus NRRL3357] gi|220701833|gb|EED58171.1| CHY and RING finger domain protein, [Aspergillus flavus NRRL3357]
  misc_feature (238)..(640): NCBI GI: 261354480 Blast Desc: RING finger and CHY zinc finger domain-containing protein [Verticillium albo-atrum VaMs.102]
  misc_feature (1)..(657): NCBI GI: 145239023 Blast Desc: An08g00400 [Aspergillus niger] gi|134076661|emb|CAK45192.1| protein product [Aspergillus niger]
  misc_feature (1)..(529): NCBI GI: 212543265 Blast Desc: CHY and RING finger domain protein, [Penicillium marneffei ATCC 18224] gi|210066694|gb|EEA20787.1| CHY and RING finger domain protein, [Penicillium marneffei ATCC 18224]
  misc_feature (5)..(641): NCBI GI: 242786122 Blast Desc: CHY and RING finger domain protein, [Talaromyces stipitatus ATCC 10500] gi|218720888|gb|EED20307.1| CHY and RING finger domain protein, [Talaromyces stipitatus ATCC 10500]
  misc_feature (1)..(622): NCBI GI: 70994962 Blast Desc: CHY and RING finger domain protein [Aspergillus fumigatus Af293] gi|66849892|gb|EAL90219.1| CHY and RING finger domain protein, [Aspergillus fumigatus Af293] CHY and RING finger
  misc_feature (156)..(647): NCBI GI: 119496203 Blast Desc: NFIA_016740 [Neosartorya fischeri NRRL 181] gi|119413037|gb|EAW22978.1| [Neosartorya fischeri NRRL 181]
MTSLVAEFLVNPVIRQARRFSLSRSSFTSSPSEPESPLRTAPLQRTPEHDDVISETEEDSYLRDDGEDSVSSRQSSRSSPPSKPLPHSDEMQPEPCRIPPGTTPGAVAETTASLRTALDSLDITAPQPPALPAERTATPSPPEDDVLPGTPRRPELPEDDGMGALRKRILDIQSRDIDSTAKAHLMHQLLIERYTKSSIPVPVQVEQVFPLPSPRSFERRVSQNLGPLDLLRFWQNLGENKEEEYFEVSSKDLEPTYVPRQTSANPLHDTADHDEDSRPLGCEHYRRNVKLQCSICRRWYTCRFCHDKAENHSLIPKETRNMLCMFCGTAQKAGQTCVNCEAFAARYYCDICKLWQNNPDKPTYHCDECGICRIGHGIGKDFYHCKKCSACIAISTRDTHRCIERVTDCNCPICGDYMFTSPKPVVFMKCGHSIHRTCYQDHIKSSYKCPICNKSVENMESQFRKFELEILSQPMPPEYRDTRAIILCHDCSAKSSTQYHFLGLKCSVCQSYNTAQLQVIGRGSEAIESSGSNLAQTSGMTLSMAPGVAGLTGPGGVDIRRRHSSVVARPDPNSFNPDPDRLARSVSPIPTPNPGHSLHESTVRGYFDLEEEDEDGDILGFWSRVPRSITSNDGKNDDEEESGDEMSTDEEELEDDGDESEDDEFELLGHR

SEQ ID NO: 38537 - DNA, 3224 bp, Muscodor strobelii
  misc_feature: SGI EST ID NO. CUFF.92711.1
  misc_feature: Variant of the nucleotide sequence at SEQ ID NO 38535
gcaagccgctgacatttcgccccgatgtcaacgaatagcataccgaaccatccgcctctcagccagcaactagtagtttagcaacagcacttaaagcacgcccgcggagaccgttctgctcgtccagatcggatcgtgcgaattacatcgtcggccatcgtcgtgctactgcaagtagaaaaatgaattgatgtcactgtcgcctgactggcctgacgagcctgggcgcttctctcgaggttcttcctacttactactccggtctcatgggctacgactgtcattactcgacatacgagctttgcttctagatgcgttgcacgatttaaacttctgtatgccaccggcttgcactacaataagtcggagttgcccttgtgaggcagttagtaatcagttgctctcaaagtttcgtttcctattcgtttcggtctcatcatcatctcctcgcttcccagtgctttggtattgtctcccttcacagcattgtttatgactgccttgttccggccgacgattgcagtcgtctagaaagcatgattccgtgacttaaagatcgggtatctcatttacatatctcatctatatatccgagtgcctacctagtattcctaccgtctacacacctccagctctgctctcgcgcataaaaatcgggggccaatgacgtcccttgtcgccgagttcctggtcaacccagtcatccgacaagcccgccgcttttccctctcacgctcatctttcacctccagcccttccgaacccgagtctcccctccgcacagctcccctccagaggacgccggagcatgatgatgtgatatccgaaaccgaagaggactcctacctgcgggacgatggtgaagacagtgtgtcttcgcgacagtcgtcccggagctctccgccgtcgaaaccgctgccccattcagacgaaatgcaaccagaaccatgcagaatcccgcctggcaccacgcccggggccgtagccgaaaccaccgcctcgcttcgaaccgctctcgactctctcgatatcacagcaccacaaccacccgctttgcctgccgagcgtacggcaacaccatcacccccagaagatgatgttttgcccggcaccccgcggagacccgagctaccggaagatgacggaatgggagcattgcggaagcggatacttgacatacagtctagagacatcgacagtaccgcgaaagctcacttgatgcaccaattgctgatagagcgttacaccaaatcaagcattccagtcccggttcaggtcgaacaggtctttcccctacccagcccacgatctttcgaacggcgtgtgtcgcaaaatctcggcccgttggatttgctcaggttctggcaaaatctgggcgagaataaggaagaggagtatttcgaagtatcgagtaaggatctcgaacccacctatgttcctagacaaacgtcagcaaatcctctgcatgacacggcggaccacgatgaagatagcagaccgcttggatgcgaacactaccggcgcaacgtaaagttacagtgctcaatatgccgtcgctggtatacttgtcgcttttgccacgacaaggcggagaatcatagtctcatccccaaggagaccaggaacatgctgtgcatgttttgcggcactgcgcaaaaagccggtcagacgtgtgtgaactgtgaagcattcgccgccagatactactgcgacatatgcaagctatggcaaaacaatcccgacaaacccacctaccactgcgatgaatgtggtatttgcaggataggacatgggattgggaaagacttttaccattgcaaaaaatgcagcgcatgtatcgctatctccacaagagatactcatcggtgcatcgaacgagttacagattgcaactgcccaatatgtggcgactacatgttcacctcgcctaaaccagtagttttcatgaagtgcgggcacagcatccacaggacttgctaccaagaccatatcaaatcttcgtataagtgtcccatctgcaacaagagtgtcgagaacatggagtcccaattccggaaattcgagctggagatcctttctcaacctatgcccccagaatacagagacacccgggccattattttatgtcatgattgttcggcaaagagctccacacaatatcactttctcggactcaaatgtagcgtatgccagtcctacaacacagctcagctacaagtcatcgggcgaggctctgaggccatcgaaagcagcggtagtaatctagcacaaacgtcaggaatgactttatccatggcaccaggtgtcgctggtcttacaggcccaggtggtgtcgatatccgccggcgtcattcatccgtcgtcgcacgaccagacccaaactccttcaacccagatccagatcgactcgcacgctcagtatcacccatccctacgcctaacccaggacactctctacatgaatcgacagttagaggctatttcgatctagaagaagaggacgaagacggagatatcctaggattctggagtcgcgtgccgcgtagcataacaagcaacgacggaaaaaacgatgacgaagaagaatcaggcgacgagatgagcacagatgaagaagaactagaagacgacggagacgagtcggaagatgacgaatttgaactgctggggcatcgatagggttggcacctagatttcatttgggatcgcatggacatcgggacggcgttaggtgtggcatagcaagcatgagagaagaaaagataccatgacattgggttaggaggcaatattgagcgcattggattcggtcggtcttttcctgtggtatgggcgggtagtctgaacacggatgggtgcatgatggtaaatagaaatcgctggatcactcgctggcagacaaacgaataggatatgcaatattgaattattttaaccaatgctctcttttccggtaaagtgaaactttggtatcccgcatcatgcttccgtgacgcccaacgccatacctctcgcgaccgtgtcaggtttgacaatatcctccatcccatacccatccacatcatcacaaaacaagctcacatcttattactctccacagcctccttagcgaagttcactttctgcgcctctttcctgaggaactggacgacattctttgggcaacacgtcagtaattcaatgagcattgtctcctcctacacaagactcgaagtatcaggtga

SEQ ID NO: 38538 - DNA, 402 bp, Muscodor strobelii
  misc_feature: SGI cDNA ID NO. 573394
  misc_feature: Encodes the peptide sequence at SEQ ID NO 38539
atggccgaccaccaaaaaatcattcatgcctaccggcatatctaccgcggtctgcttcacgccgtccagttcgccaagcccgcccgctttattgctcagcagcaattacgcagagcttttactgagaaaggggccacatatgactaccgaagcatcgcgaggacatgtcgtttcttagacgcggccgctcaagagcgcggcctcgagcataaagtcctcaaaaatctgctcaggatcgccgccattcgctatcgccgagccgactacaagaccgaagtgattaaaaagaaggtgtacgacaagaagaaccctctagagaagcacttgatagacacgacctacgagcattatgataggaccatcgccatgctcaataaggatttaggcctgtgcttgcgataa

SEQ ID NO: 38539 - protein, 133 aa, Muscodor strobelii
  misc_feature: SGI Peptide ID NO. 573394
  misc_feature (4)..(80): Pfam Id: PF08575 Pfam Desc: Domain of function (DUF1763)
  misc_feature (1)..(133): NCBI GI: 46123255 Blast Desc: FG06005.1 [Gibberella zeae PH-1]
  misc_feature (5)..(133): NCBI GI: 261355137 Blast Desc: conserved [Verticillium albo-atrum VaMs.102]
  misc_feature (1)..(133): NCBI GI: 154305480 Blast Desc: BC1G_08509 [Botryotinia fuckeliana B05.10] gi|150853296|gb|EDN28488.1| BC1G_08509 [Botryotinia fuckeliana B05.10]
  misc_feature (1)..(133): NCBI GI: 256732548 Blast Desc: NECHADRAFT_102535 [Nectria haematococca mpVI 77-13-4]
  misc_feature (6)..(133): NCBI GI: 145606066 Blast Desc: MGG_11877 [Magnaporthe grisea 70-15] gi|145013796|gb|EDJ98437.1| MGG_11877 [Magnaporthe grisea 70-15]
  misc_feature (8)..(133): NCBI GI: 156044204 Blast Desc: SS1G_10205 [Sclerotinia sclerotiorum 1980] gi|154694594|gb|EDN94332.1| SS1G_10205 [Sclerotinia sclerotiorum 1980]
  misc_feature (3)..(132): NCBI GI: 189205993 Blast Desc: conserved [Pyrenophora tritici-repentis Pt-1C-BFP] gi|187975424|gb|EDU42050.1| conserved [Pyrenophora tritici-repentis Pt-1C-BFP]
  misc_feature (10)..(133): NCBI GI: 171689496 Blast Desc: protein product [Podospora anserina] gi|170944710|emb|CAP70821.1| protein product [Podospora anserina]
  misc_feature (7)..(133): NCBI GI: 226280435 Blast Desc: conserved [Paracoccidioides brasiliensis Pb01]
  misc_feature (7)..(133): NCBI GI: 226290720 Blast Desc: conserved [Paracoccidioides brasiliensis Pb18]
MADHQKIIHAYRHIYRGLLHAVQFAKPARFIAQQQLRRAFTEKGATYDYRSIARTCRFLDAAAQERGLEHKVLKNLLRIAAIRYRRADYKTEVIKKKVYDKKNPLEKHLIDTTYEHYDRTIAMLNKDLGLCLR

SEQ ID NO: 38540 - DNA, 5022 bp, Muscodor strobelii
  misc_feature: SGI EST ID NO. CUFF.92659.0
  misc_feature: Variant of the nucleotide sequence at SEQ ID NO 38538
gcgcaattcgtcggctttcaagcatcaaacttgtaagtcatctgaacaaacatcaaactttgtcgattaatctcgaagtaccctcgacggttgcgagtgtcgaatcaattgttgccttattgtcctttaactgaaaccggccgaagtcaagggcaaactcggatgaggcgaagcaaaacatttccggcagacagtcttctcgcatctaccctgtatgcatctaaggagaaacttgcaggttgatacatgtacaacgattttctactctaatttcggtcgctttgagcatcgtaaaagttgatctgcctatgcgatggccgaccaccaaaaaatcattcatgcctaccggcatatctaccgcggtctgcttcacgccgtccagttcgccaagcccgcccgctttattgctcagcagcaattacgcagagcttttactgagaaaggggccacatatgactaccgaagcatcgcgaggacatgtcgtttcttagacgcggccgctcaagagcgcggcctcgagcataaagtcctcaaaaatctgctcaggatcgccgccattcgctatcgccgagccgactacaagaccgaagtgattaaaaagaaggtgtacgacaagaagaaccctctagagaagcacttgatagacacgacctacgagcattatgataggaccatcgccatgctcaataaggatttaggcctgtgcttgcgataaaatagctttcaacctgaggttcttgggttatcggcatccttcgcagtggcacgacacgtgcccaataatgtgctcggtgccatgcgccaggacaggtctggacccgcgaagctgttcccgcgtcgcgaggactgttagcagtggtgcaggagctccatgcctactgtactggcacgaggatgttggacaaatcgggttgacgacagcccctccagatgaaacctgcgcgtcgattgcacggaatgtaacagcaagggctttaaacaagtgccggggcacctcgcaagtaacagcccatttctgcgtatgatggccggcctatgaaaacagaggcacttcatctatccaatgcgacacagcaagcggtgtaacaaccactacccatcttctcactggtagcgaataagtaccacacctaaaacgatatagatcacgaacccactcaagatatttgacaccattgcttaatatgtctatcttcggcatcgggcagcgacattatcatgagttttcagtctatctcagattcatctatataggcaccttgagacgggccaagagcctatgatgtgacaggagactgttcgcgatgcactgcatgtataatgcggtgtaagggacggggtagggataagaatgacgtcggccgacatgagcgaacatcatatgcatgcttgtcactgtcaaccatcgcaactccattgcatctttcattgcttcccgatgtgatattttaccactattcacacgcatgtaaataatataggacatatgctcacaagtgccacattcggccgattcttaggtaaatatgagcgactgattagctaaagattcagctggtgaagtcggcacgcatgtcgtgtcgggacttgctcctgtatgtacacagctttcatcccatcctatcaaaggccggcgaaaatgtggggagctggagatagccgtggttccccaccgtttcccgttggctgcgcccgctagcattggctactccaagcgatgatgactgcgtgccatccatgatccatgttgctgtgatagtcgatagctcatactgtagctcggccatttcgaccacagagctccccatgtcactttgcatgctaatgagtaggtaatgctaatgaggccgtcattgcatgagaccagtgatgtaagagcagtgctagtagtacgatatcacttcgccgtctcgtcttgtattcccatgctgtgacctgtctgtcctttgggccctgacgagtctttgttccatcggcgactgtccgactgaggttaaaacgactcaaccccgcaaaaagcgccccgacaacagcccacgcccgaccccgcagaaaggacgtcctgctggagcagataccctgacatttgaaagaagagggttgaagtagaagatcatcctctgagatcgtcttgcgaacctgcggcagcgtgctggctatttgaatgaaccaaattaaatgggccaatccctccctgctctccaattcgcacgacctgcacagcttccactctcgactcgttggccgagctagggcagactgcagacgcaggacacacaagtaaactccagccatacagccatctccaacgataaggccactcggcacactagatactctggcgtcttttggtcgacttggctctccctctcgagtagtccaatagtctcatccctgaactgctcgagcttcaaactgtctgagcccaccctcaaccccgcaaaacacccactcaagctctacctcgtacatcttgtcattattctgccaccgactcctcagccactctttcactccttccccaacccaacctaacccacaccaaatactcccatcgagtcctcgcagtctgggatcttgatggcacttgccctgttagcaaccgacgcatttgtatcgcgaccacgccgatgactctggccctcttcgcgaggccattgtctgaagctcatcgcgctgtacacgcctgctgaacgcgagagccatgcccgccgagtccagtctccaagatgtcaccgctgccccgacgcttcggactcgcatcatgccgcaacagcaatctaattccaccgccagcaacagcactagcaccagcactagctctagctctatcaacaccaaagacaaggaggagccgcatcgatgggtgaagcgctaccgcaccgaggtctcggcctcttctgcgagcgtcttgtcgaccatcaccgccttcccgctcgacagcgtcaagactcgcatgcaaacctatccttataatggggctctgcactgcgtgacttcgacctaccaatctgagggacttcgagggttctttcgaggtgtaactgctccccttgctagcgtcacacttgttcgtacagtttctttctcgatataccaacgatcgaaatacgtctactccgactggatggcaaagaatgtcgggttttgccctctcgaccatgtcaacgtcaacggcgcctaccccaaccttggcacattggcatgctttggagctgctggagccactgcgggctctggcatcaccttcattgcctgtccatttgaattaaccaagctcagtgcacaagtttcggttcttatggcgaatcaaaagaatgtagacccacagaagaaggccattgctatgagttatcacaacaagggaacaattcagactctacgcaatattgtgaaacacagaggtttcgctgggatgtacaccgggctgaatttgcatctgctgagagatactctaggaacgggaatttacttcgccacgtacgagagtagcaagcagctcttaactacattcagcggtacagatgctcacaagaatccactcgctgttttggcggctggaggtctttgtggtatcgtttcctgggcactcatctaccccatcgattcggtgaaaagcatttaccaacgcaacgccctgatgtactcgcgtggtcaaaaagtccccatccccaaaatccaattcttccgacgggatatgtaccgtggcctcggcgtctccatggggcgttcggctgcggttaacgccgtgtttttctctacgtttgagttcctcaagaaaaggatcaacgcactgaaggacacgccttgagcaagatcaaatggatattgacgtgggaacttcagcaacacttacacaggatgggtgaatctgtatacgctcaaatggatggcattgcatgacacggcgttttctttatacatggattaagggaagctaatttggggcttcccatatacgacgcgccaccgcgccaccgcccctagaatggggagaagggaaggaccatttgtatggccatgggaggaacgtgatgatgcctgccagcgaagaagtttttcaaaggggttcatattcatccagacggatgagaacatggagatatatcccgtatacgcacgagacgacaaacagaactgagaaccgaataccacacaggacaacacaacttgtacctacgtaaccgaatgaaacacaggggtgatgcagatttgaatgcaaacttctcatgaacaaaccgattgaatggccattttgattgaatgtcgttatatgcccagatcttatttaggggcttaatagagggtagtatcagttgcgacgacattatcatctcacatgttgacacaaaccttagagagttgatttggctcagtatgcctattgcgtaattctgccttcgcgaacagggcagaatgctacctatagaggggtatccatctggggtcagagtggccttagacttactatacttattcaagcctttgactgctggcccatcgggcatatcgcaatacgtgggatttatggctttggacatttagctttaaatcgtgtgaatcgaacggctctgtcaaggcgaaacacgatatctacctatagaatggtcggcgaagaaagaatgaagcgaggaatgacgtgttgccgtgtcgaggaggaaggagcgatatggtcgcgatcgtagcttatggaagtctctactcgaaaatttattacggcgagtgtcactgaaatttgtacgcgatgaccttaattggccactgccacaccctatggacaggtgctatacctctgtctagaaaggggcacccctcggataggtaccttatgttgatgcaacggtacagccctgcccaccagaggctgaggaatcctgggaggcaaacacatatcttgagggccgcatcaggctcttgctatctcaagaattccaatatttcctctaatcttatcagcagtcatctaacaaatggagcctcttagtgttatcgcatccgtggcaggtcttctcaaggccgcga

SEQ ID NO: 38541 - DNA, 1107 bp, Muscodor strobelii
  misc_feature: SGI cDNA ID NO. 573395
  misc_feature: Elevated expression when VOC is produced
  misc_feature: Encodes the peptide sequence at SEQ ID NO 38542
atgcccgccgagtccagtctccaagatgtcaccgctgccccgacgcttcggactcgcatcatgccgcaacagcaatctaattccaccgccagcaacagcactagcaccagcactagctctagctctatcaacaccaaagacaaggaggagccgcatcgatgggtgaagcgctaccgcaccgaggtctcggcctcttctgcgagcgtcttgtcgaccatcaccgccttcccgctcgacagcgtcaagactcgcatgcaaacctatccttataatggggctctgcactgcgtgacttcgacctaccaatctgagggacttcgagggttctttcgaggtgtaactgctccccttgctagcgtcacacttgttcgtacagtttctttctcgatataccaacgatcgaaatacgtctactccgactggatggcaaagaatgtcgggttttgccctctcgaccatgtcaacgtcaacggcgcctaccccaaccttggcacattggcatgctttggagctgctggagccactgcgggctctggcatcaccttcattgcctgtccatttgaattaaccaagctcagtgcacaagtttcggttcttatggcgaatcaaaagaatgtagacccacagaagaaggccattgctatgagttatcacaacaagggaacaattcagactctacgcaatattgtgaaacacagaggtttcgctgggatgtacaccgggctgaatttgcatctgctgagagatactctaggaacgggaatttacttcgccacgtacgagagtagcaagcagctcttaactacattcagcggtacagatgctcacaagaatccactcgctgttttggcggctggaggtctttgtggtatcgtttcctgggcactcatctaccccatcgattcggtgaaaagcatttaccaacgcaacgccctgatgtactcgcgtggtcaaaaagtccccatccccaaaatccaattcttccgacgggatatgtaccgtggcctcggcgtctccatggggcgttcggctgcggttaacgccgtgtttttctctacgtttgagttcctcaagaaaaggatcaacgcactgaaggacacgccttga

SEQ ID NO: 38542 - protein, 368 aa, Muscodor strobelii
  misc_feature: SGI Peptide ID NO. 573395
  misc_feature (61)..(142): Pfam Id: PF00153 Pfam Desc: Mitochondrial carrier protein
  misc_feature (165)..(271): Pfam Id: PF00153 Pfam Desc: Mitochondrial carrier protein
  misc_feature (278)..(365): Pfam Id: PF00153 Pfam Desc: Mitochondrial carrier protein
  misc_feature (62)..(142): Pfam Id: PF00153 Pfam Desc: Mitochondrial carrier protein
  misc_feature (278)..(315): Pfam Id: PF00153 Pfam Desc: Mitochondrial carrier protein
  misc_feature (333)..(365): Pfam Id: PF00153 Pfam Desc: Mitochondrial carrier protein
  misc_feature (52)..(366): NCBI GI: 171689494 Blast Desc: protein product [Podospora anserina] gi|170944709|emb|CAP70820.1| protein product [Podospora anserina]
  misc_feature (52)..(366): NCBI GI: 116199477 Blast Desc: CHGG_07894 [Chaetomium globosum CBS 148.51] gi|88179173|gb|EAQ86641.1| CHGG_07894 [Chaetomium globosum CBS 148.51]
  misc_feature (52)..(364): NCBI GI: 46138627 Blast Desc: FG10828.1 [Gibberella zeae PH-1]
  misc_feature (52)..(366): NCBI GI: 85080137 Blast Desc: NCU01810 [Neurospora crassa OR74A] gi|28881107|emb|CAD70505.1| related to CARNITINE/ACYLCARNITINE TRANSLOCASE [Neurospora crassa] gi|28917554|gb|EAA27252.1| crassa
  misc_feature (53)..(366): NCBI GI: 156044202 Blast Desc: SS1G_10204 [Sclerotinia sclerotiorum 1980] gi|154694593|gb|EDN94331.1| SS1G_10204 [Sclerotinia sclerotiorum 1980]
  misc_feature (49)..(366): NCBI GI: 261355138 Blast Desc: mitochondrial carrier protein [Verticillium albo-atrum VaMs.102]
  misc_feature (53)..(366): NCBI GI: 154305482 Blast Desc: BC1G_08510 [Botryotinia fuckeliana B05.10] gi|150853297|gb|EDN28489.1| BC1G_08510 [Botryotinia fuckeliana B05.10]
  misc_feature (53)..(366): NCBI GI: 145606068 Blast Desc: MGG_11878 [Magnaporthe grisea 70-15] gi|145013797|gb|EDJ98438.1| MGG_11878 [Magnaporthe grisea 70-15]
  misc_feature (52)..(366): NCBI GI: 256728926 Blast Desc: NECHADRAFT_40149 [Nectria haematococca mpVI 77-13-4]
  misc_feature (49)..(364): NCBI GI: 189196330 Blast Desc: conserved [Pyrenophora tritici-repentis Pt-1C-BFP] gi|187980382|gb|EDU47008.1| conserved [Pyrenophora tritici-repentis Pt-1C-BFP]
  misc_feature: Useful for introducing or modulating the production of volatile compounds
MPAESSLQDVTAAPTLRTRIMPQQQSNSTASNSTSTSTSSSSINTKDKEEPHRWVKRYRTEVSASSASVLSTITAFPLDSVKTRMQTYPYNGALHCVTSTYQSEGLRGFFRGVTAPLASVTLVRTVSFSIYQRSKYVYSDWMAKNVGFCPLDHVNVNGAYPNLGTLACFGAAGATAGSGITFIACPFELTKLSAQVSVLMANQKNVDPQKKAIAMSYHNKGTIQTLRNIVKHRGFAGMYTGLNLHLLRDTLGTGIYFATYESSKQLLTTFSGTDAHKNPLAVLAAGGLCGIVSWALIYPIDSVKSIYQRNALMYSRGQKVPIPKIQFFRRDMYRGLGVSMGRSAAVNAVFFSTFEFLKKRINALKDTP

SEQ ID NO: 38543 - DNA, 5022 bp, Muscodor strobelii; identical to SEQ ID NO: 38540
  misc_feature: SGI EST ID NO. CUFF.92659.0
  misc_feature: Variant of the nucleotide sequence at SEQ ID NO 38541

SEQ ID NO: 38544 - DNA, 990 bp, Muscodor strobelii
  misc_feature: SGI cDNA ID NO. 573396
  misc_feature: Encodes the peptide sequence at SEQ ID NO 38545
atggcacgcaagactcagtaccagcttcctgacaatgccaatacgcagcagattgccgagcccctgtttctcttgaattggctcaagcgagagactgagcgccattataagctcttccgagacgccctcaacgagtcctgcgcacttctcgacgagattcagttcaggatcaagatcaacgctgccgtagccgtcggacatcagggtcggatccggatcgcagttcttaaggagtgtcgcaaggaaatccaacgcgacatcgacttggacaaggcagacctctttgattacttcctcgacaaccagtacctcctcgacgccctgcacgaccacaccaggaacgagcacgccatgttccccacagtcaacaacaagaacaggaagacccgcatcggccgccatgccaccaccagctcccagctgcgacagtacgccgaggccaccctgggcggaggcagcctccgcaagatcgtgaagctgcccgacggagaggacctgaatgagtggctcgccgtcaacatggtcgatctctacaaccaggtcaatctgctctacggcgccatcaccgagttctgctcccccggctcctgccccgagatgaaggccaccgacgagttcgagtacctctggcaagacaacgacaagttcaagaaaccgaccaagatgtcggcccccgagtacgtcgagcacctcatgtcctgggtccagggctacatcgacgacgagaccatgatgccctcccgcatcggcgtccccttccccaagtccttcccccagaccgtgcgcaccatcttcaagcgcatgtaccgcgtctacgcccatatctactgccaccactacgctgccatccgccagcttggccttgagccgcacctcaacacaagcttcaagcagtatgtgctcttcgtcgacgagcattccttggcctctggcaaggactactggggacccctcggcgatcttgttgagagtatgctgcgcagcgagtag

SEQ ID NO: 38545 - protein, 329 aa, Muscodor strobelii
  misc_feature: SGI Peptide ID NO. 573396
  misc_feature (142)..(318): Pfam Id: PF03637 Pfam Desc: Mob1/phocein family
  misc_feature (117)..(329): NCBI GI: 145608394 Blast Desc: conserved [Magnaporthe grisea 70-15] gi|145015871|gb|EDK00361.1| conserved [Magnaporthe grisea 70-15]
  misc_feature (121)..(329): NCBI GI: 116204661 Blast Desc: conserved [Chaetomium globosum CBS 148.51] gi|88176342|gb|EAQ83810.1| conserved [Chaetomium globosum CBS 148.51]
  misc_feature (62)..(329): NCBI GI: 46105346 Blast Desc: FG00301.1 [Gibberella zeae PH-1]
  misc_feature (121)..(329): NCBI GI: 213514576 Blast Desc: maintenance of ploidy protein mob1 [Salmo salar] gi|209732760|gb|ACI67249.1| maintenance of ploidy protein mob1 [Salmo salar]
  misc_feature (121)..(329): NCBI GI: 164428052 Blast Desc: maintenance of ploidy protein mob1 [Neurospora crassa OR74A] gi|26396742|sp|Q9P601.2|MOB1_NEUCR RecName: Full= maintenance of ploidy protein mob1 gi|16416019|emb|CAB91369.2| of
  misc_feature (124)..(329): NCBI GI: 11359589 Blast Desc: maintenance of ploidy protein mob1 [Neurospora crassa OR74A] gi|26396742|sp|Q9P601.2|MOB1_NEUCR RecName: Full= maintenance of ploidy protein mob1 gi|16416019|emb|CAB91369.2| of
  misc_feature (121)..(329): NCBI GI: 171689346 Blast Desc: protein product [Podospora anserina] gi|170944635|emb|CAP70746.1| protein product [Podospora anserina]
  misc_feature (117)..(329): NCBI GI: 119190339 Blast Desc: conserved [Coccidioides immitis RS] gi|240107198|gb|EER25383.1| maintenance of ploidy protein mob1, [Coccidioides posadasii C735 delta SOWgp]
  misc_feature (102)..(329): NCBI GI: 119481331 Blast Desc: protein kinase regulator (Mob1), [Neosartorya fischeri NRRL 181] gi|119408848|gb|EAW18797.1| protein kinase regulator (Mob1), [Neosartorya fischeri NRRL 181]
  misc_feature (102)..(329): NCBI GI: 71001780 Blast Desc: protein kinase regulator (Mob1) [Aspergillus fumigatus Af293] gi|66853209|gb|EAL93533.1| protein kinase regulator (Mob1), [Aspergillus fumigatus Af293] gi|159129631|gb|EDP54745.1|
MARKTQYQLPDNANTQQIAEPLFLLNWLKRETERHYKLFRDALNESCALLDEIQFRIKINAAVAVGHQGRIRIAVLKECRKEIQRDIDLDKADLFDYFLDNQYLLDALHDHTRNEHAMFPTVNNKNRKTRIGRHATTSSQLRQYAEATLGGGSLRKIVKLPDGEDLNEWLAVNMVDLYNQVNLLYGAITEFCSPGSCPEMKATDEFEYLWQDNDKFKKPTKMSAPEYVEHLMSWVQGYIDDETMMPSRIGVPFPKSFPQTVRTIFKRMYRVYAHIYCHHYAAIRQLGLEPHLNTSFKQYVLFVDEHSLASGKDYWGPLGDLVESMLRSE

SEQ ID NO: 38546 - DNA, 1499 bp, Muscodor strobelii
  misc_feature: SGI EST ID NO. CUFF.92693.1
  misc_feature: Variant of the nucleotide sequence at SEQ ID NO 38544
cacgcagggccctctgtcggtccaagctcccagcaaacatactagacctcaacaccacaaatcgctccgtgcttcgctcactgccgcttttgtcaagcttcaattctaggggcgctttgccgaaacagtttagtatttaaatcagccctccatattgccgagcccctgtttctcttgaattggctcaagcgagagactgagcgccattataagctcttccgagacgccctcaacgagtcctgcgcacttctcgacgagattcagttcaggatcaagatcaacgctgccgtagccgtcggacatcagggtcggatccggatcgcagttcttaaggagtgtcgcaaggaaatccaacgcgacatcgacttggacaaggcagacctctttgattacttcctcgacaaccagtacctcctcgacgccctgcacgaccacaccaggaacgagcacgccatgttccccacagtcaacaacaagaacaggaagacccgcatcggccgccatgccaccaccagctcccagctgcgacagtacgccgaggccaccctgggcggaggcagcctccgcaagatcgtgaagctgcccgacggagaggacctgaatgagtggctcgccgtcaacatggtcgatctctacaaccaggtcaatctgctctacggcgccatcaccgagttctgctcccccggctcctgccccgagatgaaggccaccgacgagttcgagtacctctggcaagacaacgacaagttcaagaaaccgaccaagatgtcggcccccgagtacgtcgagcacctcatgtcctgggtccagggctacatcgacgacgagaccatgatgccctcccgcatcggcgtccccttccccaagtccttcccccagaccgtgcgcaccatcttcaagcgcatgtaccgcgtctacgcccatatctactgccaccactacgctgccatccgccagcttggccttgagccgcacctcaacacaagcttcaagcagtatgtgctcttcgtcgacgagcattccttggcctctggcaaggactactggggacccctcggcgatcttgttgagagtatgctgcgcagcgagtagactagctcatgagcatgggatccggcgtttttgcgtgtttggagggccttggtttcacttcttttcggttcgggtttcggtatgaggttttgccttggtcaggatctgagggcttgcatgacgtggcatggtatggcttcttggccacgagaactagggatatgagatatgaaaatccggagttgtggtggcgtctgtggcgttgggagacggatacaggtttacggctcaagggtatggacattgcattgcgtcgcggtcttcgacactttggtggagaattgagtgtatactaggactacagcaatgatgtgggcatactgtgcctgccttaattaagagaatcgttctacgcgtcttctcttttctttcctaaatttcgtgcacgtttgcaatataagtttcca

SEQ ID NO: 38547 - DNA, 2112 bp, Muscodor strobelii
  misc_feature: SGI cDNA ID NO. 573397
  misc_feature: Encodes the peptide sequence at SEQ ID NO 38548
atgcgacacttgtgcgcaacgctatggctcctggcagtcgagtcagtagctgcgaatagtactccaattgatagaaaacgagtcattcagtctttcaatcctcgccgaaatgcaagctcggatacaaccccgttgcaagttgggaatggaaatttcgcgtttggggtagatatcacggggttgcagacctttaatccatttgcgattatgtcgacgtggggatggcataatttcagcttgcctactacgcctggtcagacggagacttctgactttgttggtctagactggtggacacacggtcgtctcgtaaattataaccagccgaaccctgcacaacccgatatctcgaattggcttatacagaatccgcaaagactgaatcttgcgagacttggtttcttgtttgatgggagtgagacgactgaagatgcattacaggacaagaaccaggagttggatctttggttcgggaacatttcgtcttcgttcacgcacaatggaacgtctgtctatgtcgaaaattgggcggatgcggactcggactctgttgggatatcgatcaagtccgaactactcgcgacgaagagtttagggatttttgtcgatttccctctgccgacaaggaataagttcgatgcgcctttcgttggagtatttaacgcaacaagcaatcatacgacgaagctgagctctgaagagcagtctgctattatacagcataatctcgataaaacgacttattacgtgtcgatagaatgggatgcgaaggcggaaatatcaggacctgcgacagggactcatcgatatttgttacagccatcaggagacagtaatgagatcacattgacagtgggattctcgccaaagcctgattttgagaatccgagcttcgaagacatcaagacagcatctacgagactgtgggagtcatactggaacgatggcgcattcgtggacttaactgcaacggactcggcgaatgccacagaattgcaaagacggattatcctgtctcagtatctggcacttgtaaatcaggcttcatctcttcctccgcaagaatctggtctcgtaaataatggctggtatggaaaatttcaccttgaaatggtagtctggcatctcgcccacttcgcccggtggtctcgcttccctctcctctctcgctccatcccccaaacttacacctcattcctcccctcgtctctcctccgcgcccaggcacaaggctacgccggcgcgcgatggggcaaaatgagcgatccgaccggtagatcagcaccaggcgagataaactcgttactaatctggcaacaaccgcacgccatgtacttcgcagagctcgaatatcgatctttcccgaatcccgacactctatcgaaatggggcgagatcctggagcatacggcggatttcatggcgagttacgcatggtggaacgaaagcacaggagtctacgatctaggtccaccgatgtacgacgcaggcgagaacacgaacccgaacgttacgatcaacccagcgttcgaacttgcgtattggagattcggactggacattgctatagagtggaaagaaagacagaacttgagtgtttccgaggactgggtaaaagtaagggatagtctcgcaccgctaccaactgcagatggtgcgtttgcggtgtatgaggggattccgaatatgtgggaggtgaactcgacgacggtccaggatcatcctgcgatgtctgctatatatggattattaccgccgcctaagagtggaccggagttggatatggatgttgtgagagagacggcggtgaagattagggagaggtgggatctggaagatagctatgggtgggattttcccatggttgctatgaatgtgctgaggctgggggacagtgagcaagcggttaggtatttgttggatccgctgtttgagtttgatgatgcgggttatcctgagggtggcacgagggtcccgacgccgtacttcccggctagtagctcgttcctgctcgccattgctatgatggctgggggttgggacggggagcctgggccgcattttcctgaggggtgggatgtcaaagttgaaggattcgtgccgggattgtag

SEQ ID NO: 38548 - protein, 703 aa, Muscodor strobelii
  misc_feature: SGI Peptide ID NO. 573397
  misc_feature (4)..(703): NCBI GI: 154303834 Blast Desc: BC1G_08801 [Botryotinia fuckeliana B05.10] gi|150854385|gb|EDN29577.1| BC1G_08801 [Botryotinia fuckeliana B05.10]
  misc_feature (25)..(703): NCBI GI: 116204659 Blast Desc: CHGG_10213 [Chaetomium globosum CBS 148.51] gi|88176341|gb|EAQ83809.1| CHGG_10213 [Chaetomium globosum CBS 148.51]
  misc_feature (3)..(703): NCBI GI: 171689344 Blast Desc: protein product [Podospora anserina] gi|170944634|emb|CAP70745.1| protein product [Podospora anserina]
  misc_feature (4)..(703): NCBI GI: 70984006 Blast Desc: conserved [Aspergillus fumigatus Af293] gi|66845154|gb|EAL85490.1| conserved [Aspergillus fumigatus Af293] gi|159123493|gb|EDP48612.1| conserved [Aspergillus A1163]
  misc_feature (4)..(703): NCBI GI: 119485861 Blast Desc: NFIA_100130 [Neosartorya fischeri NRRL 181] gi|119410429|gb|EAW20376.1| conserved [Neosartorya fischeri NRRL 181]
  misc_feature (70)..(703): NCBI GI: 156040746 Blast Desc: SS1G_11351 [Sclerotinia sclerotiorum 1980] gi|154695735|gb|EDN95473.1| SS1G_11351 [Sclerotinia sclerotiorum 1980]
  misc_feature (45)..(703): NCBI GI: 238502821 Blast Desc: conserved [Aspergillus flavus NRRL3357] gi|220691454|gb|EED47802.1| conserved [Aspergillus flavus NRRL3357]
  misc_feature (47)..(699): NCBI GI: 169776127 Blast Desc: [Aspergillus oryzae RIB40] gi|83771265|dbj|BAE61397.1| protein product [Aspergillus oryzae]
  misc_feature (25)..(601): NCBI GI: 67525103 Blast Desc: AN3009.2 [Aspergillus nidulans FGSC A4] gi|40744404|gb|EAA63580.1| [Aspergillus nidulans FGSC A4] gi|259486044|tpe|CBF83573.1| TPA: conserved [Aspergillus nidulans
  misc_feature (10)..(492): NCBI GI: 261358620 Blast Desc: conserved [Verticillium albo-atrum VaMs.102]
MRHLCATLWLLAVESVAANSTPIDRKRVIQSFNPRRNASSDTTPLQVGNGNFAFGVDITGLQTFNPFAIMSTWGWHNFSLPTTPGQTETSDFVGLDWWTHGRLVNYNQPNPAQPDISNWLIQNPQRLNLARLGFLFDGSETTEDALQDKNQELDLWFGNISSSFTHNGTSVYVENWADADSDSVGISIKSELLATKSLGIFVDFPLPTRNKFDAPFVGVFNATSNHTTKLSSEEQSAIIQHNLDKTTYYVSIEWDAKAEISGPATGTHRYLLQPSGDSNEITLTVGFSPKPDFENPSFEDIKTASTRLWESYWNDGAFVDLTATDSANATELQRRIILSQYLALVNQASSLPPQESGLVNNGWYGKFHLEMVVWHLAHFARWSRFPLLSRSIPQTYTSFLPSSLLRAQAQGYAGARWGKMSDPTGRSAPGEINSLLIWQQPHAMYFAELEYRSFPNPDTLSKWGEILEHTADFMASYAWWNESTGVYDLGPPMYDAGENTNPNVTINPAFELAYWRFGLDIAIEWKERQNLSVSEDWVKVRDSLAPLPTADGAFAVYEGIPNMWEVNSTTVQDHPAMSAIYGLLPPPKSGPELDMDVVRETAVKIRERWDLEDSYGWDFPMVAMNVLRLGDSEQAVRYLLDPLFEFDDAGYPEGGTRVPTPYFPASSSFLLAIAMMAGGWDGEPGPHFPEGWDVKVEGFVPGL

SEQ ID NO: 38549 - DNA, 422 bp, Muscodor strobelii
  misc_feature: SGI EST ID NO. CUFF.92662.0
  misc_feature: Variant of the nucleotide sequence at SEQ ID NO 38547
ctggtatggaaaatttcaccttgaaatggtagtctggcatctcgcccacttcgcccggtggtctcgcttccctctcctctctcgctccatcccccaaacttacacctcattcctcccctcgtctctcctccgcgcccaggcacaaggctacgccggcgcgcgatggggcaaaatgagcgatccgaccggtagatcagcaccaggcgagataaactcgttactaatctggcaacaaccgcacgccatgtacttcgcagagctcgaatatcgatctttcccgaatcccgacactctatcgaaatggggcgagatcctggagcatacggcggatttcatggcgagttacgcatggtggaacgaaagcacaggagtctacgatctaggtccaccgatgtacgacgcaggcgagaacacgaacccga

SEQ ID NO: 38550 - DNA, 543 bp, Muscodor strobelii
  misc_feature: SGI cDNA ID NO. 573398
  misc_feature: Encodes the peptide sequence at SEQ ID NO 38551
atggagaacctgaacatacatggcgctccgcctcccggcggcccccagcagggccagccgggaggtatgatgaatccccagggccctcctcagcagcagcaactcgtcccgcaaatgttcaccacagccgcccagctgatggacctcactgacaagaagcttctacttgtcctcagggacggtaggaagttgactggcattctgcgcacctgggatcaatttgcgaacctagtcctagaggctacctcagagcgcatctttgccgtgacttctcatcctaaagatccccagcctaaggggttctatgccgacgaatatcatggcatcttccttgtccgtggagaaaatgtactgattctcggcgaaatcgacctcgacaaggacgacgacccaccagctggatatgagaaggcagagctcgcagtggtgcagaaactagccaaggagagaaaagaagcggacaaggcccgcgagaagaacaggctcaagaagctggggacgcacgggttcgaaggcgagaatgcgggcgagatactcctctaa

SEQ ID NO: 38551 - protein, 180 aa, Muscodor strobelii
  misc_feature: SGI Peptide ID NO. 573398
  misc_feature (44)..(122): Pfam Id: PF01423 Pfam Desc: LSM domain
  misc_feature (11)..(180): NCBI GI: 154291173 Blast Desc: BC1G_15358 [Botryotinia fuckeliana B05.10] gi|150847074|gb|EDN22267.1| BC1G_15358 [Botryotinia fuckeliana B05.10]
  misc_feature (1)..(180): NCBI GI: 116204657 Blast Desc: CHGG_10212 [Chaetomium globosum CBS 148.51] gi|88176340|gb|EAQ83808.1| CHGG_10212 [Chaetomium globosum CBS 148.51]
  misc_feature (1)..(180): NCBI GI: 256728907 Blast Desc: NECHADRAFT_100373 [Nectria haematococca mpVI 77-13-4]
  misc_feature (1)..(180): NCBI GI: 46138721 Blast Desc: FG10875.1 [Gibberella zeae PH-1]
  misc_feature (14)..(180): NCBI GI: 156044792 Blast Desc: SS1G_10500 [Sclerotinia sclerotiorum 1980] gi|154694888|gb|EDN94626.1| SS1G_10500 [Sclerotinia sclerotiorum 1980]
  misc_feature (1)..(180): NCBI GI: 238496495 Blast Desc: small nuclear ribonucleoprotein (LSM1), [Aspergillus flavus NRRL3357] gi|220694363|gb|EED50707.1| small nuclear ribonucleoprotein (LSM1), [Aspergillus flavus NRRL3357]
  misc_feature (1)..(180): NCBI GI: 71001662 Blast Desc: small nuclear ribonucleoprotein (LSM1) [Aspergillus fumigatus Af293] gi|66853150|gb|EAL93474.1| small nuclear ribonucleoprotein (LSM1), [Aspergillus fumigatus Af293] small
  misc_feature (1)..(180): NCBI GI: 119481233 Blast Desc: small nuclear ribonucleoprotein (LSM1), [Neosartorya fischeri NRRL 181] gi|119408799|gb|EAW18748.1| small nuclear ribonucleoprotein (LSM1), [Neosartorya fischeri NRRL 181]
  misc_feature (1)..(180): NCBI GI: 121715718 Blast Desc: small nuclear ribonucleoprotein (LSM1), [Aspergillus clavatus NRRL 1] gi|119403625|gb|EAW14042.1| small nuclear ribonucleoprotein (LSM1), [Aspergillus clavatus NRRL 1]
  misc_feature (7)..(180): NCBI GI: 240107301 Blast Desc: U6 snRNA-associated Sm-like protein LSm1, [Coccidioides posadasii C735 delta SOWgp]
MENLNIHGAPPPGGPQQGQPGGMMNPQGPPQQQQLVPQMFTTAAQLMDLTDKKLLLVLRDGRKLTGILRTWDQFANLVLEATSERIFAVTSHPKDPQPKGFYADEYHGIFLVRGENVLILGEIDLDKDDDPPAGYEKAELAVVQKLAKERKEADKAREKNRLKKLGTHGFEGENAGEILL

SEQ ID NO: 38552 - DNA, 1575 bp, Muscodor strobelii
  misc_feature: SGI EST ID NO. CUFF.92699.2
  misc_feature: Variant of the nucleotide sequence at SEQ ID NO 38550
atgtcacattaaaatcatctttcttcgatcttctttgttagcctcacaccaacgccagcttgcaccaggaatactcccatgttgtagctgtagaaccattgcatctcagagcgagatcataagcccatagtcccacgcaatccgctccatggaccatcggcgcatcgcgacttccaagacagccttcacaacgatcacatgatagaatggagaacctgaacatacatggcgctccgcctcccggcggcccccagcagggccagccgggaggtatgatgaatccccagggccctcctcagcagcagcaactcgtcccgcaaatgttcaccacagccgcccagctgatggacctcactgacaagaagcttctacttgtcctcagggacggtaggaagttgactggcattctgcgcacctgggatcaatttgcgaacctagtcctagaggctacctcagagcgcatctttgccgtgacttctcatcctaaagatccccagcctaaggggttctatgccgacgaatatcatggcatcttccttgtccgtggagaaaatgtactgattctcggcgaaatcgacctcgacaaggacgacgacccaccagctggatatgagaaggcagagctcgcagtggtgcagaaactagccaaggagagaaaagaagcggacaaggcccgcgagaagaacaggctcaagaagctggggacgcacgggttcgaaggcgagaatgcgggcgagatactcctctaagacacgtatctactacggtatatcgacgtactgacgtgctaagaaactatgcgacacggcaagaagtagcccaacgaaagaggagcacgccgcaatgccattgcataataccctttcgggcaacgatgtggtagtggcagaatattgtgaaatgccctcccatcgagtgagaaactctacacggtttgctcctgatgctgctctatggtttcaagacaaggcttcgtccttcctaaccacaagagagctaattcagagctcacagtagattcatagcgtttgaaataaaccaattgctcttaattacctatcccctagtacctctgtcatgagcgagtaaatggactgatatacagctcgttgcctttggctatatatacaccgcagtattctactcttgaatggactgctacaatcccggcacgaatccttcaactttgacatcccacccctcaggaaaatgcggcccaggctccccgtcccaacccccagccatcatagcaatggcgagcaggaacgagctactagccgggaagtacggcgtcgggaccctcgtgccaccctcaggataacccgcatcatcaaactcaaacagcggatccaacaaatacctaaccgcttgctcactgtcccccagcctcagcacattcatagcaaccatgggaaaatcccacccatagctatcttccagatcccacctctccctaatcttcaccgccgtctctctcacaacatccatatccaactccggtccactcttaggcggcggtaataatccatatatagcagacatcgcaggatgatcctggaccgtcgtcgagttcac

SEQ ID NO: 38553 - DNA, 441 bp, Muscodor strobelii
  misc_feature: SGI cDNA ID NO. 573399
  misc_feature: Encodes the peptide sequence at SEQ ID NO 38554
atgaatactacggagaagggtcccattgatgtcattacaactttgatcgacattgccgatatcgtattcaaaatcatcaccgagatcacgaacgatcaagaatcgaccgagatcaacttcgtcacgagtaccttaagtgaactccgtgcacagtttccatcaaagaatctcatgatcttccacaatcaaggcaccacgttagacctgcagaactaccgacaccaacacgtggaagtagacttgatcgagttctttgggataaccaaggggtacgaggtcttcgttttcgacacaggaagcttcgaacttgctggtgatggtggtgagcgtaactggaagtgtagcgggtgttttgagcgtttgagtgggtttgttttcccattggatttcggccttatggcactgctcattttcaagaggcaaagatatctttatcattaa

SEQ ID NO: 38554 - protein, 146 aa, Muscodor strobelii
  misc_feature: SGI Peptide ID NO. 573399
  misc_feature (16)..(113): NCBI GI: 170114044 Blast Desc: ectomycorrhiza-regulated small secreted protein [Laccaria bicolor S238N-H82] gi|164636887|gb|EDR01178.1| ectomycorrhiza-regulated small secreted protein [Laccaria bicolor
MNTTEKGPIDVITTLIDIADIVFKIITEITNDQESTEINFVTSTLSELRAQFPSKNLMIFHNQGTTLDLQNYRHQHVEVDLIEFFGITKGYEVFVFDTGSFELAGDGGERNWKCSGCFERLSGFVFPLDFGLMALLIFKRQRYLYH

SEQ ID NO: 38555 - DNA, 486 bp, Muscodor strobelii
  misc_feature: SGI cDNA ID NO. 573400
  misc_feature: Elevated expression when VOC is produced
  misc_feature: Encodes the peptide sequence at SEQ ID NO 38556
atggcatctagctccaaaggacgttccatggagtcccgtacaggacgaagcaatcagcgctacaattcaaaaggcgaacgcttggttgccggagtagtgcccgtgaccgaggaccggatgtatgtccttctcattcaatcgacacgcagaaagggctgggttctgcctaagggaggttgggagtcggacgaagaatgccctcaggcagccgaacgcgaagcgtgggaagaggcgggtattaccattcgcatcgactatgatcttggagatatcgtagactcgcgcccgcccaagaaagtatctaaggatgctccgaaggctctgtatcgtttctatgaagccactgtgctggtggaagagactgagtggcccgagaagcacaagcgagagcgccagtggtttacatacagccaagccaaggaagcactttctagccggccagagctcgtccaagcgctagagctatctacgattcagcggtactag

SEQ ID NO: 38556 - protein, 161 aa, Muscodor strobelii
  misc_feature: SGI Peptide ID NO. 573400
  misc_feature (26)..(155): Pfam Id: PF00293 Pfam Desc: NUDIX domain
  misc_feature (5)..(160): NCBI GI: 154291171 Blast Desc: BC1G_15357 [Botryotinia fuckeliana B05.10] gi|150847073|gb|EDN22266.1| BC1G_15357 [Botryotinia fuckeliana B05.10]
  misc_feature (5)..(160): NCBI GI: 156044788 Blast Desc: SS1G_10498 [Sclerotinia sclerotiorum 1980] gi|154694886|gb|EDN94624.1| SS1G_10498 [Sclerotinia sclerotiorum 1980]
  misc_feature (3)..(160): NCBI GI: 85080113 Blast Desc: NCU01804 [Neurospora crassa OR74A] gi|18376107|emb|CAD21173.1| related to diadenosine hexaphosphate hydrolase [Neurospora crassa] gi|28917548|gb|EAA27246.1| crassa
  misc_feature (3)..(160): NCBI GI: 189200390 Blast Desc: nudix/MutT family protein [Pyrenophora tritici-repentis Pt-1C-BFP] gi|187983631|gb|EDU49119.1| nudix/MutT family protein [Pyrenophora tritici-repentis
  misc_feature (2)..(160): NCBI GI: 169608616 Blast Desc: SNOG_07390 [Phaeosphaeria nodorum SN15] gi|111063736|gb|EAT84856.1| SNOG_07390 [Phaeosphaeria nodorum SN15]
  misc_feature (10)..(160): NCBI GI: 46138723 Blast Desc: FG10876.1 [Gibberella zeae PH-1]
  misc_feature (8)..(160): NCBI GI: 256728906 Blast Desc: NECHADRAFT_60765 [Nectria haematococca mpVI 77-13-4]
  misc_feature (1)..(160): NCBI GI: 171689462 Blast Desc: protein product [Podospora anserina] gi|170944693|emb|CAP70804.1| protein product [Podospora anserina]
  misc_feature (1)..(160): NCBI GI: 116199441 Blast Desc: CHGG_07876 [Chaetomium globosum CBS 148.51] gi|88179155|gb|EAQ86623.1| CHGG_07876 [Chaetomium globosum CBS 148.51]
  misc_feature (7)..(160): NCBI GI: 115384190 Blast Desc: conserved [Aspergillus terreus NIH2624] gi|114196334|gb|EAU38034.1| conserved [Aspergillus terreus NIH2624]
  misc_feature (7)..(158): SWISSPROT Homolog: EC 3.6.1.52 Diphosphoinositol-polyphosphate diphosphatase
  misc_feature: Useful for introducing or modulating the production of volatile compounds
MASSSKGRSMESRTGRSNQRYNSKGERLVAGVVPVTEDRMYVLLIQSTRRKGWVLPKGGWESDEECPQAAEREAWEEAGITIRIDYDLGDIVDSRPPKKVSKDAPKALYRFYEATVLVEETEWPEKHKRERQWFTYSQAKEALSSRPELVQALELSTIQRY

SEQ ID NO: 38557 - DNA, 1841 bp, Muscodor strobelii
  misc_feature: SGI EST ID NO. CUFF.92702.0
  misc_feature: Variant of the nucleotide sequence at SEQ ID NO 38555
agcgagtgtctatttgtgacaatggctcgaggcaaagctgcgtctgacctcagtatcagagcactcgctcacaacggctcgtcaccaccccttgtcactagttctactaagtcaagtcaccaccattgatccgagcagtgactcttccgcatttgttcccacgctccatgacgcaacagcacgagggttgaaaccacccatcctcgtggctctcatcggatatatcaccttgctccgaaacgactgtcagactttcccaccgccagcggaagttgcattcacgttgttacgcgcttctccagatcatcggtttcacccatcacatcccagcccgtcaagcatcccgaggttattgtcatagagcctcgagcattgagccccaagctctcgctccttgcacggggtacctgacaccggaatctagctcgtgcacttcacacccacctatcacgacctattgtagcaacgatcctaatatcgctcttcattcaccaaaatcccgacaatgttgttgaataatttcccgtgaacattattctctccagcacgctctggtcggatcaatctcgattggagctcccctctaatacccttgagtctcgttttcctctcgactcgtcccgaaaacccgtcacggcttgtgtataacatcgacaagatggcatctagctccaaaggacgttccatggagtcccgtacaggacgaagcaatcagcgctacaattcaaaaggcgaacgcttggttgccggagtagtgcccgtgaccgaggaccggatgtatgtccttctcattcaatcgacacgcagaaagggctgggttctgcctaagggaggttgggagtcggacgaagaatgccctcaggcagccgaacgcgaagcgtgggaagaggcgggtattaccattcgcatcgactatgatcttggagatatcgtagactcgcgcccgcccaagaaagtatctaaggatgctccgaaggctctgtatcgtttctatgaagccactgtgctggtggaagagactgagtggcccgagaagcacaagcgagagcgccagtggtttacatacagccaagccaaggaagcactttctagccggccagagctcgtccaagcgctagagctatctacgattcagcggtactagatctatccctaagtaaggaggacttgatcagcgcttgatcagactgcgaagacaggcagtactgcccacacacctactacgaacaatcaatcttcacctttgacgattgtttctcatgatattcaacgaagacagttgcatagatctggattctggagttttcggtagttgcgattttcgacgattttccgcttgcatttgccgatgtcacgcaacatgctcaccctcagactgggagcgacttggtaaagaggagtcgtacgcggatttgaacatagaattcgagcgagagtatttcactttcctttgttactttgcatcttgcgcttgagaccggggtaaaacggcacggaaatatatgcatgaggctcaggcgttgctggcaagtcatgatagagacccacgggtgaaaggtggacacttgggaagcttcgaagagctcccaagactaatgaaatgcacggaagaaattgcaaatgctcaatcagagagcagaaatacacaagatcccacccgtcgcgtaaagctttcggagggcatgcgaatagacgaatagaggatcgtagagtgaggcttgtgctcaaaagtctcctcagaagagacagcctcagagatgacacgagatgagtgacaaccaagataccgcaatacacatgacggcgacaaacgcatactctcatgctgcattgcatttgcc

SEQ ID NO: 38558 - DNA, 1392 bp, Muscodor strobelii
  misc_feature: SGI cDNA ID NO. 573401
  misc_feature: Elevated expression when VOC is produced
  misc_feature: Encodes the peptide sequence at SEQ ID NO 38559
atgcaggcagttccaccccctggtgaagcatcatatataatgcctattggctatgtgaaatcaggcgaatgcggttactgccgtggaactgataagggcaaaactttttatgcacgaaccaacgacttgagccctgcagtctatcaaagcttggtcgatcgaaactggaggcgatcaggaaccctgctctataagccgaaccagcgagagtcttgttgtccacattacacgattcgcttagactctggccaatttcgaccgagtagggatcaacgacagacgatcaatcgcttcaacaagtatattgtgggcgatgcatatgtcaaggaagctgcagttcgacacccgaaaacccgtgaggaggcacggcagcgtgacagcgagttcgtcctaagtgaaagacttcacgagagtgagagccaatcactgaagcagccacccgaacccgcacatgcattcgaggtgaccttagagcctgatgacttcactgaagagaagtaccttgtatatgagaattaccagcgaatcgttcataatgagcctgcatccgatatttctcggtctggtttccggcgatttctctgcaactcgcccctaaaacggcagagtctcatgactgtaaatggtttgccacaacgtctcggttcttaccatcaatgctacaaactggatggcaagcttgttgccattggtgttcttgatctcctgccgaattgtgtgagtgccgtctattttctctatcacgaatctattcatatgtggagtcccggcaaactaggagctctacgggagatctctcttgccacagaagggggatatggctattggtaccctggattctacatacacacctgtccgaaaatgcgctacaagatcgactacatgccacaagaggtgctcgatccagattctctcaagtgggccaaattaacaaaggaggtactcgcaaaattcgatagccacggttatctccatctagatcaagagacaggcgtaataggcgatactagaacagaagtagaaggttccacagggaactgcaaaactgctgatgttgaaatggaggaggggtttgctgccgggaacaacgatgagaaagtcgcggaagagaacgatgacgaaagcgaagacgagagatccaacagttttcaattactcagcagcaacatgccaggtctcgccccactggagaaaatcgtgacgttcgacttcgactctgtcatcgttcgtctgaatagaggagattaccgagccgtagatttgtttgattgggaggacgaggatatcatggggcaaggacccaaggcacagatcgcgcagctagttgctgctatcggcccagatctgatgccctcattttctttagacttcagacgattaaatgtcacgtga

SEQ ID NO: 38559 - protein, 463 aa, Muscodor strobelii
  misc_feature: SGI Peptide ID NO. 573401
  misc_feature (159)..(309): Pfam Id: PF04377 Pfam Desc: Arginine-tRNA-protein transferase, C terminus
  misc_feature (13)..(101): Pfam Id: PF04376 Pfam Desc: Arginine-tRNA-protein transferase, N terminus
  misc_feature (24)..(101): Pfam Id: PF04376 Pfam Desc: Arginine-tRNA-protein transferase, N terminus
  misc_feature (8)..(459): NCBI GI: 171689460 Blast Desc: protein product [Podospora anserina] gi|170944692|emb|CAP70803.1| protein product [Podospora anserina]
  misc_feature (11)..(459): NCBI GI: 85080110 Blast Desc: NCU01803 [Neurospora crassa OR74A] gi|18376108|emb|CAD21174.1| related to arginine-tRNA-protein transferase [Neurospora crassa] gi|28917547|gb|EAA27245.1| crassa
  misc_feature (33)..(458): NCBI GI: 154291167 Blast Desc: BC1G_15355 [Botryotinia fuckeliana B05.10] gi|150847071|gb|EDN22264.1| BC1G_15355 [Botryotinia fuckeliana B05.10]
  misc_feature (68)..(463): NCBI GI: 116199443 Blast Desc: CHGG_07877 [Chaetomium globosum CBS 148.51] gi|88179156|gb|EAQ86624.1| CHGG_07877 [Chaetomium globosum CBS 148.51]
  misc_feature (87)..(459): NCBI GI: 39977593 Blast Desc: MGG_06681 [Magnaporthe grisea 70-15] gi|145013803|gb|EDJ98444.1| MGG_06681 [Magnaporthe grisea 70-15]
  misc_feature (68)..(446): NCBI GI: 156044784 Blast Desc: SS1G_10496 [Sclerotinia sclerotiorum 1980] gi|154694884|gb|EDN94622.1| SS1G_10496 [Sclerotinia sclerotiorum 1980]
  misc_feature (63)..(457): NCBI GI: 256729087 Blast Desc: [Nectria haematococca mpVI 77-13-4]
  misc_feature (63)..(457): NCBI GI: 46138727 Blast Desc: FG10878.1 [Gibberella zeae PH-1]
  misc_feature (33)..(449): NCBI GI: 189200392 Blast Desc: arginine-tRNA-protein transferase 1 [Pyrenophora tritici-repentis Pt-1C-BFP] gi|187983632|gb|EDU49120.1| arginine-tRNA-protein transferase 1 [Pyrenophora tritici-repentis
  misc_feature (30)..(450): NCBI GI: 226279651 Blast Desc: arginine-tRNA-protein transferase [Paracoccidioides brasiliensis Pb01]
  misc_feature (48)..(307): SWISSPROT Homolog: EC 2.3.2.8 Arginyltransferase
  misc_feature: Useful for introducing or modulating the production of volatile compounds
MQAVPPPGEASYIMPIGYVKSGECGYCRGTDKGKTFYARTNDLSPAVYQSLVDRNWRRSGTLLYKPNQRESCCPHYTIRLDSGQFRPSRDQRQTINRFNKYIVGDAYVKEAAVRHPKTREEARQRDSEFVLSERLHESESQSLKQPPEPAHAFEVTLEPDDFTEEKYLVYENYQRIVHNEPASDISRSGFRRFLCNSPLKRQSLMTVNGLPQRLGSYHQCYKLDGKLVAIGVLDLLPNCVSAVYFLYHESIHMWSPGKLGALREISLATEGGYGYWYPGFYIHTCPKMRYKIDYMPQEVLDPDSLKWAKLTKEVLAKFDSHGYLHLDQETGVIGDTRTEVEGSTGNCKTADVEMEEGFAAGNNDEKVAEENDDESEDERSNSFQLLSSNMPGLAPLEKIVTFDFDSVIVRLNRGDYRAVDLFDWEDEDIMGQGPKAQIAQLVAAIGPDLMPSFSLDFRRLNVT

SEQ ID NO: 38560 - DNA, 2442 bp, Muscodor strobelii
  misc_feature: SGI EST ID NO. CUFF.92695.1
  misc_feature: Variant of the nucleotide sequence at SEQ ID NO 38558
cttacccaatagcgaatgtcacaaagactgttcccaagaatccacgaccatgaaatgggagcgaaatgtgaggcgtctatgcgcttcgttttcaagaagccttacgcatgtaaaagtcaccgattacctcatgcattcgtcccatacacgctgcttcgtactgtgcggaaaaaggggagtgaatggcaacttgagacagctgcatcttgaaattcacattgggcggggagggtgatatgaaaaatatgaaggattatccgggaaagcacggatttgttctgctataatgtttactttgaacttagactgatgaatcgacttccccggctcagtcagctggtgcgggaggtgcgtacgcatgtagtgagactaaggtagcagcctcacgcataatgttgttcatgctctttacatcagcggtaagaggtggtaagtaaggtaggaaaggccacaggccaaattcgaaacctgagtggcccgtagaaatcatcccacttctgcctactacccattgcctgcaacgggatgcaccgaactccagtcgcacttagcatcggcatcggcatccacatcgcattccgcctcaccaaatctagccgagacagtctccagcttcctgtcttcgtagatcacttattcaacctgcgccattcaaatctcgtcgtttcagtgccacgcgagactttttgcaaaagcaaccgcgccatctttcacgctgaccatagtgtctgaggattgctggcagtgtcttggtctctggcggggatatatatcctttgctccgggtccggtcgccctcccgcgccctgactcagctcccgttgctggcccccgactcagctcattactcgtctgcgcgctctgaatcccacgaagcaaacggccccttcgagtcctccaggttgaccgcaagcgtcgcaatcatgcaggcagttccaccccctggtgaagcatcatatataatgcctattggctatgtgaaatcaggcgaatgcggttactgccgtggaactgataagggcaaaactttttatgcacgaaccaacgacttgagccctgcagtctatcaaagcttggtcgatcgaaactggaggcgatcaggaaccctgctctataagccgaaccagcgagagtcttgttgtccacattacacgattcgcttagactctggccaatttcgaccgagtagggatcaacgacagacgatcaatcgcttcaacaagtatattgtgggcgatgcatatgtcaaggaagctgcagttcgacacccgaaaacccgtgaggaggcacggcagcgtgacagcgagttcgtcctaagtgaaagacttcacgagagtgagagccaatcactgaagcagccacccgaacccgcacatgcattcgaggtgaccttagagcctgatgacttcactgaagagaagtaccttgtatatgagaattaccagcgaatcgttcataatgagcctgcatccgatatttctcggtctggtttccggcgatttctctgcaactcgcccctaaaacggcagagtctcatgactgtaaatggtttgccacaacgtctcggttcttaccatcaatgctacaaactggatggcaagcttgttgccattggtgttcttgatctcctgccgaattgtgtgagtgccgtctattttctctatcacgaatctattcatatgtggagtcccggcaaactaggagctctacgggagatctctcttgccacagaagggggatatggctattggtaccctggattctacatacacacctgtccgaaaatgcgctacaagatcgactacatgccacaagaggtgctcgatccagattctctcaagtgggccaaattaacaaaggaggtactcgcaaaattcgatagccacggttatctccatctagatcaagagacaggcgtaataggcgatactagaacagaagtagaaggttccacagggaactgcaaaactgctgatgttgaaatggaggaggggtttgctgccgggaacaacgatgagaaagtcgcggaagagaacgatgacgaaagcgaagacgagagatccaacagttttcaattactcagcagcaacatgccaggtctcgccccactggagaaaatcgtgacgttcgacttcgactctgtcatcgttcgtctgaatagaggagattaccgagccgtagatttgtttgattgggaggacgaggatatcatggggcaaggacccaaggcacagatcgcgcagctagttgctgctatcggcccagatctgatgccctcattttctttagacttcagacgattaaatgtcacgtgagatagtctgctttttcaaccaatgcattataacaagcattaattctcgctttccgtgtatcttgagagaccagcttctagaaatggcagcaattatatcttagcttttagtcaatgtgaagtccaga

SEQ ID NO: 38561 - DNA, 1044 bp, Muscodor strobelii
  misc_feature: SGI cDNA ID NO. 573402
  misc_feature: Encodes the peptide sequence at SEQ ID NO 38562
atgctcggccaaattcgcatgaagcacttccccataccgctaccaccagcagactccttcaagaaccaagtcggtgtagtcactggcggaacaagtggtcttggtttcgctgcagcagcacacttggtgaatctcggcgcatcagaagttataattacaagtcgaaacccaggtcgcgcacagaatgcactccatgccctcgagaaagagactaatggccgcagcaagaatgtcgttcgtgttgtcgaacttgacatgaatcgctatgactcggttattactttcgctgaggaggtcaagaagacgagacccgggaaagggggtgtggattttgtgttactgaatgccggtgttattggtgtgaagtatactgctgttgatgagggatgggaacaaaatctccaagtcaacgtgctaagcacgaccctgatctcactactcctcctcccatggatgaaagccgagcgagcaaaccgatcttcgccctctcatctcgccatcgtggggtccagccaacatctgtctcccgacctcgaagcttggaagaagtggtctgcaagcagcggcgtcctagcacactacaacgacccggagaactttccaagtggagacactatgtacggcgctaccaagctgatggtagcctacgtcgcgagcgagcttgtggagttagcaaagggaacggatggtcgtcctgaagtgatagtcaacacgatgtgccctggcatggtggcaacggacctagcgcgacattacaaagagaacagcttcttgataaggctcgctctcccgcttatgtatgctttggcatggaaaagtccggagaacggcgcccggacactgattactgctgggttgacgactgagagcgagaatggcaagttcattcggtactacggctctgatgaggaatacaagaaacaacacgagaagcttttcgtcagtcctactggacgtgaggtgcaagcctcagtatggtccgagatcacgagagagcttgcttcgaaggttcctagtgttcaatatgccgtcaagcaatcgtaa

SEQ ID NO: 38562 - protein, 347 aa, Muscodor strobelii
  misc_feature: SGI Peptide ID NO. 573402
  misc_feature (23)..(179): Pfam Id: PF00106 Pfam Desc: short chain dehydrogenase
  misc_feature (23)..(150): Pfam Id: PF00106 Pfam Desc: short chain dehydrogenase
  misc_feature (26)..(63): Pfam Id: PF08659 Pfam Desc: KR domain
  misc_feature (4)..(307): NCBI GI: 119490096 Blast Desc: short chain dehydrogenase/reductase family oxidoreductase, [Neosartorya fischeri NRRL 181] gi|119411124|gb|EAW21067.1| short chain dehydrogenase/reductase
  misc_feature (19)..(336): NCBI GI: 154305526 Blast Desc: BC1G_08532 [Botryotinia fuckeliana B05.10] gi|150853319|gb|EDN28511.1| BC1G_08532 [Botryotinia fuckeliana B05.10]
  misc_feature (2)..(284): NCBI GI: 116202939 Blast Desc: CHGG_09354 [Chaetomium globosum CBS 148.51] gi|88177872|gb|EAQ85340.1| CHGG_09354 [Chaetomium globosum CBS 148.51]
  misc_feature (13)..(347): NCBI GI: 240108554 Blast Desc: oxidoreductase,short chain dehydrogenase, [Coccidioides posadasii C735 delta SOWgp]
  misc_feature (1)..(344): NCBI GI: 238484663 Blast Desc: short-chain dehydrogenase/reductase family protein, [Aspergillus flavus NRRL3357] gi|220701620|gb|EED57958.1| short-chain dehydrogenase/reductase family protein, [Aspergillus
  misc_feature (1)..(340): NCBI GI: 255944263 Blast Desc: Pc20g03480 [Penicillium chrysogenum Wisconsin 54-1255] gi|211587634|emb|CAP85677.1| Pc20g03480 [Penicillium chrysogenum Wisconsin 54-1255]
  misc_feature (13)..(341): NCBI GI: 119186485 Blast Desc: CIMG_03290 [Coccidioides immitis RS]
  misc_feature (1)..(333): NCBI GI: 115384868 Blast Desc: conserved [Aspergillus terreus NIH2624] gi|114196673|gb|EAU38373.1| conserved [Aspergillus terreus NIH2624]
  misc_feature (1)..(297): NCBI GI: 169767754 Blast Desc: [Aspergillus oryzae RIB40] gi|83766203|dbj|BAE56346.1| protein product [Aspergillus oryzae]
  misc_feature (1)..(345): NCBI GI: 145233961 Blast Desc: An02g12250 [Aspergillus niger] gi|134057292|emb|CAK37906.1| protein product [Aspergillus niger]
MLGQIRMKHFPIPLPPADSFKNQVGVVTGGTSGLGFAAAAHLVNLGASEVIITSRNPGRAQNALHALEKETNGRSKNVVRVVELDMNRYDSVITFAEEVKKTRPGKGGVDFVLLNAGVIGVKYTAVDEGWEQNLQVNVLSTTLISLLLLPWMKAERANRSSPSHLAIVGSSQHLSPDLEAWKKWSASSGVLAHYNDPENFPSGDTMYGATKLMVAYVASELVELAKGTDGRPEVIVNTMCPGMVATDLARHYKENSFLIRLALPLMYALAWKSPENGARTLITAGLTTESENGKFIRYYGSDEEYKKQHEKLFVSPTGREVQASVWSEITRELASKVPSVQYAVKQS

SEQ ID NO: 38563 - DNA, 918 bp, Muscodor strobelii
  misc_feature: SGI EST ID NO. CUFF.92736.0
  misc_feature: Variant of the nucleotide sequence at SEQ ID NO 38561
cacgaccctgatctcactactcctcctcccatggatgaaagccgagcgagcaaaccgatcttcgccctctcatctcgccatcgtggggtccagccaacatctgtctcccgacctcgaagcttggaagaagtggtctgcaagcagcggcgtcctagcacactacaacgacccggagaactttccaagtggagacactatgtacggcgctaccaagctgatggtagcctacgtcgcgagcgagcttgtggagttagcaaagggaacggatggtcgtcctgaagtgatagtcaacacgatgtgccctggcatggtggcaacggacctagcgcgacattacaaagagaacagcttcttgataaggctcgctctcccgcttatgtatgctttggcatggaaaagtccggagaacggcgcccggacactgattactgctgggttgacgactgagagcgagaatgtaggtgcaaatcattgttttcactcagctaatatctaacatactcgaaattacactacgttcctatatctgaattgaactaactaatttccacagggcaagttcattcggtactacggctctgatgaggaatacaagaaacaacacgagaagcttttcgtcagtcctactggacgtgaggtgcaagcctcagtatggtccgagatcacgagagagcttgcttcgaaggttcctagtgttcaatatgccgtcaagcaatcgtaatagcgagaagaaatgagaaaaacttatgagtctacacagcgttgattcttcctgcgctgggcccctgcttagcatcaggtcgcgagattccgtgggttacgcatctgttattatctcctagcagtacttaaggacatgatgacaaaccccgttcttgtgttatggattccacgagctctatgcagctcttattcttg

SEQ ID NO: 38564 - DNA, 486 bp, Muscodor strobelii
  misc_feature: SGI cDNA ID NO. 573403
  misc_feature: Reduced expression when VOC is produced
  misc_feature: Encodes the peptide sequence at SEQ ID NO 38565
atggcgacgacgcaacacctgttgctctcgcccgccgagctcgcctacctacacaacaccctcagtctcacgccgcctctccgtcccgacggtcgaacagcaacacaattccgacccctcacagccgaaactggtatcctcccaggcacaaacggcagcgcgcggatatgtttcgcagacggtaccgaagcagtcgtaggcgcaaaggcagaagtcgaacggacgaaaggcgctgcaatatcagaggagaaccaaactatcaaacaaaaggcgcagaaacagacactccagtctaagacagagacaaaagacaatgagggagagaacgactggctcgagttgacggtcgagatccccggttatagggacgatgacagtagcactatcttcctcgccacgatgttgagcgaggctctgctggcggatggagagttgacgaagaagttgtggatcaacaggcggtttcactggaagttgtacctcgac

SEQ ID NO: 38565 - protein, 162 aa, Muscodor strobelii
  misc_feature: SGI Peptide ID NO. 573403
  misc_feature (36)..(73): Pfam Id: PF01138 Pfam Desc: 3' exoribonuclease family, domain 1
  misc_feature (1)..(162): NCBI GI: 85080121 Blast Desc: NCU01806 [Neurospora crassa OR74A] gi|18376105|emb|CAD21171.1| related to rRNA processing protein [Neurospora crassa] gi|28917550|gb|EAA27248.1| conserved crassa
  misc_feature (1)..(162): NCBI GI: 116199467 Blast Desc: CHGG_07889 [Chaetomium globosum CBS 148.51] gi|88179168|gb|EAQ86636.1| CHGG_07889 [Chaetomium globosum CBS 148.51]
  misc_feature (2)..(162): NCBI GI: 145606074 Blast Desc: MGG_06683 [Magnaporthe grisea 70-15] gi|145013801|gb|EDJ98442.1| MGG_06683 [Magnaporthe grisea 70-15]
  misc_feature (1)..(162): NCBI GI: 171689454 Blast Desc: protein product [Podospora anserina] gi|170944689|emb|CAP70800.1| protein product [Podospora anserina]
  misc_feature (2)..(162): NCBI GI: 156065953 Blast Desc: SS1G_00987 [Sclerotinia sclerotiorum 1980] gi|154691846|gb|EDN91584.1| SS1G_00987 [Sclerotinia sclerotiorum 1980]
  misc_feature (4)..(162): NCBI GI: 256729086 Blast Desc: NECHADRAFT_40151 [Nectria haematococca mpVI 77-13-4]
  misc_feature (1)..(162): NCBI GI: 46138729 Blast Desc: FG10879.1 [Gibberella zeae PH-1]
  misc_feature (2)..(162): NCBI GI: 115384202 Blast Desc: conserved [Aspergillus terreus NIH2624] gi|114196340|gb|EAU38040.1| conserved [Aspergillus terreus NIH2624]
  misc_feature (9)..(162): NCBI GI: 255932009 Blast Desc: Pc12g07260 [Penicillium chrysogenum Wisconsin 54-1255] gi|211582180|emb|CAP80353.1| Pc12g07260 [Penicillium chrysogenum Wisconsin 54-1255]
  misc_feature (2)..(162): NCBI GI: 145231729 Blast Desc: An02g01970 [Aspergillus niger] gi|134056242|emb|CAK37499.1| protein product [Aspergillus niger]
  misc_feature: Useful for introducing or modulating the production of volatile compounds
MATTQHLLLSPAELAYLHNTLSLTPPLRPDGRTATQFRPLTAETGILPGTNGSARICFADGTEAVVGAKAEVERTKGAAISEENQTIKQKAQKQTLQSKTETKDNEGENDWLELTVEIPGYRDDDSSTIFLATMLSEALLADGELTKKLWINRRFHWKLYLD

SEQ ID NO: 38566 - DNA, 1193 bp, Muscodor strobelii
  misc_feature: SGI EST ID NO. CUFF.92768.0
  misc_feature: Variant of the nucleotide sequence at SEQ ID NO 38564
cgtgactcggagacttgtgaggtgaaatgatgactcgggaattgctacaaatcgtgagttcacttctgtggcaaggtcaatggactttggttgatgagttaaaatagttaatatctcgagatatttgctaagttaaattgagatcgattaaaagggcgtgtgaaacttgcaagaactagcgctagccagcagcatgaagaatcgcgcgaaaggtaggaatgaaggcaatgatagatcggccctggagtgcctcagctgaagttggaaagaacaccagcctcaggtcagtgccccacgatgagctcaagccacatcttgaattgttggccaatcaatgctcttcctcaagctcagctcaaaaaaaatacccaaggccccacgtcaattgcttgtgacgccaaccaaacccggagcaacacccaaaaagttggatcaccatcaccaacactacaaaacaaatcctcgagtgggtttgctcaccaaaagaaattgcaactgcgcagaacctgcagcttctcatcgtaacttcaccgccatactattccaaacctatcaggacaccgcaaactcagacgtacctcccccaccatggcgacgacgcaacacctgttgctctcgcccgccgagctcgcctacctacacaacaccctcagtctcacgccgcctctccgtcccgacggtcgaacagcaacacaattccgacccctcacagccgaaactggtatcctcccaggcacaaacggcagcgcgcggatatgtttcgcagacggtaccgaagcagtcgtaggcgcaaaggcagaagtcgaacggacgaaaggcgctgcaatatcagaggagaaccaaactatcaaacaaaaggcgcagaaacagacactccagtctaagacagagacaaaagacaatgagggagagaacgactggctcgagttgacggtcgagatccccggttatagggacgatgacagtagcactatcttcctcgccacgatgttgagcgaggctctgctggcggatggagagttgacgaagaagttgtggatcaacaggcggtttcactggaagttgtacctcgacataatactcatctcaccccccctctcctacccgctccccctcctctccctaacaacgcacctcgcccttctctcaacccgactcccgcgcctcaaatcagaaggcgacgaagaccccat

SEQ ID NO: 38567 - DNA, 408 bp, Muscodor strobelii
  misc_feature: SGI cDNA ID NO. 573404
  misc_feature: Elevated expression when VOC is produced
  misc_feature: Encodes the peptide sequence at SEQ ID NO 38568
atggagaaagctctcggtcggcatactcaaatcgatctgttgggctatgggaccaaggcgccttctgttgcgccgctcgcccgcgctgagaaggtcggccgtaccgaaataggcccgcctcctaaaagattattgaagcgacccttcccaagagacgataataaaacatcgtccgagaagacaaccaacatcgaaaactcgtccgcacttctgaggagacaatggggggctccgcacgagcgatacaacatgttgtaccgcgtggaatttgccgggcccgccacttttgcggcgcagaagacgcgaccattcgcttgtgtcgtcatcaagagcttcccgctgaagaaggcagaagaggtgctctactggtgccgacgcgttaggcacagcaacatcatcacggcgctc

SEQ ID NO: 38568 - protein, 136 aa, Muscodor strobelii
  misc_feature: SGI Peptide ID NO. 573404
  misc_feature (7)..(136): NCBI GI: 156050909 Blast Desc: SS1G_08042 [Sclerotinia sclerotiorum 1980] gi|154692442|gb|EDN92180.1| SS1G_08042 [Sclerotinia sclerotiorum 1980]
  misc_feature (64)..(135): NCBI GI: 154280170 Blast Desc: [Ajellomyces capsulatus NAm1] gi|150412841|gb|EDN08228.1| [Ajellomyces capsulatus NAm1]
  misc_feature: Useful for introducing or modulating the production of volatile compounds
MEKALGRHTQIDLLGYGTKAPSVAPLARAEKVGRTEIGPPPKRLLKRPFPRDDNKTSSEKTTNIENSSALLRRQWGAPHERYNMLYRVEFAGPATFAAQKTRPFACVVIKSFPLKKAEEVLYWCRRVRHSNIITAL

SEQ ID NO: 38569 - DNA, 461 bp, Muscodor strobelii
  misc_feature: SGI EST ID NO. CUFF.92741.0
  misc_feature: Variant of the nucleotide sequence at SEQ ID NO 38567
tactgtacaaggtcagcacagcttacgcaaaattatcatcataattgtggtaccatggagaaagctctcggtcggcatactcaaatcgatctgttgggctatgggaccaaggcgccttctgttgcgccgctcgcccgcgctgagaaggtcggccgtaccgaaataggcccgcctcctaaaagattattgaagcgacccttcccaagagacgataataaaacatcgtccgagaagacaaccaacatcgaaaactcgtccgcacttctgaggagacaatggggggctccgcacgagcgatacaacatgttgtaccgcgtggaatttgccgggcccgccacttttgcggcgcagaagacgcgaccattcgcttgtgtcgtcatcaagagcttcccgctgaagaaggcagaagaggtgctctactggtgccgacgcgttaggcacagcaacatcatcacggcgct

SEQ ID NO: 38570 - DNA, 1854 bp, Muscodor strobelii
  misc_feature: SGI cDNA ID NO. 573405
  misc_feature: Encodes the peptide sequence at SEQ ID NO 38571
atgctcctgggcctgccccgggacctgatgaagtaccttcctaacaattcgatagatcctgtgctctggcaccccggtcctacgaacttggaggctctgcaaacgtctcccagactacaaagtctaccatacgaactcgttgcctacgtcgtgagagacttggatatcgaagacgtcttcaattggtcgctatgcagcaagcactttcagtacatcattcgagaagaccgcttctgcaagccagtggtcatggctaaagccccaagtacgctggaagccgaagaagcacgggcgacagggcattttgcaagggcccttcggcgcttggcaaagcgacactacgctctgtcgcacgcgtccccctatgttctggggattgttggtcttgctgactcctacgagtttatcgatggcaagatatgctacattattgaatctctgccgaagcgatggctcagaattctcgacgtcaacagatcgaccgactgggaaattgtggtggacattccggcgcttgtcggcattgccgtgcctcgggcggcaaatagttgcaagtataaattcaaggtgctctaccaagcagctggtatcgtcagctgccttttttcttatgcaacagaataccacctgataatattcaatccgaaggagcacgcactattgaaaacatatcaccttgattccgctcaccgcattttcgttaggaataatgacaagtttctatatgtcggcactcacactggagagggcgccgatggcttccgcaaatgggtcctcagaggcttggatctcgtcagtctcgaatggcttcaacaaccgagaatgcatttaaatgatatgtcgggatacgacataggatcatctgtctgttttgagatctttgacgggtatttctacgggctttcgaaccagtctctctttgagattgataacccagactgggcatctcattattactgctttcgctttcccatcgacgagccttcgcgcgagacaacccaagtcatgcacaaagatgacagttggcgacgacaccatgtggaaggcccaattgacgatagatggggctttcttaagtttgagagagacgaagcttcaggtagcatctctatcatagaatgccgtagagagtggctgaagggccgagctggcagtcaacgcacctactacaccactaaagtggactttcgccgagaacatttgcctgcagcagatcagcagccggcaatgaacatcaccgcgggcagatgcaacgactctgtcccttttgatgatgttgtaccacggcgatcggctcatcaagtacatgaaggtgacaatagctcggtaccatcaatgctaccgtaccacgtcaatgagatctctatgtggccacctgaagaggttccgttgcgcctcaaaccgtccttagacaggattcaagacgtcctgcaccctgaaggcaaccaaggctgcattgaagcaattggagacgagcgatctgttatctattcaactagcgacggctctaaagacggagtcaaagtcttggtcattctctccttcgaccccgcaatcaagttcgaggggatggagtttggcggggatattgtgggccaaagaatcgagacgtgcagcgagcgagaagtttcacagcagccaacacatagcgtttcaatgggggctgaaagaagttcgcgctccttgttggcgcaaccagttgatacgacggtattcaaaagcgttgcggctgcgcgatcagcagatcagtttcttccacctagaatcgcccctcctcagaacaccaagtcctgggcttatgtttccagagccatgcatcatgggatgggacaaaagttcttcttcagtttgtga

SEQ ID NO: 38571 - protein, 617 aa, Muscodor strobelii
  misc_feature: SGI Peptide ID NO. 573405
  misc_feature (37)..(84): Pfam Id: PF00646 Pfam Desc: F-box domain
  misc_feature (39)..(401): NCBI GI: 156065869 Blast Desc: SS1G_00945 [Sclerotinia sclerotiorum 1980] gi|154691804|gb|EDN91542.1| SS1G_00945 [Sclerotinia sclerotiorum 1980]
  misc_feature (39)..(505): NCBI GI: 171691779 Blast Desc: protein product [Podospora anserina] gi|170945838|emb|CAP72639.1| protein product [Podospora anserina]
  misc_feature (39)..(396): NCBI GI: 145610965 Blast Desc: MGG_00768 [Magnaporthe grisea 70-15] gi|145018297|gb|EDK02576.1| MGG_00768 [Magnaporthe grisea 70-15]
  misc_feature (39)..(615): NCBI GI: 116179846 Blast Desc: CHGG_00551 [Chaetomium globosum CBS 148.51] gi|88184848|gb|EAQ92316.1| CHGG_00551 [Chaetomium globosum CBS 148.51]
  misc_feature (42)..(524): NCBI GI: 256732063 Blast Desc: NECHADRAFT_93516 [Nectria haematococca mpVI 77-13-4]
  misc_feature (39)..(533): NCBI GI: 46137063 Blast Desc: FG10047.1 [Gibberella zeae PH-1]
  misc_feature (39)..(381): NCBI GI: 85090973 Blast Desc: NCU04576 [Neurospora crassa OR74A] gi|28920054|gb|EAA29439.1| [Neurospora crassa OR74A]
  misc_feature (39)..(381): NCBI GI: 28950016 Blast Desc: [Neurospora crassa]
  misc_feature (69)..(396): NCBI GI: 154301733 Blast Desc: BC1G_10018 [Botryotinia fuckeliana B05.10] gi|150855680|gb|EDN30872.1| BC1G_10018 [Botryotinia fuckeliana B05.10]
  misc_feature (39)..(390): NCBI GI: 226294646 Blast Desc: F-box domain-containing protein [Paracoccidioides brasiliensis Pb18]
MLLGLPRDLMKYLPNNSIDPVLWHPGPTNLEALQTSPRLQSLPYELVAYVVRDLDIEDVFNWSLCSKHFQYIIREDRFCKPVVMAKAPSTLEAEEARATGHFARALRRLAKRHYALSHASPYVLGIVGLADSYEFIDGKICYIIESLPKRWLRILDVNRSTDWEIVVDIPALVGIAVPRAANSCKYKFKVLYQAAGIVSCLFSYATEYHLIIFNPKEHALLKTYHLDSAHRIFVRNNDKFLYVGTHTGEGADGFRKWVLRGLDLVSLEWLQQPRMHLNDMSGYDIGSSVCFEIFDGYFYGLSNQSLFEIDNPDWASHYYCFRFPIDEPSRETTQVMHKDDSWRRHHVEGPIDDRWGFLKFERDEASGSISIIECRREWLKGRAGSQRTYYTTKVDFRREHLPAADQQPAMNITAGRCNDSVPFDDVVPRRSAHQVHEGDNSSVPSMLPYHVNEISMWPPEEVPLRLKPSLDRIQDVLHPEGNQGCIEAIGDERSVIYSTSDGSKDGVKVLVILSFDPAIKFEGMEFGGDIVGQRIETCSEREVSQQPTHSVSMGAERSSRSLLAQPVDTTVFKSVAAARSADQFLPPRIAPPQNTKSWAYVSRAMHHGMGQKFFFSL

SEQ ID NO: 38572 - DNA, 3304 bp, Muscodor strobelii
  misc_feature: SGI EST ID NO. CUFF.92772.0
  misc_feature: Variant of the nucleotide sequence at SEQ ID NO 38570
gcaaatcgagattgtgggcatcatgcagagagtcacatgataaccggaatcttgcccagcactgtaatgctcctgggcctgccccgggacctgatgaagtaccttcctaacaattcgatagatcctgtgctctggcaccccggtcctacgaacttggaggctctgcaaacgtgagcagagccgcaacatggacgccacttaaagcctagataagtgctgcaagccctacacgccatggaggtgctggtaactgttgtctggtgggtgcgcgccttcacaccactgacatcagcatcatacgaggagtgaatggcccgcctgcttttggacggcaaggggttaacatcagacacatgacgaatggctctgttcaggtctcccagactacaaagtctaccatacgaactcgttgcctacgtcgtgagagacttggatatcgaagacgtcttcaattggtcgctatgcagcaagcactttcagtacatcattcgagaagaccgcttctgcaagccagtggtcatggctaaagccccaagtacgctggaagccgaagaagcacgggcgacagggcattttgcaagggcccttcggcgcttggcaaagcgacactacgctctgtcgcacgcgtccccctatgttctggggattgttggtcttgctgactcctacgagtttatcgatggcaagatatgctacattattgaatctctgccgaagcgatggctcagaattctcgacgtcaacagatcgaccgactgggaaattgtggtggacattccggcgcttgtcggcattgccgtgcctcgggcggcaaatagttgcaagtataaattcaaggtgctctaccaagcagctggtatcgtcagctgccttttttcttatgcaacagaataccacctgataatattcaatccgaaggagcacgcactattgaaaacatatcaccttgattccgctcaccgcattttcgttaggaataatgacaagtttctatatgtcggcactcacactggagagggcgccgatggcttccgcaaatgggtcctcagaggcttggatctcgtcagtctcgaatggcttcaacaaccgagaatgcatttaaatgatatgtcgggatacgacataggatcatctgtctgttttgagatctttgacgggtatttctacgggctttcgaaccagtctctctttgagattgataacccagactgggcatctcattattactgctttcgctttcccatcgacgagccttcgcgcgagacaacccaagtcatgcacaaagatgacagttggcgacgacaccatgtggaaggcccaattgacgatagatggggctttcttaagtttgagagagacgaagcttcaggtagcatctctatcatagaatgccgtagagagtggctgaagggccgagctggcagtcaacgcacctactacaccactaaagtggactttcgccgagaacatttgcctgcagcagatcagcagccggcaatgaacatcaccgcgggcagatgcaacgactctgtcccttttgatgatgttgtaccacggcgatcggctcatcaagtacatgaaggtgacaatagctcggtaccatcaatgctagtgcggagcaaaactcatcactgctcttatttccgttcatgtcaagccttcatcgatcttcttgacgatacttcgctcaaaaacgatgacaaacaatgtatacgactcagggccggatgtaggcgttcaaagccgactacgagcgtcgcatcaaattgctgcacatctgactccccgcgccaacctaccgatgtggatacccaacagccgtaccacgtcaatgagatctctatgtggccacctgaagaggttccgttgcgcctcaaaccgtccttagacaggattcaagacgtcctgcaccctgaaggcaaccaaggctgcattgaagcaattggagacgagcgatctgttatctattcaactagcgacggctctaaagacggagtcaaagtcttggtcattctctccttcgaccccgcaatcaagttcgaggggatggagtttggcggggatattgtgggccaaagaatcgagacgtgcagcgagcgagaagtttcacagcagccaacacatagcgtttcaatgggggctgaaagaagttcgcgctccttgttggcgcaaccagttgatacgacggtattcaaaagcgttgcggctgcgcgatcagcagatcagtttcttccacctagaatcgcccctcctcagaacaccaagtcctgggcttatgtttccagagccatgcatcatgggatgggacaaaagttcttcttcagtttgtgatctcgcaaaactttttaattcactgagaaaacggaggattgcaacgtactatccaagcacgactgcagtgttggcatggcatgttgcaatgaattgcttctatgcagcgcccgtcgaggaggaactcatacaggctctcgtaatagaccctggagccaaagactttacgcgttgaagaaagtacttgcgaaatattagtgaagcatgcgggccgatcatcgaagtcaaaaatagagttatgcagtttgtacacttttcggctaaagagtaagcaagaatcatagttctaaaaattagggtctgtgactgattggtacagctacggaagtatcgtgatgtttatacttgcatattgcctccagtgctgaggagccatgatatcgaacgtaattggtatataattcctgatcgcagaggttacgaaacaattcgcatgagcgagacagtgctgttaggtcttttggctgccaaagattggtaatctcgcgatgaagactagagacattgtatggctggtcagacagctgattgaggagcgcaaagagccgggcagagacagagcggccgaaatggatggccaacagcacggtaatctgacgtagaagccacatcaaggtgaatcaaagtctgaatacacattatcattttctacatacatacgagcgtgaactctacagtacacggagaggaagccgcccacccggaacatgatccctctgtatcgcaatgttcacctagcatatatgtagggaagtcttttagtactgtagtataatgatacataatggctgaacatgatatcttgtgcatctacctagagtcgccatgtactgatatgtaaaggatacgagctggtaaaaatccaactactggattgaagattaataaaagccctggaatttcacccttagcaccgacgtaacccctcttaagcacggaatagggcgtccaagacgtattctttgaaggcgcc

SEQ ID NO: 38573 - DNA, 303 bp, Muscodor strobelii
  misc_feature: SGI cDNA ID NO. 573406
  misc_feature: Encodes the peptide sequence at SEQ ID NO 38574
atgaccgagcaaggcgaatcctcgacccaagcagcgaaccgccacatcaccatctgcgaacaagatgctcatacacgccaagtcgaggatgaagcaggcgagaagagcagcagcaccgatatccgcaaactcggattatcagactgcagcgagctgaaggcagcgcttgatttcatcgcgtctcataataggatcgacaaggagaaagggtcgatggatagcaggattgttacatccgcgtatgtgcccacgtacgatttactagaagaatcggcgaagctaactaaattccacaagggctaa

SEQ ID NO: 38574 - protein, 100 aa, Muscodor strobelii
  misc_feature: SGI Peptide ID NO. 573406
MTEQGESSTQAANRHITICEQDAHTRQVEDEAGEKSSSTDIRKLGLSDCSELKAALDFIASHNRIDKEKGSMDSRIVTSAYVPTYDLLEESAKLTKFHKG

SEQ ID NO: 38575 - DNA, 216 bp, Muscodor strobelii
  misc_feature: SGI cDNA ID NO. 573407
  misc_feature: Encodes the peptide sequence at SEQ ID NO 38576
atgattctagaccttgtcgccgcttatgccaaccctcatcttacgccccagcctatttgtctccgtattccatttctctttccagacgtgaagggccagtccacctccgacgagtgtgtagaaactgtgcgagatcttagtgcaatttcaggaggaccctgccatctgtcggttgaggggtgctcatttcctccctgtctgatcacttcggagtga

SEQ ID NO: 38576 - protein, 71 aa, Muscodor strobelii
  misc_feature: SGI Peptide ID NO. 573407
MILDLVAAYANPHLTPQPICLRIPFLFPDVKGQSTSDECVETVRDLSAISGGPCHLSVEGCSFPPCLITSE

SEQ ID NO: 38577 - DNA, 1540 bp, Muscodor strobelii
  misc_feature: SGI EST ID NO. CUFF.92796.0
  misc_feature: Variant of the nucleotide sequence at SEQ ID NO 38575
ctgtcaccaggccccctgtcctttttacaagtcgtgtcacgtgcttctatcgtcgcgctgtcctcgtcccgcgaacatgattctagaccttgtcgccgcttatgccaaccctcatcttacgccccagcctatttgtctccgtattccatttctctttccagacgtgaagggccagtccacctccgacgagtgtgtagaaactgtgcgagatcttagtgcaatttcaggaggaccctgccatctgtcggttgaggggtgctcatttcctccctgtctgatcacttcggagtgacgcgatggagatcgaaacgcaaggcattccggcaactcgcgtccgcaacaggatcccttcatattcgagtacgaggcttcttgcaggattcggcatcgtcttggtgacgtcgaacatggatgggatacgcgagccgcgaataaagagttctgaaaccatccgattttatttccagagcaggaaatattctataggatttactagaaatggcttgatgtaagcacatctaggaggctcctaggcaactcgcacaacccccagctgctatctgggcacgataccgcccgccttggaagcatctatcaagacatagtgacagactatgcatggcccttgccaaatcggcccctggtcgctcaacagggcaggggaaggggtgctctctgctgaataagaaaaatttggctcgtcacgagggaatcgacactggctgagagggatgatgagcccatatttcctgttcaggaacgaattggcaccttacctacggctcagtgcccctttctccgatccttacacagtccagccaaggctgttggacgaaacccgctcttcacgctcaaaggtccggaaacggcgataccagactgaagaagtcctacgctgctgtgcatgcaaggaagctagccatctacgactgatgggccggtcatgaggcccttatagataacctattaaatatattcactcccttggagagaatctggctttagaacacgtgcttttctatgtatgcttgggagcgccatgcattatttcaataacctgatacagatagaaaaattctctgtcttctcgcccccgcagcagaagatgccctaatgaggcatatttgagatataccaatcttggtgtgacggtgatacacctcgatatcgcgccggcggcctggagctaaacttattcgacgccgcaagcaataatcactaatttgaatcactatcgcatcccggttgcctatctaccttgccgtcgtgaaaggttccgcacccgactgtgcctacgtgtctggcattctgcaccgccatggccatagatttgccctttttagcaacgatgaccagggtcgaggctcctcgcttggccttcttggatacgtccacaccggcccaggatttatatgccatcgttcttattccacatcagaacctggtctcaatggcttcaaaatccggcaggaggcccctatctggatcatgggtgcctgctagggtctttatcctagtttctagggcgatacggactgcg

SEQ ID NO: 38578 - DNA, 660 bp, Muscodor strobelii
  misc_feature: SGI cDNA ID NO. 573408
  misc_feature: Elevated expression when VOC is produced
  misc_feature: Encodes the peptide sequence at SEQ ID NO 38579
atgagcgccggaactggctttggctcatcgccaaggagggaagaagtaaaaaaggtcgacccgaaggagtccctcgtcgaggggattgcgaaggtattcaataatcctaaacatgccgacgtgaagatttacatcggcgagtacgagtttcccgcccatgccgtcgtccttgcgagccgaagtctgtatttcgagaaggctctaggtgatgctttccgcgaggggcagacgaagctgtttcgtttcgaagaaaagggcagtatacatgcgcactggagagtgttcgagtacatgtatactggcgactactcggaaaacgccgcgcaagagctcgcaagtcaagatgacgacgagctagttaaagatgtccgcgtgtatgtggcagcggactatttcctaatggaggatttgaaggagcatgcgctggggagattcaagttaaaactacagcagctttggattagcgagcttatggtcgactgtattcgagagatctacgcgactacttcgggaattggatgcaagcttcgaaatgttgcggttgacattgcgaaagaccaccggtccgagctttggaagaggcatgcttttcgggaccttgtgcacgagggtggtgatttcactctagagctgatggggaaattatgctttgactcgtga

SEQ ID NO: 38579 - protein, 219 aa, Muscodor strobelii
  misc_feature: SGI Peptide ID NO. 573408
  misc_feature (33)..(149): Pfam Id: PF00651 Pfam Desc: BTB/POZ domain
  misc_feature (24)..(214): NCBI GI: 261194366 Blast Desc: BDBG_06436 [Ajellomyces dermatitidis SLH14081] gi|239588602|gb|EEQ71245.1| BDBG_06436 [Ajellomyces dermatitidis SLH14081]
  misc_feature (20)..(207): NCBI GI: 240273973 Blast Desc: BTB/POZ domain-containing protein [Ajellomyces capsulatus H143]
  misc_feature (20)..(211): NCBI GI: 225557917 Blast Desc: BTB/POZ domain-containing protein [Ajellomyces capsulatus G186AR]
  misc_feature (30)..(145): NCBI GI: 226285169 Blast Desc: [Paracoccidioides brasiliensis Pb01]
  misc_feature (30)..(145): NCBI GI: 226290105 Blast Desc: [Paracoccidioides brasiliensis Pb18]
  misc_feature (30)..(145): NCBI GI: 225682675 Blast Desc: [Paracoccidioides brasiliensis Pb03]
  misc_feature (14)..(191): NCBI GI: 242825079 Blast Desc: BTB/POZ domain protein [Talaromyces stipitatus ATCC 10500] gi|218712184|gb|EED11610.1| BTB/POZ domain protein [Talaromyces stipitatus ATCC 10500]
  misc_feature (19)..(212): NCBI GI: 46115274 Blast Desc: FG03479.1 [Gibberella zeae PH-1]
  misc_feature (12)..(187): NCBI GI: 255941510 Blast Desc: Pc16g12250 [Penicillium chrysogenum Wisconsin 54-1255] gi|211586147|emb|CAP93895.1| Pc16g12250 [Penicillium chrysogenum Wisconsin 54-1255]
  misc_feature (1)..(186): NCBI GI: 146323187 Blast Desc: BTB/POZ domain protein [Aspergillus fumigatus Af293] gi|129556508|gb|EAL86499.2| BTB/POZ domain protein [Aspergillus fumigatus Af293]
  misc_feature: Useful for introducing or modulating the production of volatile compounds
MSAGTGFGSSPRREEVKKVDPKESLVEGIAKVFNNPKHADVKIYIGEYEFPAHAVVLASRSLYFEKALGDAFREGQTKLFRFEEKGSIHAHWRVFEYMYTGDYSENAAQELASQDDDELVKDVRVYVAADYFLMEDLKEHALGRFKLKLQQLWISELMVDCIREIYATTSGIGCKLRNVAVDIAKDHRSELWKRHAFRDLVHEGGDFTLELMGKLCFDS

SEQ ID NO: 38580 - DNA, 4315 bp, Muscodor strobelii
  misc_feature: SGI EST ID NO. CUFF.92840.0
  misc_feature: Variant of the nucleotide sequence at SEQ ID NO 38578
cccgcgcgtcttactaccgcaggtgttcaacccatcatcaggccgatcctcacatttgaaaagctacaaatcatttctttcgcgaccttgctgcactggcaagcctgtaccatcaatgtggcaccgcagcaacaaaattatgctttccgaagagtagaactgttgtagtcgtcgacggagacctctagcgtatcgcgttatctgtcgaggagctcctgcgctgcgatgagttgtacttcggcggtgcagtcccatccggcaatgcagctggtcaatatccttagcggcagctactcttgaatcccaagagtcaatcgccgcgtagaacatttatctaaaaacccgtagaaataaaaatacgaaatgttggaatagcctgacagtctaggtgggcgagaggtctacgccactttgccagcctgcaatagatgccgatcgaaagcgacgagagggcatagcacatgggtgcatgcaggctggccgaatgggccaccggtatctattgagggtgctcgcgatttccctcgattggtcgacgtcgatatgaaatgcacttttatttcgtcaccagtcctttcgtagaggcctacgctggacggtgtctgggtagcgattggttcgagttagtatggtggtggcgatgcgcaagagaaaaatgcaccgccgtgctctgatatgccttctagtccgtggcatttcagccgtcgatagcgcttcgcttggctgtggcggatgcaacttaatgcaggctacgagatgctgttggcaaaggttcctgggaggaggcgcaagatagaagatattgtggtgtgggtgttcatagatcggcatagaaatacttctagcgggatcactatgaagacactgataaatgtcggctatggcgattgtattctgttaagattactgcgtacgttcctaggcggactgagttgccttgcttcttcgacagtcaactgataccaatgggtacgcaagtatgtgtggagtcggcgctggaaaggatctgtatgggtccggatgtcgagctcgatctgttcttaccattcgcatgttacatttctcatatagactaagtaaggtccagccgcatgctggactgtatctcatcgtccaggagcgacagtttaccatggccatgatgtgtgcgtaggggatccgtctgacatttatgggcggtgacggccatcgttcgctatttcgcgatgcctggcttggggtgatagcgctgtgttgctatcttggcgtgccagagcctacctacaggcagccttcagtgacaaggataaatcgggttgcgctctataaattgccgacgaaataatggattgtcaagtggtggaactcacagcgccccatcgttagctaacccgaacatacgcgatgcgatgacttcggcatatcgtcccgatactatagtacataagtttcggactggaaaaatgctacggaaggcaatactctcaccctttacggatttcgtaggttcaaaacaacccgtctattgaacctccgcttcctcgaagacgagaccgccgagtcggaccatggtacctaccaggctgcccgtcctgccctggcctgtgaccctttatcgctagattgacagtacagcaaaagaggtgagagtatcataaacgagttaatcattacttaaagaatatagtgcgcacgacagatacctgatagtgtgctcatcgcatttcactacatctctctggagagtgcaaccctccagtcaaaaccgtgacgcagtttcttgcgacgagaatgtgggtatttacgccaaacttcctgccggatgtccaataggcggcggccatctgtagcacttagcttggtatgatttgtagcagcattctgacgtttccacttgacccttctttccgccccgactgccattttatgcgcgagttctccatgtaaagctacttgagcgaagcaatgaatagacgctcgtcggtttatatggccgcccgccgttgacccttgcctcatgctgcattcctttgaagcacggcaagccataggaaagtagcgagatatgttctgggagatagagtcaaaattttgctaatgaaccgtcaattatcacggcagaccacaatgagcgccggaactggctttggctcatcgccaaggagggaagaagtaaaaaaggtcgacccgaaggagtccctcgtcgaggggattgcgaaggtattcaataatcctaaacatgccgacgtgaagatttacatcggcgagtacgagtttcccgcccatgccgtcgtccttgcgagccgaagtctgtatttcgagaaggctctaggtgatgctttccgcgaggggcagacgaagctgtttcgtttcgaagaaaagggcagtatacatgcgcactggagagtgttcgagtacatgtatactggcgactactcggaaaacgccgcgcaagagctcgcaagtcaagatgacgacgagctagttaaagatgtccgcgtgtatgtggcagcggactatttcctaatggaggatttgaaggagcatgcgctggggagattcaagttaaaactacagcagctttggattagcgagcttatggtcgactgtattcgagagatctacgcgactacttcgggaattggatgcaagcttcgaaatgttgcggttgacattgcgaaagaccaccggtccgagctttggaagaggcatgcttttcgggaccttgtgcacgagggtggtgatttcactctagagctgatggggaaattatgctttgactcgtgattgtaaaagtagcggtactcgatggtaatttattttattcatgcgagctctgttctctctgtccgtggccactacacggctgccacggcgatatgccatgtacgcatggtcaaattgcttagcatccacggcaaggcttcgctgttcaaagtccttccatgcctgagtgccagctcaaacctccccatcctcgaagtccgaagggtgatgggacgtggatcggtgataagtctctgctttaactcgcgttgcggcataattgtcgtcgcgtaagatctggcgcgttggacgtttcggcggggcggtcgcgaggggggagaagtggttcgtagtgggccttggccgtggcgccgtcttcgaagccagctcgggcagcaagcttgtcccagtcgacctaacactgcattagctgccacgaagggggcctggagatagggagtatgagtgaggaacgcacaactggcttcgtcttaaagcattcctagagcttggcgacagccatcatgtcctttgcggtgatcttctcggacgccatgctgatttgtcgcggagattgactcgggataattgatgaccgagagtgcgtgaatgtttttgagaggcttcgttgtcaagtgaggtgcagatacagatgagaatgcggatacaagtgagggaggtcgatgggatccaatacaagatggatgttgcagtgtagaaagggtcgactggtgtgggggatacaggagtgagggaaagagtagtaggaggattggtgggatctaatcgcaggccgcgccaaggtgcctgtaggttaggtgagtagcgggagtagctgccccgcccgttcgcctagatgaccccctcagctgcaactccctacacactgcctatggtgggctagatatggtactctcccgcgctacgttgatctcgttgtcagaaggagttgcaatcaaacaatggaatgcagacttggtattctgattttcgtgccagtagattattacctactaacccctcgggcacgcttcgccagaggcatatctatacctatatctatcttatctactagatgacggtaacatgtcgcgttgatatcggttgggattgccaggtacaagaaagtcatccgtggggtcctccaggtttgtgaatgggacttgtacacctcaaacagtcctcgtggaggaggctttgctgccgtgttccgaagacctcgtttatgatgtgctcttccggaaatatttggagacttcccctttgtcatcctgatcatcgtttagctcactttcagcagcgaacctaactttccgttccgtcggctgagccgttatcctgctacgaagcttctctactgtcgatggagtattttggtcgctcgcgcccttgcttgttgtagctagttcgagtctgcgctcaccagagaggaacgaagaagcttcagggccaagctatgcgcgttgttagcaaaaacattcgaaagtaggagtataatcgtacccgaagatactgtgtagctatcccgctgctacgatagataatattttcttctttcaatacatcatcg

SEQ ID NO: 38581 - DNA, 1848 bp, Muscodor strobelii
  misc_feature: SGI cDNA ID NO. 573409
  misc_feature: Encodes the peptide sequence at SEQ ID NO 38582
atggcggcaagtctcaagcttccagacttcaatgtcttcaacgcactcggactacaatcatcgcaaagtatcacacatgatgcatcgagaaaggcctacaatagtgccctcctccacgttcaccccgacaagaacccacccagagagcacttccccagctatgcccaagtgcaagaagcatatgagtttctcggaggcaacgaagaactgctcgcagacggtcgagttttccaacccaacaggcttctttccctcgttctcagtctggactttggcagctccatgtctgccatccaggccgccagcatcgatgacaatgccaactttcacatctctcagtatccgcgtgcaaaatccggaagctcgatgcgcggtggcgatctgaaggaggtgccgactgttgcatactacaagccgaacggccgtttcgccattctcgaattcggctacccacctagtaatcgcggcgattgggaggcattaggtcacctcaaagctctcatcgacccccagcagagcgaatcgccaccagccaagactctacgcgagaagttacaaggaagatacaaagtcgacgatgtcttggtgggtattttgaccttcctccacgaccacactcgcgaccagctgcgaaaagtctgcggcagatacgacgtcgccggccttgttgtcgccatcccatgctcctacggaagttgcgctcagaaaaggtacgagggtctattaggtcgagcaggatggccggtagaggtacttcagtgggtttgggaacctgaagcggtcggcttcagtgccatgatggatgcgcccatactgcgaagcttgtcacgggaaactggcggagcatcagtattggtcatcgacttggggggcctgacatgcgatgctatcggtctcgccatagaatcgcctggccacgaagtaataacccatattacccaagagcttgcccgtcctgtcgggcacctcgggcggctctgggatggcgagacatccactgctctggacaaagctgacgatatcagtctgctcggccgggtcagcatcgcccgggagcaggtccaggacatcctcgatgccacatttagcggcgtgttcactttcttcgaggaacagcccggtccaatcttcaacagccggacatgggccgctgttgtcgtatcgggaggcacatcccagtcggagtttgtaaaagccagaatgcgacagattctcgctggctatgatcatttagtattgattgacaacttgccagaacaggccacggttgtcgcccgcggagctttagaaagctttctcgtatcccttaggcgtatgtacaacttgccatctgaagtaacagcaatgtgtctcggtcttcgtgttattggctctacaacgcgagttgaccatattctgaaagctcggcgagccgagctcgctagcatggacaggcgtgtcatttctttcgttctgaacatggagcagagcaccatccaaccatatatggacgaccttacagcccgacacaattcgctgagattcttttaccatcagcagcacagtacaaggcgaggcaaccgagcatcatgccaagaccccattgatatggatgctatcgacatgtctatctcgaaggaagatgcaaaactcattgcactatccgaattcgaacactcgcgccattattctagcaccatgctgggtatctcctgccatcctaagtcggcggcggcgatcgaagtcgtcctctggtacaagcttccgccgcgtgtgaagggaggatggtggcaacttagcagacaagcgtacaaattcgttatagactccggcagtggtcgagttattcttgaacttgaggccatatag

SEQ ID NO: 38582 - protein, 615 aa, Muscodor strobelii
  misc_feature: SGI Peptide ID NO. 573409
MAASLKLPDFNVFNALGLQSSQSITHDASRKAYNSALLHVHPDKNPPREHFPSYAQVQEAYEFLGGNEELLADGRVFQPNRLLSLVLSLDFGSSMSAIQAASIDDNANFHISQYPRAKSGSSMRGGDLKEVPTVAYYKPNGRFAILEFGYPPSNRGDWEALGHLKALIDPQQSESPPAKTLREKLQGRYKVDDVLVGILTFLHDHTRDQLRKVCGRYDVAGLVVAIPCSYGSCAQKRYEGLLGRAGWPVEVLQWVWEPEAVGFSAMMDAPILRSLSRETGGASVLVIDLGGLTCDAIGLAIESPGHEVITHITQELARPVGHLGRLWDGETSTALDKADDISLLGRVSIAREQVQDILDATFSGVFTFFEEQPGPIFNSRTWAAVVVSGGTSQSEFVKARMRQILAGYDHLVLIDNLPEQATVVARGALESFLVSLRRMYNLPSEVTAMCLGLRVIGSTTRVDHILKARRAELASMDRRVISFVLNMEQSTIQPYMDDLTARHNSLRFFYHQQHSTRRGNRASCQDPIDMDAIDMSISKEDAKLIALSEFEHSRHYSSTMLGISCHPKSAAAIEVVLWYKLPPRVKGGWWQLSRQAYKFVIDSGSGRVILELEAI

SEQ ID NO: 38583 - DNA, 3233 bp, Muscodor strobelii
  misc_feature: SGI EST ID NO. CUFF.92848.3
  misc_feature: Variant of the nucleotide sequence at SEQ ID NO 38581
cctggctgtacctaattgaaaatattacggggcaatccatctaggcagcactttcccaagcagcaacatccacctgcacccaacccgtacctttcttttcttacacataatcaaggcagacacgcgccaccgccctttcctagtgagccgctctgcatcggtcattctgatcgccgtcgtatttctccgtgcctacagagacgctgcatgtccaccgcagccgagccaccggtcccaagcctcatcctcgataagtcaagcagcacttgccgatagctagccatggcggcaagtctcaagcttccagacttcaatgtcttcaacgcactcggactacaatcatcgcaaagtatcacacatgatgcatcgagaaaggcctacaatagtgccctcctccacgttcaccccgacaagaacccacccagagagcacttccccagctatgcccaagtgcaagaagcatatgagtttctcggaggcaacgaagaactgctcgcaggtaggttgcactgggcttaggcggaacagtcatcaacctacgagcaaaccttcttccccgagttcgcatatggagacggtcgagttttccaacccaacaggcttctttccctcgttctcagtctggactttggcagctccatgtctgccatccaggccgccagcatcgatgacaatgccaactttcacatctctcagtatccgcgtgcaaaatccggaagctcgatgcgcggtggcgatctgaaggaggtgccgactgttgcatactacaagccgaacggccgtttcgccattctcgaattcggctacccacctagtaatcgcggcgattgggaggcattaggtcacctcaaagctctcatcgacccccagcagagcgaatcgccaccagccaagactctacgcgagaagttacaaggaagatacaaagtcgacgatgtcttggtgggtattttgaccttcctccacgaccacactcgcgaccagctgcgaaaagtctgcggcagatacgacgtcgccggccttgttgtcgccatcccatgctcctacggaagttgcgctcagaaaaggtacgagggtctattaggtcgagcaggatggccggtagaggtacttcagtgggtttgggaacctgaagcggtcggcttcagtgccatgatggatgcgcccatactgcgaagcttgtcacgggaaactggcggagcatcagtattggtcatcgacttggggggcctgacatgcgatgctatcggtctcgccatagaatcgcctggccacgaagtaataacccatattacccaagagcttgcccgtcctgtcgggcacctcgggcggctctgggatggcgagacatgtgtttgagggctggattgcccaaaactgtccggatcatggccaacacgtcggacgactgtttgacgacttttgggatcaagccactgctctggacaaagctgacgatatcagtctgctcggccgggtcagcatcgcccgggagcaggtccaggacatcctcgatgccacatttagcggcgtgttcactttcttcgaggaacagcccggtccaatcttcaacagccggacatgggccgctgttgtcgtatcgggaggcacatcccagtcggagtttgtaaaagccagaatgcgacagattctcgctggctatgatcatttagtattgattgacaacttgccagaacaggccacggttgtcgcccgcggagctttagaaagctttctcgtatcccttaggcgtatgtacaacttgccatctgaagtaacagcaatgtgtctcggtcttcgtgttattggctctacaacgcgagttgaccatattctgaaagctcggcgagccgagctcgctagcatggacaggcgtgtcatttctttcgttctgaacatggagcagagcaccatccaaccatatatggacgaccttacagcccgacacaattcgctgagattcttttaccatcagcagcacagtacaaggcgaggcaaccgagcatcatgccaagaccccattgatatggatgctatcgacatgtctatctcgaaggaagatgcaaaactcattgcactatccgaattcgaacactcgcgccattattctagcaccatgctgggtatctcctgccatcctaagtcggcggcggcgatcgaagtcgtcctctggtacaagcttccgccgcgtgtgaagggaggatggtggcaacttagcagacaagcgtacaaattcgttatagactccggcagtggtcgagttattcttgaacttgaggccatataggcagagatagtccgttggacgtaaattttgctgacgtatctacttgcaagctatatctgcgaagtcgctcatgcatattaggatgggctttttttcgttgtaagctatagccgacgacaataccggtaacacaggatgtcttagctatatgagctatttcgtcggcatgctccgtacgcatgcagctagtatgcagtgatgtcgatatcgaactcgggtggcgccagactcattatggatgtcaggcatcggaacaacttgcagactgttatcccagttgttacaagtggcgatagagacaatgccaatttctaacgctcttgcgggttaagggtgacgtaaacagtagaactgacttcctaacttcggattacaactaatggatggtgtaatcagccagcaaatgcgatacaatactgtatatacgtagattgcaaggatatagagaaagagtcgaagcatatcaagaatctacagtaatatataaatggaaacttctacgggggctgacaaaaagtgctagataatctatgttgtagcaactgcttgcgagctatcatggtgcacaggacaatcagtagcaccatatggcacttggcctgtagatcccaagctttgcgtctagcagcggtctctgggtgtaaatacacatactttctggcaaccaaagctgaatgcctcatagttacagtaatatggcgctgtgatgaaaacctatgagttattacgtcctgagcgaacgctagcattatcatccacagcatgatgccgcctgcgccaggaattttccgggcggcgaccaactccaatcaatcgtagtaaaatatgtgctgtaacacggtcgatacgtctcgtccgcggtggttggcgctttgcgatggctaattcatattgctgcatcatggtcgggtggtcgacaatctcttctgtcgtaaacacgctgtca

SEQ ID NO: 38584 - DNA, 1914 bp, Muscodor strobelii
  misc_feature: SGI cDNA ID NO. 573410
  misc_feature: Encodes the peptide sequence at SEQ ID NO 38585
atggcagcaagtctcaagcttccagacttcggattacgaccatcgcaaagtatgaaacatgacgtactgagaaaagcctataggagagccctcctccacgttcacccagacaagaatccacccagagagcacttccccagctatgcccaagtgcaagaagcatatgagtttctcggaggcaacgaagaactgctcgcagacggtcgagttttccaacaaaacaggcctctttccctcgttctcagtctggactttggcagctccatgtctgccatccaggccgccagcatcgatgacaataccgtctttcacatctctcagtatccgcgtgcaaaatccggaagctcaatgcgcggtggcgatctgaaggaggtgccgactgttgcatactacaagccgaacggccgtctcgccattctcgaattcggctacccacctagtaatcgcggcgattgggaggcattaggtcacctcaaagctctcatcgacccccagcagagcaaatcgccaccagccaagactctacgcgagaagttacaaggaagatacaaagtcgacgatgtcttggtgggtattttgaccgtcctccacgaccacactcgcgaccagctccgaaaagtctgcggcagatacgacgtcgccggctttgttgtcgcaatcccatgctcctacggaagttgcgctcagaaaaggtacgagggcctattaggtcgagcaggatggccggtagaggtacttcagtgggtttgggaacctgaagcggtcggtttcagtgccatgatggatgcgcccgtactgcgaagcttgtcacgggaaactggcggagcatcagtattggtcatcgacttggggggggctgacatgcgtcaggatgctatcggtctcgccatagaatcgcctggccacgaagtaaaaacccatattacccaagagcttgcccgtcctgtcgggcacctcggcggctctgggatggcgagacatgtgtttgagggctggattgcccaaaactgtccggatcatggccaacacgtcggacgactgtttgacgacttttgggatcaagtcactgctctggacaaagctgacgatatcagtctgctgagccaggtcagcatcgcccgggagcaggtccaggacatcctcgatgccacatttggcggcgtgttcactttcttcgaggaacagctcggtccaatcttcaacagccggacatgggacgctgttgtcgtatcgggaggcacatctcagtcggagtttgtaaaagccagaatgcgacagattctcgctggctatgctcatttagtattgattgacaacttgccagaacaggccacggttgtcgcccgcggggccttggaaagctttctcgtatccctcaggcgtatgaacaacttgccatctgaagtaacagcaatgtgtctcggtcttcgtgttattggctctacaacgcgagttgaccatattctgaaagctcggcgagccgagctcgctagcatggaccggcgtgtcatttctttcgttctgaacatggagcagagcaccatccaatcatatatggacgaccttacagcccgacacatttcgctgagattcttttaccatcagcagcacagtacaaggcgaggcgaccgagcatcatgccaagactccattgatatggatgctatcgacatgtctatctcgaaggaagatgcaagattcattgcactatccgaattcgaacactcgcgccattattctagcatcatgctgggtatctcctgccatcctaagtcggcggcgatcgaagtcgtcctctggtacaagcttccgccacgcgtgaagggaggatggtggcaacttagcagacaagcgtacaaattcgttatagactccggcagtggtcgagttattcttgaacttgaggccatgtag

SEQ ID NO: 38585 - protein, 637 aa, Muscodor strobelii
  misc_feature: SGI Peptide ID NO. 573410
  misc_feature (10)..(67): Pfam Id: PF00226 Pfam Desc: DnaJ domain
  misc_feature (21)..(58): Pfam Id: PF00226 Pfam Desc: DnaJ domain
MAASLKLPDFGLRPSQSMKHDVLRKAYRRALLHVHPDKNPPREHFPSYAQVQEAYEFLGGNEELLADGRVFQQNRPLSLVLSLDFGSSMSAIQAASIDDNTVFHISQYPRAKSGSSMRGGDLKEVPTVAYYKPNGRLAILEFGYPPSNRGDWEALGHLKALIDPQQSKSPPAKTLREKLQGRYKVDDVLVGILTVLHDHTRDQLRKVCGRYDVAGFVVAIPCSYGSCAQKRYEGLLGRAGWPVEVLQWVWEPEAVGFSAMMDAPVLRSLSRETGGASVLVIDLGGADMRQDAIGLAIESPGHEVKTHITQELARPVGHLGGSGMARHVFEGWIAQNCPDHGQHVGRLFDDFWDQVTALDKADDISLLSQVSIAREQVQDILDATFGGVFTFFEEQLGPIFNSRTWDAVVVSGGTSQSEFVKARMRQILAGYAHLVLIDNLPEQATVVARGALESFLVSLRRMNNLPSEVTAMCLGLRVIGSTTRVDHILKARRAELASMDRRVISFVLNMEQSTIQSYMDDLTARHISLRFFYHQQHSTRRGDRASCQDSIDMDAIDMSISKEDARFIALSEFEHSRHYSSIMLGISCHPKSAAIEVVLWYKLPPRVKGGWWQLSRQAYKFVIDSGSGRVILELEAM

SEQ ID NO: 38586 - DNA, 5186 bp, Muscodor strobelii
  misc_feature: SGI EST ID NO. CUFF.92844.0
  misc_feature: Variant of the nucleotide sequence at SEQ ID NO 38584
ccttcttcgggcggaagatttgaaggagtgtattcgtcatcaggcataggggcaacaaaggctgcaacctggaaacaactgttcagtgcattgttatctggcgatgcttccggattcgatttacagatgccgatgggttcaggcgtacgactaggattatgaacgtagtgggaagcctcattaccgctgtaatctctcgggtagatcgcacttcaaacagctcgtctgggacggaccttgtgttgttttcgctggcgctgaaaagccgtatttgttccctggttggggactctccacccgcgatagctcgtgtgcgggttagagcggcagagctagatggtccatgttagcggttatgcggatgctgatcttggcttcgcaacatacacgcgctttcgagccggcatcacgaccgatcgcagtacatggccaaaattagttctatcactccgcgaatgatgcaggctctcgacaaaatagaatgagaagaaaatagatgccggtgggtgggcgccaattcgtctcatgaccagatagggcatggtgatggcgatggacctcctcatgggggtctactgttgatggcgcaatggttcgagacgagaaggtatggctcgaatatactgaaccagaatgtctagttggccgtcgccgtgcggtcgcagtcggtggtcgacgatcttagttgctcggcatgttggctcaatgcgagtctgggtccctcgcgtgcgcaccgaggccattgtgtttgaaatgcgtgcgtcggcataaggagcagaagggtttgaagatctattctgcttttactttttcttcttctcacgcagagctggagctctaccggataattagtgaggtggagtctagaagatacgatgtttattgttcctggctgtacctaattgaaaatattgtggggcagtccatccaggcggcactttcccgaacagcaaacatccacctgcacccaacccgtacctttcttttcttacacataatcagggcagacacgcgccaccgccctttcctagtgagccgctccgcgtcggtcattctgatcgccgtcgtatttctccgtgcctgcagagacgctgcatgtccaccgcagccgagccaccggtcccaagcctcatcctcgataagtcaagcagcacttgcccatagctagccatggcagcaagtctcaagcttccagacttcggattacgaccatcgcaaagtatgaaacatgacgtactgagaaaagcctataggagagccctcctccacgttcacccagacaagaatccacccagagagcacttccccagctatgcccaagtgcaagaagcatatgagtttctcggaggcaacgaagaactgctcgcaggtaggttgcactgggcttaggcggaacagtcatcaacctacgagcaaaccttcttccccgagttcgcttatgcagacggtcgagttttccaacaaaacaggcctctttccctcgttctcagtctggactttggcagctccatgtctgccatccaggccgccagcatcgatgacaataccgtctttcacatctctcagtatccgcgtgcaaaatccggaagctcaatgcgcggtggcgatctgaaggaggtgccgactgttgcatactacaagccgaacggccgtctcgccattctcgaattcggctacccacctagtaatcgcggcgattgggaggcattaggtcacctcaaagctctcatcgacccccagcagagcaaatcgccaccagccaagactctacgcgagaagttacaaggaagatacaaagtcgacgatgtcttggtgggtattttgaccgtcctccacgaccacactcgcgaccagctccgaaaagtctgcggcagatacgacgtcgccggctttgttgtcgcaatcccatgctcctacggaagttgcgctcagaaaaggtacgagggcctattaggtcgagcaggatggccggtagaggtacttcagtgggtttgggaacctgaagcggtcggtttcagtgccatgatggatgcgcccgtactgcgaagcttgtcacgggaaactggcggagcatcagtattggtcatcgacttggggggggctgacatgcgatgctatcggtctcgccatagaatcgcctggccacgaagtaaaaacccatattacccaagagcttgcccgtcctgtcgggcacctcggcggctctgggatggcgagacatgtgtttgagggctggattgcccaaaactgtccggatcatggccaacacgtcggacgactgtttgacgacttttgggatcaagtcactgctctggacaaagctgacgatatcagtctgctgagccaggtcagcatcgcccgggagcaggtccaggacatcctcgatgccacatttggcggcgtgttcactttcttcgaggaacagctcggtccaatcttcaacagccggacatgggacgctgttgtcgtatcgggaggcacatctcagtcggagtttgtaaaagccagaatgcgacagattctcgctggctatgctcatttagtattgattgacaacttgccagaacaggccacggttgtcgcccgcggggccttggaaagctttctcgtatccctcaggcgtatgaacaacttgccatctgaagtaacagcaatgtgtctcggtcttcgtgttattggctctacaacgcgagttgaccatattctgaaagctcggcgagccgagctcgctagcatggaccggcgtgtcatttctttcgttctgaacatggagcagagcaccatccaatcatatatggacgaccttacagcccgacacatttcgctgagattcttttaccatcagcagcacagtacaaggcgaggcgaccgagcatcatgccaagactccattgatatggatgctatcgacatgtctatctcgaaggaagatgcaagattcattgcactatccgaattcgaacactcgcgccattattctagcatcatgctgggtatctcctgccatcctaagtcggcggcgatcgaagtcgtcctctggtacaagcttccgccacgcgtgaagggaggatggtggcaacttagcagacaagcgtacaaattcgttatagactccggcagtggtcgagttattcttgaacttgaggccatgtaggcagaggtagtccgttggacgtaaattttgctgacgtatctacttgcaagttatatctgcgaagtcgctcatgcatattataatgggctttttttcgttgtaagctgtagccgacgacaataccggcaacacaggatgtcttgagctatttcgtcggcatgctccgtacgcatgcagatagtatgcagtgatatcgatatcgaacccgggtggcgccagactcattatgggtgttaggcatcggaacaacttgcaaacgaacaacttgcaaacgaacaacttgcaaacgaacaacttgcaaactcattatcccagttgttacacgtggcaatagagacaataccaatttctaacgctcttgcgggtcaagggtgacgtaaacagtagaactgacttcctaacttcggaatacagctaatggacggtgtaatcaaccagccaatgcgatacgatactgtttatacgtagtttgcaaggatatagagaaagagtcggagcgtatcaagaatctacagtattatataaatggaaacttctacgggggctgacagaaagtgctcgataatctatgttgtagcaactgcttgcgagctatcatggtgcacaggacaaccagtagcaccatatcgcctgtgcgcttcagagtgggctgcgggtttcaaacaccctgctacttcggccttgcttgtcgcctgcttaagacacaaagtccagatcccagagtttttgaagagggttgtaatatgtatctccttgacgagcgctaacgcttatactacgcagcactggagcgagctgagcttttgttaaaaattgagcgcgatcgctgtccaatcagtctgaatcactactccaatgacaacctgcaggagaaacagggcagtagattgatgcgcgcgatagaggagctgagaatcgacgagtcggcatcccccttgcttacgaagctcccgatgatgaagtgctgcagatctcgaagtcttggctccgaagcctggccgtagataaggcgaacgcagagcatgatcgcgagtatatgcacgacgtcttatatagctattataaagtttcgcggaagcgcttcgtggacgtggtctaccagcaagcggtacggcttttgggagaaatacgtatccgttgcaacgtactgcgagaatattgtccttttctttctctaatagccgcccgaaagcccggcattccgcgtagcaggggtccagctgatatcgcacaacttgatcgctcggcgtcgggcaagaacggccggatcccatcaagacgaaaaagaattaaacgtaatcgaggtcagagcgatacattatttgcaaggttgtttgtcacaacttacaatcttcatggcatatcgtaaagcaaagctgtgacgggcgttaactaataggggaaaggacctttgtgtggacaggcacccaccgttccctacgttgggtgagcatggtttgaccgaacatccgaccgacaaagtgatcgtgtaaacacgagcgcgcagccttagttgtacggcactggacaaaagaataacgatagaatattcaatataataataagaaatgcatagaaaatccacgttacgtatggcatatggctcaactttgcgtactcgacaacaaataccggcgttttgctcacgataaacaagcagattcattgtttctactcgtgtttgataaggaactagaccccaagctatgcgtttagcagcggtctctgggtgtaaatatacatatttcttggcacccaaagctgaatgctttatcgttaatatggtgctctaatggaaacctatgagctactacgtcttgaccgaacgctagcattatcatccatagcatgatgccgcctgcgccaggaatttcccgggcggcgaccaactccaatcaatcgtagtaaaatatgtgctgtaacacgatcgatacgtttcgtccgcggtggttgccgctttgcgatggctaattcatattgctgcatcatggtcgggtggtcgacaatctcttctgtcgtaaacacgctgtcc

SEQ ID NO: 38587 - DNA, 1824 bp, Muscodor strobelii
  misc_feature: SGI cDNA ID NO. 573411
  misc_feature: Encodes the peptide sequence at SEQ ID NO 38588
atggaccggaagaagctgaagcggacggattactatgtggcctggatctgccccgccgccgccgtcgagctgttgccttcgcggctcatgctcgacgaagaacacgacatcccgccatacgagacgacctacgacgataacatctacatttttggtgctatggcgggccacaatctcgtcatagccacctgtcctcagggcatgaccggcaacgtcaacgctggccgcctagccgggcccctcttcaagagctttcccaacattcgcatggccttactcgtcggcattggcggcggcgttcctcgctcggtgccttgcgcgtcctccgtcgatgacgtgcacgtaggggacgtagtggtgggcgctcctggggacggcaagcccgcatgcatctactatgagtccggccgatcgcatgccggtgggcgtttcgagacactaggcaccatcgaccggccggaccgcatcctgctcaatgctctggagaagctgcaaagtgatatcgacgtggaccaaagcacattccgtcaacatcgcgaaaagtttcagaaatcaagacatggagcgagatttgcgtttcccggcctcgaacacgaccgacttttccatcccggctaccgacatgctgggtcctacaactcggcctgtcatgattgcgaccggacgcaattggttgaccgacctgcacgtaccgagagagaggcggccgacctgatcttccaccgcggtaggatcgcgactgggaattcggtggtacaggatggcgagaagagggacagcattcgcgaccagtgtgacggtgccgtgtgtgtcgaaatggaagccgccggtatcgacgcgagtaggccgtgcttggtgatcagggggatctccgactatgccgactctcacaaagatgacgtttggcgttcatatgcagctggcaatgcagccgtcttcgcgcgagaacttctttgtaaagtccctccaagcattgtaatagaaagactagcacgtaatgaggtgcagacccgtcactttatcgtcccgttcggacgaaacaaaagttttgtcggacgtggatcgctcctcaaacagctgaccgacagcgttgcaccgaatgccgagacagatgactgccaaaagaccgttgtcgagggccttggaggcgtgggcaaaactcacatagctatcgaagccgcctaccgtgtccgggaccaggatcccgcttgctccgttttctgggtcccggctgtcgacctgaccagctttgagaacgcgtaccgtgagatcgggaaaacgctccgattgccaggcatcgaagacgacaaggcagacgtcaagacgctagtcaaaataggcctcagccaggaaagtgctggcagctggctcttgattatcgataacgctgatggtgtcgacttgctgtttaccgatgcgcaactggccgagcacttgccttttggtttgcatgggtcaatcctattcacgacccgaaaccatcaagtcgcaatccggctcgatattccacagaagaacgtgatcacgatgcaagaaatgaataatactgacgctgccgctcttctgtaccagaatctgaaagaaagccaaacacgcgacgccaaaagcacgtcaggtctcctggagtacttggccaatcttccgctggcgatcaagcaggcatcggccttcatggcatccaacacgaacgtgacgatatccgattatctcgacttgtgcaagtcaagtgacatcgacctaatccacttattaagtcgacaatttgaagaccgccaccgatataaagcccatgctaaggatcaaaacccgattgccacgacctag

SEQ ID NO: 38588 - protein, 607 aa, Muscodor strobelii
  misc_feature: SGI Peptide ID NO. 573411
  misc_feature (1)..(444): NCBI GI: 145605070 Blast Desc: MGG_02065 [Magnaporthe grisea 70-15] gi|145012939|gb|EDJ97580.1| MGG_02065 [Magnaporthe grisea 70-15]
  misc_feature (10)..(607): NCBI GI: 189211982 Blast Desc: kinesin light chain [Pyrenophora tritici-repentis Pt-1C-BFP] gi|187979517|gb|EDU46143.1| kinesin light chain [Pyrenophora tritici-repentis Pt-1C-BFP]
  misc_feature (6)..(607): NCBI GI: 119472511 Blast Desc: kinesin light chain [Neosartorya fischeri NRRL 181] gi|119406506|gb|EAW16457.1| kinesin light chain [Neosartorya fischeri NRRL 181]
  misc_feature (1)..(607): NCBI GI: 119492690 Blast Desc: G. violaceus kinesin [Neosartorya fischeri NRRL 181] gi|119411824|gb|EAW21767.1| G. violaceus kinesin [Neosartorya fischeri NRRL 181]
  misc_feature (6)..(607): NCBI GI: 115396364 Blast Desc: conserved [Aspergillus terreus NIH2624] gi|114193390|gb|EAU35090.1| conserved [Aspergillus terreus NIH2624]
  misc_feature (4)..(595): NCBI GI: 115400745 Blast Desc: conserved [Aspergillus terreus NIH2624] gi|114191627|gb|EAU33327.1| conserved [Aspergillus terreus NIH2624]
  misc_feature (10)..(607): NCBI GI: 242816129 Blast Desc: kinesin light chain, [Talaromyces stipitatus ATCC 10500] gi|218715048|gb|EED14471.1| kinesin light chain, [Talaromyces stipitatus ATCC 10500]
  misc_feature (10)..(607): NCBI GI: 212539918 Blast Desc: kinesin, [Penicillium marneffei ATCC 18224] gi|210067413|gb|EEA21505.1| kinesin, [Penicillium marneffei ATCC 18224]
  misc_feature (6)..(595): NCBI GI: 67517781 Blast Desc: AN1071.2 [Aspergillus nidulans FGSC A4] gi|40747033|gb|EAA66189.1| AN1071.2 [Aspergillus nidulans FGSC A4] gi|259488623|tpe|CBF88209.1| TPA: conserved [Aspergillus FGSC
  misc_feature (10)..(603): NCBI GI: 145241229 Blast Desc: An08g11610 [Aspergillus niger] gi|134077791|emb|CAK45831.1| protein product [Aspergillus niger]
MDRKKLKRTDYYVAWICPAAAVELLPSRLMLDEEHDIPPYETTYDDNIYIFGAMAGHNLVIATCPQGMTGNVNAGRLAGPLFKSFPNIRMALLVGIGGGVPRSVPCASSVDDVHVGDVVVGAPGDGKPACIYYESGRSHAGGRFETLGTIDRPDRILLNALEKLQSDIDVDQSTFRQHREKFQKSRHGARFAFPGLEHDRLFHPGYRHAGSYNSACHDCDRTQLVDRPARTEREAADLIFHRGRIATGNSVVQDGEKRDSIRDQCDGAVCVEMEAAGIDASRPCLVIRGISDYADSHKDDVWRSYAAGNAAVFARELLCKVPPSIVIERLARNEVQTRHFIVPFGRNKSFVGRGSLLKQLTDSVAPNAETDDCQKTVVEGLGGVGKTHIAIEAAYRVRDQDPACSVFWVPAVDLTSFENAYREIGKTLRLPGIEDDKADVKTLVKIGLSQESAGSWLLIIDNADGVDLLFTDAQLAEHLPFGLHGSILFTTRNHQVAIRLDIPQKNVITMQEMNNTDAAALLYQNLKESQTRDAKSTSGLLEYLANLPLAIKQASAFMASNTNVTISDYLDLCKSSDIDLIHLLSRQFEDRHRYKAHAKDQNPIATT

SEQ ID NO: 38589 - DNA, 690 bp, Muscodor strobelii
  misc_feature: SGI cDNA ID NO. 573412
  misc_feature: Encodes the peptide sequence at SEQ ID NO 38590
atggagcccgttggcttgactgtgggaatcataggactagctgggctgtttagtacctgcctagacgtggtggaaagatggcattcctacaaagacttcggagtcgaatccgaggccctcgtcgctcgctttgaagcggacagggccctatttcggcgatggggcaagagcataggtatcgacagaggcacacaaggagatggccatcacgaagctctcgatgaccctcctattcgattggcaatcgataagattctacgaagcatcaagcatgtcgacggtgaagtagccgagtggccagcccagaggatggatgtccttcccagagggcgggcacagcccgagaagcttcaaggcccagcctcacggacgagtagattgaggtgggcgctcagaggcaagatgcgatttctagaacgagtagagcggtttgacgctttagtccaaaagttgtatgatctcattcctctggcccacctcaccgatccaggccagatgtcgggaagagcaaagcatggcaatcttgactctcgcaatggaggatcttcatggcgtttcgacgttcagggcttcttagccgagatcaaaacacacctagatagtaagaaacctcgtgcgcttcgatcggataatactaaaatagcaagacgagacccagaaagagctgcacgattggctcgatacgcatga

SEQ ID NO: 38590 - protein, 229 aa, Muscodor strobelii
  misc_feature: SGI Peptide ID NO. 573412
  misc_feature (1)..(157): NCBI GI: 238482849 Blast Desc: ankyrin, [Aspergillus flavus NRRL3357] gi|220700713|gb|EED57051.1| ankyrin, [Aspergillus flavus NRRL3357]
  misc_feature (1)..(157): NCBI GI: 169766170 Blast Desc: [Aspergillus oryzae RIB40] gi|83765411|dbj|BAE55554.1| protein product [Aspergillus oryzae]
  misc_feature (1)..(178): NCBI GI: 255950182 Blast Desc: Pc22g19550 [Penicillium chrysogenum Wisconsin 54-1255] gi|211592875|emb|CAP99243.1| Pc22g19550 [Penicillium chrysogenum Wisconsin 54-1255]
  misc_feature (1)..(156): NCBI GI: 256732326 Blast Desc: NECHADRAFT_40539 [Nectria haematococca mpVI 77-13-4]
  misc_feature (1)..(156): NCBI GI: 261353217 Blast Desc: ankyrin-1 [Verticillium albo-atrum VaMs.102]
  misc_feature (1)..(177): NCBI GI: 46139775 Blast Desc: FG11402.1 [Gibberella zeae PH-1]
  misc_feature (1)..(156): NCBI GI: 9453820 Blast Desc: related to small s protein [Neurospora crassa]
  misc_feature (27)..(157): NCBI GI: 46126459 Blast Desc: FG07607.1 [Gibberella zeae PH-1]
  misc_feature (1)..(80): NCBI GI: 238840462 Blast Desc: [Microsporum canis CBS 113480]
  misc_feature (1)..(86): NCBI GI: 145602215 Blast Desc: [Magnaporthe grisea 70-15] gi|145010651|gb|EDJ95307.1| [Magnaporthe grisea 70-15]
MEPVGLTVGIIGLAGLFSTCLDVVERWHSYKDFGVESEALVARFEADRALFRRWGKSIGIDRGTQGDGHHEALDDPPIRLAIDKILRSIKHVDGEVAEWPAQRMDVLPRGRAQPEKLQGPASRTSRLRWALRGKMRFLERVERFDALVQKLYDLIPLAHLTDPGQMSGRAKHGNLDSRNGGSSWRFDVQGFLAEIKTHLDSKKPRALRSDNTKIARRDPERAARLARYA

SEQ ID NO: 38591 - DNA, 2665 bp, Muscodor strobelii
  misc_feature: SGI EST ID NO. CUFF.92783.0
  misc_feature: Variant of the nucleotide sequence at SEQ ID NO 38589
cttatagatgccttcgttcgcctctatccgaactagtgaaggggacatgactttgctttaagcatagacgaaaattcaatcgatacagtatcgtgcattaaactggcctcttagcgatcggcttaccagtcgcgctcgggtctcatcagccccaaatggagcccgttggcttgactgtgggaatcataggactagctgggctgtttagtacctgcctagacgtggtggaaagatggcattcctacaaagacttcggagtcgaatccgaggccctcgtcgctcgctttgaagcggacagggccctatttcggcgatggggcaagagcataggtatcgacagaggcacacaaggagatggccatcacgaagctctcgatgaccctcctattcgattggcaatcgataagattctacgaagcatcaagcatgtcgacggtgaagtagccgagtggccagcccagaggatggatgtccttcccagagggcgggcacagcccgagaagcttcaaggcccagcctcacggacgagtagattgaggtgggcgctcagaggcaagatgcgatttctagaacgagtagagcggtttgacgctttagtccaaaagttgtatgatctcattcctctggcccacctcaccgatccaggccagatgtcgggaagagcaaagcatggcaatcttgactctcgcaatggaggatcttcatggcgtttcgacgttcagggcttcttagccgagatcaaaacacacctagataacccagaaagagctgcacgattggctcgatacgcatgattcaacaaacatgtacaacgcttttgttcgcaagagactggacggtacttgcgactggatccttagccggtccgaattcttgcagtggcattcgtcggtgtcggagaacacagcgccgctatgggttaatggccctcccggctatggaaaaacaatcatttgcgcaagaatgactcagtacatgttggagaattccgaaagccccttggcatatttcttcttctcatcagagttggaaagccgggatgatccttttattgtgatgcgatcctggatttctcaagttgtaatgcaaaaccaacaggcattcgatctggcacgagagaaaaaggaaacgaccaatgggcgcatagcatcacaagcggaagttgaggaactcttcacgtcaattacactcagcattccgaaatgcattttcatcgtcgatgggcttgacgagtgtgctatgcgagaatataatggcaaggcaagtcatagggcttccttgcttgagtttctcagttccctcaggcatatagtctcgagatcaacatcacgacttctagtggtgagtcgcaatgacccagagattcggcaaggtctgggcggagacgagaataatagaatttgggacttggtggagatacaaatccagccaaaagatgtcgaatccgatgctacctcactctcagaaagcatcgtcgggaaaaaattgcccaacaagagcgaagcgcagcgacgggagcttacacacagaatagtcgatcggtgtcagtccatgttcttagggattaaactactagaacccgatctcaaggggggcaaaaatcttaagcaactccaacgacttattgatgatgcccctagcagactcgatcatgtttatgatcgcaactggaaaaagattgacagtctcgaggatgccagcagatgtcgcgcgttcgcaatcctgagatgggcgacattcgccgctcgtcccatcacgattttagaactgactgacgttctccttcttgcgaatgacgaatgcgatacacttgactatacagagctgccagattcgatcgatgaggtttacgttcagacggagatagtagaactctgtggatcgcttattgaggttcgacaagtaggacaatcttcaggattgggttcctcaactattcatttaagtcatttctcagtaagagagtatattctgggtcacatgttaatcctgccacggaacatggccacaaacgagcacttccaatcagccaacgaggcagtacagaacaacattcttgcggaaacatgcattcgttacttgaattccgaagaggcgtggggaaagaaacaacagtatagagcgaacgataccatgatccaagcatttcgagaatatgcggcaacctcgtggtataagcacgtccaagataacgtaaccaattcagagtatgttttcgacctaatcaataatttttttgatccatcaaatgaaaaatgggaagaatggagaagacagagcgaaaccacgttccaaaatcggtttatacagtatgaaggagaactgaagataggaaaccgtctattttatgcgtcacttctcgagttttcgaggacaattacttaccttataagggacgctagattagacataaatcatgtcgactcgtctaaccgaacagcgttgttgggcgcaagctttaaaggatgggtgcacggggtagagctgctgctgcaaaatggtgccgggatgaacattgcaagtaatgaagcaagaactcctttgtatgttgctgcagcgcaaggccacatcgaggtagtcaaacacctgctcgaaaacggggccgacgtgagcgtagcagacgaagacgggtggacgccgctcaattcggcttcggacagtggcc

SEQ ID NO: 38592 - DNA, 2046 bp, Muscodor strobelii
  misc_feature: SGI cDNA ID NO. 573413
  misc_feature: Elevated expression when VOC is produced
  misc_feature: Encodes the peptide sequence at SEQ ID NO 38593
atgtcccttttagacggtcctcatagggcaaagttgcagacatctcaagaggtacgcgacgcgtttgaaggctggcaagcccagctccgaagtctatacgaaaaactacatccgaagaagagacatcaaaccatgagcaagataggtatccgagctttgaaatggcccttcgaaagcaaggaggtcgagaagatcctacaacaactcgcaagatgcatgcagacagctacgatggcttcacaagtagaccagctgactacattgttggcaatagaccagagattagtactcgaaaagctccctgttgctgcaggggccactttcaattcccgcgctgaagaacacaacccgacttgtctccccgatacgcgagtcgaccttttacgcgaaataatgggatggatagaggaccctgcggctaaagctgtcttttggctgaacggtatggccggtacggggaagtcgaccatctcacggaccttagcccgtaagtcgtccggtctaggccggctcggtgctagcttcttcttcaagaggggcgagggcgatcgggggggagcgtccaaattcttcaccacaattactgctcagttgattcagtgcgagccagccctggcgccatacgtaaaggatgtcatcgaggccgatcctgccattcttgacaaggcgatgcgggagcagtttaacaagctgatatttgagcctctctctaagctgtctttccgaaacaacaagcccatcaactttgtcatcgtcgtagatgccctagatgaatgcgaccgggaagaggatgtcaagatgcttattcatctactctctggtgctaatacctcaaagtcagcccggctatggatccttttgacgagtcggcccgagttgcctattcgcctgggattttgtgacattaaaggtacataccaaggtctgatcctccacgaaattgaacagtccatcgtcgagcaggatctctttgtctacttcaagcacgaacttgccaaaatcagacaagagttcaataaaaccaagccacctgctcaacaattaccttcagaatggcccaaacaatccgaaatgcagacactcgtgacgatggctgttcccctcttcatcttcgctgctactgtatgccgattctttgcagatcgtcggactggcactccgaggtctaagctagagcgaatattggcgcatccaacgacgagcgaggattacaaacttgacgcaacatacttacctgttctcgagcagctcatagtgaacttgtcggatgaacggaaaaatgaaatgttaacactgttcaaacgtctggtcggctcgatcgtcttgcttgctagccccttgccaacggttgccttagaacagctactcggcatctccctggatgatatcgatagccaacttgattttcttcactctgtcttgagtgttccttcttcaccagctgttcccgtacggctactgcatttgtcatttcgcgactttctcgtcgatccgtcaaaacgtggaaagaacccattctgggtagatgcagaggaagtccaccggcaactagcggccgattgctttcgagtgatgaacacggccctccggaaagatatctgcgacgtgcaatggccaggcacatcatcctcgtctatcgatcatgatatgatcaacgaaaagattaggccggaagtccagtacgcctgtcagtattgggcatatcatattcagaaggctggggagcgtttatttgataatggtcaggttcattgcttcctgcagcagcacttcctacactggttagaggcattaagcattattggcagggcctcccaaagctttcgggacattcacacattgcaatcattacttcaggatgaaaactgcaccgagttgtcatattttcttaatgatgctttacgctttgcccgcacaaatgtttcaggtatagaggctgcgccgctgcaagtgtactgctcggcacttgtctttgcgccagagaagagtactatccgcaatacattttatcgtaacatgccaaagtggatacgtcttggcccgaag

SEQ ID NO: 38593 - protein, 682 aa, Muscodor strobelii
  misc_feature: SGI Peptide ID NO. 573413
  misc_feature (3)..(678): NCBI GI: 116182430 Blast Desc: CHGG_01843 [Chaetomium globosum CBS 148.51] gi|88186140|gb|EAQ93608.1| CHGG_01843 [Chaetomium globosum CBS 148.51]
  misc_feature (3)..(678): NCBI GI: 116191741 Blast Desc: CHGG_05588 [Chaetomium globosum CBS 148.51] gi|88181501|gb|EAQ88969.1| CHGG_05588 [Chaetomium globosum CBS 148.51]
  misc_feature (2)..(682): NCBI GI: 46130696 Blast Desc: FG08952.1 [Gibberella zeae PH-1]
  misc_feature (3)..(678): NCBI GI: 116199375 Blast Desc: CHGG_07843 [Chaetomium globosum CBS 148.51] gi|88179122|gb|EAQ86590.1| CHGG_07843 [Chaetomium globosum CBS 148.51]
  misc_feature (2)..(666): NCBI GI: 154310178 Blast Desc: BC1G_07009 [Botryotinia fuckeliana B05.10] gi|150851570|gb|EDN26763.1| BC1G_07009 [Botryotinia fuckeliana B05.10]
  misc_feature (3)..(681): NCBI GI: 256723335 Blast Desc: NECHADRAFT_51778 [Nectria haematococca mpVI 77-13-4]
  misc_feature (3)..(679): NCBI GI: 189211806 Blast Desc: vegetative incompatibility protein HET-E-1 [Pyrenophora tritici-repentis Pt-1C-BFP] gi|187979430|gb|EDU46056.1| vegetative incompatibility protein
  misc_feature (3)..(681): NCBI GI: 256722434 Blast Desc: NECHADRAFT_34879 [Nectria haematococca mpVI 77-13-4]
  misc_feature (99)..(681): NCBI GI: 171678525 Blast Desc: protein product [Podospora anserina] gi|170937332|emb|CAP61990.1| protein product [Podospora anserina]
  misc_feature (3)..(679): NCBI GI: 189210756 Blast Desc: vegetative incompatibility protein HET-E-1 [Pyrenophora tritici-repentis Pt-1C-BFP] gi|187977802|gb|EDU44428.1| vegetative incompatibility protein
  misc_feature: Useful for introducing or modulating the production of volatile compounds
MSLLDGPHRAKLQTSQEVRDAFEGWQAQLRSLYEKLHPKKRHQTMSKIGIRALKWPFESKEVEKILQQLARCMQTATMASQVDQLTTLLAIDQRLVLEKLPVAAGATFNSRAEEHNPTCLPDTRVDLLREIMGWIEDPAAKAVFWLNGMAGTGKSTISRTLARKSSGLGRLGASFFFKRGEGDRGGASKFFTTITAQLIQCEPALAPYVKDVIEADPAILDKAMREQFNKLIFEPLSKLSFRNNKPINFVIVVDALDECDREEDVKMLIHLLSGANTSKSARLWILLTSRPELPIRLGFCDIKGTYQGLILHEIEQSIVEQDLFVYFKHELAKIRQEFNKTKPPAQQLPSEWPKQSEMQTLVTMAVPLFIFAATVCRFFADRRTGTPRSKLERILAHPTTSEDYKLDATYLPVLEQLIVNLSDERKNEMLTLFKRLVGSIVLLASPLPTVALEQLLGISLDDIDSQLDFLHSVLSVPSSPAVPVRLLHLSFRDFLVDPSKRGKNPFWVDAEEVHRQLAADCFRVMNTALRKDICDVQWPGTSSSSIDHDMINEKIRPEVQYACQYWAYHIQKAGERLFDNGQVHCFLQQHFLHWLEALSIIGRASQSFRDIHTLQSLLQDENCTELSYFLNDALRFARTNVSGIEAAPLQVYCSALVFAPEKSTIRNTFYRNMPKWIRLGPK

SEQ ID NO: 38594 - DNA, 2520 bp, Muscodor strobelii
  misc_feature: SGI EST ID NO. CUFF.92787.0
  misc_feature: Variant of the nucleotide sequence at SEQ ID NO 38592
ttgcatttgagcacataatctatctagcttatgatctacatggtgtatattcacgtggcttagcagcgatgagtggctgtgccacagggctttgcgctcaccatgcgccacagctagtagtattgatcacaagcacttatgaacggagctttcgccgaacattcgcacctagatgttgtcgtcgataatttacagggtagtccttttgagcaataaggtgtttggtctccttttggctcaagtcacggcctgtcttgctcttctctatcggcattctgaaggttgaatagcctaccgccctgagcaagatggtgtggccgcgagcgccctcgcggtggctgaattatcggccaaagtcatttccgcatgtctgcaatattctcgagacgtcaagcacgccaaagatgatatcgaaagcgtcagaaaggaagtcgcaagcgtgaagactgtcgcagataagaccatgtcccttttagacggtcctcatagggcaaagttgcagacatctcaagaggtacgcgacgcgtttgaaggctggcaagcccagctccgaagtctatacgaaaaactacatccgaagaagagacatcaaaccatgagcaagataggtatccgagctttgaaatggcccttcgaaagcaaggaggtcgagaagatcctacaacaactcgcaagatgcatgcagacagctacgatggcttcacaagtagaccagctgactacattgttggcaatagaccagagattagtactcgaaaagctccctgttgctgcaggggccactttcaattcccgcgctgaagaacacaacccgacttgtctccccgatacgcgagtcgaccttttacgcgaaataatgggatggatagaggaccctgcggctaaagctgtcttttggctgaacggtatggccggtacggggaagtcgaccatctcacggaccttagcccgtaagtcgtccggtctaggccggctcggtgctagcttcttcttcaagaggggcgagggcgatcgggggggagcgtccaaattcttcaccacaattactgctcagttgattcagtgcgagccagccctggcgccatacgtaaaggatgtcatcgaggccgatcctgccattcttgacaaggcgatgcgggagcagtttaacaagctgatatttgagcctctctctaagctgtctttccgaaacaacaagcccatcaactttgtcatcgtcgtagatgccctagatgaatgcgaccgggaagaggatgtcaagatgcttattcatctactctctggtgctaatacctcaaagtcagcccggctatggatccttttgacgagtcggcccgagttgcctattcgcctgggattttgtgacattaaaggtacataccaaggtctgatcctccacgaaattgaacagtccatcgtcgagcaggatctctttgtctacttcaagcacgaacttgccaaaatcagacaagagttcaataaaaccaagccacctgctcaacaattaccttcagaatggcccaaacaatccgaaatgcagacactcgtgacgatggctgttcccctcttcatcttcgctgctactgtatgccgattctttgcagatcgtcggactggcactccgaggtctaagctagagcgaatattggcgcatccaacgacgagcgaggattacaaacttgacgcaacatacttacctgttctcgagcagctcatagtgaacttgtcggatgaacggaaaaatgaaatgttaacactgttcaaacgtctggtcggctcgatcgtcttgcttgctagccccttgccaacggttgccttagaacagctactcggcatctccctggatgatatcgatagccaacttgattttcttcactctgtcttgagtgttccttcttcaccagctgttcccgtacggctactgcatttgtcatttcgcgactttctcgtcgatccgtcaaaacgtggaaagaacccattctgggtagatgcagaggaagtccaccggcaactagcggccgattgctttcgagtgatgaacacggccctccggaaagatatctgcgacgtgcaatggccaggcacatcatcctcgtctatcgatcatgatatgatcaacgaaaagattaggccggaagtccagtacgcctgtcagtattgggcatatcatattcagaaggctggggagcgtttatttgataatggtcaggttcattgcttcctgcagcagcacttcctacactggttagaggcattaagcattattggcagggcctcccaaagctttcgggacattcacacattgcaatcattacttcaggatgaaaactgcaccgagttgtcatattttcttaatgatgctttacgctttgcccgcacaaatgtttcaggtatagaggctgcgccgctgcaagtgtactgctcggcacttgtctttgcgccagagaagagtactatccgcaatacattttatcgtaacatgccaaagtggatacgtcttggcccgaaggtgaatgcgga

SEQ ID NO: 38595 - DNA, 479 bp, Muscodor strobelii
  misc_feature: SGI cDNA ID NO. 573414
  misc_feature: Elevated expression when VOC is produced
  misc_feature: Encodes the peptide sequence at SEQ ID NO 38596
atggaaattctgctccccactacgattctaccgtccctcaccacctttcctgtgcgaatacaccaaggggaccacgctattaaccaagctgcctttgacgcccgcaacaacttcgcagccatcttgcatacgactgagcttaggccacattcttctggaccacatggcaacttcttttccttctgctggccgaatggacaactagagcgagtgaaattggccgcggagatccttgaagcactttggctgtatgatgatatcaccgaacacatctgtctcgatagtgccatacagtcacatgccggcgtccgcgatgtcttgaccggagtacccaagccctgcgacaagagcgtaatgggacctctctttacggattttcgtgcccgtctatgccaaatggacaaacgcggcgcagcccgcgttctcgcttctctcgactcgtacctcaagacttacgacagccaaaaaaccccgttcga

SEQ ID NO: 38596 - protein, 159 aa, Muscodor strobelii
  misc_feature: SGI Peptide ID NO. 573414
  misc_feature (38)..(159): NCBI GI: 238583987 Blast Desc: MPER_10303 [Moniliophthora perniciosa FA553] gi|215453803|gb|EEB91347.1| MPER_10303 [Moniliophthora perniciosa FA553]
  misc_feature (15)..(113): NCBI GI: 238595150 Blast Desc: MPER_06545 [Moniliophthora perniciosa FA553] gi|215461541|gb|EEB94611.1| MPER_06545 [Moniliophthora perniciosa FA553]
  misc_feature (11)..(159): NCBI GI: 154301129 Blast Desc: [Botryotinia fuckeliana B05.10] gi|150856285|gb|EDN31477.1| [Botryotinia fuckeliana B05.10]
  misc_feature (12)..(152): NCBI GI: 145609303 Blast Desc: MGG_13405 [Magnaporthe grisea 70-15] gi|145016690|gb|EDK01120.1| MGG_13405 [Magnaporthe grisea 70-15]
  misc_feature: Useful for introducing or modulating the production of volatile compounds
MEILLPTTILPSLTTFPVRIHQGDHAINQAAFDARNNFAAILHTTELRPHSSGPHGNFFSFCWPNGQLERVKLAAEILEALWLYDDITEHICLDSAIQSHAGVRDVLTGVPKPCDKSVMGPLFTDFRARLCQMDKRGAARVLASLDSYLKTYDSQKTPF

SEQ ID NO: 38597 - DNA, 964 bp, Muscodor strobelii
  misc_feature: SGI EST ID NO. CUFF.92851.0
  misc_feature: Variant of the nucleotide sequence at SEQ ID NO 38595
agctaaatcattcaaggtcctcctgccatcgccttttcgaaaggctcctagcgagaacgtgaggggcggaccacggcaacatagaagaaaggcgttttgagatcgacgtgggttatatgtacataattcatatgtatataagtttgtctgctcgcagaccgagagcctcccagatcaaggctttgcactttctagtactttacatacgatggaacgggagagcgtttcctctgagggctgcctgcctatcgacccctcacagcctgaacgggaaaggggaatcggtcgtcgcctcaaaattgctagttcatacatgattcaggaaatattttgctttcctagcacgacaattcaaaatggaaattctgctccccactacgattctaccggtcctatccttgcttgccagcgctcgtcatatctggtcgaaacttcttcgtatccgcagtccctcaccacctttcctgtgcgaatacaccaaggggaccacgctattaaccaagctgcctttgacgcccgcaacaacttcgcagccatcttgcatacgactgagcttaggccacattcttctggaccacatggcaacttcttttccttctgctggccgaatggacaactagagcgagtgaaattggccgcggagatccttgaagcactttggctgtatgatggtgagcagatagacaccaaaccaactcgcaggctggactgttcaccgaccttaatcctaccttttcttagatatcaccgaacacatctgtctcgatagtgccatacagtcacatgccggcgtccgcgatgtcttgaccggagtacccaagccctgcgacaagagcgtaatgggacctctctttacggattttcgtgcccgtctatgccaaatggacaaacgcggcgcagcccgcgttctcgcttctctcgactcgtacctcaagacttacgacagccaaaaaaccccgttcga

SEQ ID NO: 38598 - DNA, 1248 bp, Muscodor strobelii
  misc_feature: SGI cDNA ID NO. 573415
  misc_feature: Encodes the peptide sequence at SEQ ID NO 38599
atgaggggcgcgtggtgtttgttactcatcgcgaccgcatgctggccgtcgctgtctcaggctcaggacatgccggtttgtgcgagtgactgcttgagtgtgtcccttcagcagtcgagttgcgatccgaccgacgtcgcgtgtatatgttcggatagcatattattgcttacagtccagacatgcgtgctgtcaaattgcactgttatcgaagggcttgcggcgaaaaacactacggaaacgctctgcggcagagaagtaagaaacaacacggctattataccgatccttaccgccgtcttcggaattctggccattatcgcggtagcgataagggtgatagacattttccctcaccgaagctttatgcccgctgatgtgtgcgcaatttctgctctcattaccggaataccactgggggttttggagttagtcatgtctacactcggcttcggcaaggatatatggacgttgacaccgtatcgtataacccatatcgtgcggttcacctgggtgactgagctcttgtacttcgtcctactaggtctcacgaagacttccttccttctgttctatctgcgagtctttcctggcgcaactttcaaaagagcttgctacattactatgggcgtcgtcatagctactgcaattgctttcaccttgaccggcatattttattgtacacccgtttcgtacatctggacaggttggagtggtgagaccaaaggcagttgcagaaacttcaatgccgtcgcgtggtcaaatgccattaacaacatcgtgcaggacttatggattatcgggcttcctatcccctcccttcttaagctacagcttggtacaagaaaaaaggtccacttgattcttatgttcagcgtcggacttacaatcactatcgttagtgttattcggttggccactttagtacagtttgctacaacaacaaacccgacgtatgacagtgtcccaacagcgtactggagtattctggaagcctatatcagcatcgtttgttgttgtcttccctacgtgcgatctttcctgcgcaccatagccccgtcctgcttcggctccacgaaagattctaagtcccagtcttacaaattatcccggacgccgatgacaaactcgggggtcataaaaaagactactacgcatcacatatcatatgctgaccgatcaaaccaatctgatatggagttagtggagaggggttccggtcgaccggctcaatatccagattggtaa

SEQ ID NO: 38599 - protein, 415 aa, Muscodor strobelii
  misc_feature: SGI Peptide ID NO. 573415
  misc_feature (31)..(415): NCBI GI: 256720582 Blast Desc: NECHADRAFT_49855 [Nectria haematococca mpVI 77-13-4]
  misc_feature (19)..(387): NCBI GI: 212533903 Blast Desc: integral membrane protein [Penicillium marneffei ATCC 18224] gi|210072472|gb|EEA26561.1| integral membrane protein [Penicillium marneffei ATCC 18224]
  misc_feature (57)..(407): NCBI GI: 239610678 Blast Desc: CFEM domain-containing protein [Ajellomyces dermatitidis ER-3]
  misc_feature (57)..(407): NCBI GI: 261195116 Blast Desc: CFEM domain-containing protein [Ajellomyces dermatitidis SLH14081] gi|239587834|gb|EEQ70477.1| CFEM domain-containing protein [Ajellomyces dermatitidis SLH14081]
  misc_feature (14)..(363): NCBI GI: 116202373 Blast Desc: CHGG_09071 [Chaetomium globosum CBS 148.51] gi|88177589|gb|EAQ85057.1| CHGG_09071 [Chaetomium globosum CBS 148.51]
  misc_feature (24)..(376): NCBI GI: 255948054 Blast Desc: Pc22g07780 [Penicillium chrysogenum Wisconsin 54-1255] gi|211591811|emb|CAP98066.1| Pc22g07780 [Penicillium chrysogenum Wisconsin 54-1255]
  misc_feature (7)..(353): NCBI GI: 145603992 Blast Desc: MGG_10473 [Magnaporthe grisea 70-15] gi|145012102|gb|EDJ96758.1| MGG_10473 [Magnaporthe grisea 70-15]
  misc_feature (24)..(364): NCBI GI: 145247750 Blast Desc: An12g10780 [Aspergillus niger] gi|134080867|emb|CAK41425.1| protein product [Aspergillus niger]
  misc_feature (21)..(359): NCBI GI: 115491889 Blast Desc: [Aspergillus terreus NIH2624] gi|114197432|gb|EAU39132.1| [Aspergillus terreus NIH2624]
  misc_feature (8)..(392): NCBI GI: 242791742 Blast Desc: integral membrane protein, [Talaromyces stipitatus ATCC 10500] gi|218718403|gb|EED17823.1| integral membrane protein, [Talaromyces stipitatus ATCC 10500]
MRGAWCLLLIATACWPSLSQAQDMPVCASDCLSVSLQQSSCDPTDVACICSDSILLLTVQTCVLSNCTVIEGLAAKNTTETLCGREVRNNTAIIPILTAVFGILAIIAVAIRVIDIFPHRSFMPADVCAISALITGIPLGVLELVMSTLGFGKDIWTLTPYRITHIVRFTWVTELLYFVLLGLTKTSFLLFYLRVFPGATFKRACYITMGVVIATAIAFTLTGIFYCTPVSYIWTGWSGETKGSCRNFNAVAWSNAINNIVQDLWIIGLPIPSLLKLQLGTRKKVHLILMFSVGLTITIVSVIRLATLVQFATTTNPTYDSVPTAYWSILEAYISIVCCCLPYVRSFLRTIAPSCFGSTKDSKSQSYKLSRTPMTNSGVIKKTTTHHISYADRSNQSDMELVERGSGRPAQYPDW

SEQ ID NO: 38600 - DNA, 1545 bp, Muscodor strobelii
  misc_feature: SGI cDNA ID NO. 573416
  misc_feature: Encodes the peptide sequence at SEQ ID NO 38601
atgacttcttattctgcgatactggctgtgctttcctacccgttcacatccattgctgtcatttctgtggcgtactgggcaggatggattatctacgcgaggaatttccaccctctcagcaaggttccaggtccgtggttcgcgtccgtgagtcgattgtggtacatgaggcagatcgcgacaggtgaaacggagaaaattacccggcgccttcacgaaaaatatggcccagtcctcagaatcagcccaaatgaggtaacctgcgcagctccagatgctatcaagcttatctatcgtacccagcaacccttgaacaagaccgatttctacaccccatggaactctcaaaacttcagcaagcaccgtgatgccttcactgagatgaacgataagcgacacggagagaggagaagaattgtgaataatatctacagtcttgccaatatcttgaagtctgagaagtatatcgatctttgctccgggatttttctcaagcgattggagacctttgctgcctcgcagcaggagattgatctgggaaaatggcttcaaatgtacgccttcgacgtcatcggcgagctttactttggtcgcatgtttgggttcatggagaatagccatgatcatgaaaattggattcattcgctagatttacttatgccttttctatgcatgacttcggttgcgccatcatatgtgcgccctcttatcctctcttcagccttggctgttcccggatctttaaaggcgctgaaggcgattgacaccatcggcaccgcgtctcgggcagttgtcgcacagcggttcgatatcagcgccaatcccgatcatgaaccacgagcagacgtgctccaacagttgcacaatatctacgtggaaaagggcgataaggtagacttcaatatgggtgacattgaacaggaagcctacgtagccttattagccggttcagacacgactgccattgcgtctcgctccgtcttctacaacctaatgaaaaacccagccgtgtacgaggcactcatagaagaaattgacacagcagtgatcgatggtagactgaatttccccgtgagctacgccgaggcatttaagctaccacttctttgtgcttgtatcaaagaggctctacgcgtgcatcctagtgtgcaactgactctaccgaggatatctcccccggagggcctcgagctctgcggcactttcgtgccctcgggctacactgtgggaatgaacgccgcggtagttcatttcgacaagaccatttttgggcccgatgcggagcagttccggccatcccggtggctagagaacaaggagaaggcaaccaatatggaccgatacatgttgcattttggtgctggcacgcgcacttgtatcggcaagaacatctccattgccgagatacacaagctcgtccccgaagttgtgagaaagttcaagtttgagatggcgaatccaggtgcacagtggagaaccaataacctttggttttgcaaacagactgggattaatgttaaagtgaagaaacgcgacacctgctaa

SEQ ID NO: 38601 - protein, 514 aa, Muscodor strobelii
  misc_feature: SGI Peptide ID NO. 573416
  misc_feature (43)..(508): Pfam Id: PF00067 Pfam Desc: Cytochrome P450
  misc_feature (293)..(508): Pfam Id: PF00067 Pfam Desc: Cytochrome P450
  misc_feature (43)..(208): Pfam Id: PF00067 Pfam Desc: Cytochrome P450
  misc_feature (56)..(511): NCBI GI: 169615457 Blast Desc: SNOG_10886 [Phaeosphaeria nodorum SN15] gi|160702967|gb|EAT81385.2| SNOG_10886 [Phaeosphaeria nodorum SN15]
  misc_feature (10)..(512): NCBI GI: 256723761 Blast Desc: NECHADRAFT_52289 [Nectria haematococca mpVI 77-13-4]
  misc_feature (23)..(505): NCBI GI: 256724616 Blast Desc: NECHADRAFT_3047 [Nectria haematococca mpVI 77-13-4]
  misc_feature (39)..(512): NCBI GI: 189204025 Blast Desc: pisatin demethylase [Pyrenophora tritici-repentis Pt-1C-BFP] gi|187985447|gb|EDU50935.1| pisatin demethylase [Pyrenophora tritici-repentis Pt-1C-BFP]
  misc_feature (25)..(511): NCBI GI: 115401618 Blast Desc: conserved [Aspergillus terreus NIH2624] gi|114190338|gb|EAU32038.1| conserved [Aspergillus terreus NIH2624]
  misc_feature (21)..(511): NCBI GI: 259482520 Blast Desc: TPA: cytochrome P450, (Eurofung) [Aspergillus nidulans FGSC A4]
  misc_feature (17)..(511): NCBI GI: 189196366 Blast Desc: pisatin demethylase [Pyrenophora tritici-repentis Pt-1C-BFP] gi|187980400|gb|EDU47026.1| pisatin demethylase [Pyrenophora tritici-repentis Pt-1C-BFP]
  misc_feature (20)..(511): NCBI GI: 169765320 Blast Desc: [Aspergillus oryzae RIB40] gi|83764986|dbj|BAE55129.1| protein product [Aspergillus oryzae]
  misc_feature (18)..(511): NCBI GI: 169626214 Blast Desc: SNOG_16391 [Phaeosphaeria nodorum SN15] gi|160705791|gb|EAT76216.2| SNOG_16391 [Phaeosphaeria nodorum SN15]
  misc_feature (67)..(511): NCBI GI: 242826208 Blast Desc: cytochrome P450, [Talaromyces stipitatus ATCC 10500] gi|218712412|gb|EED11838.1| cytochrome P450, [Talaromyces stipitatus ATCC 10500]
  misc_feature (39)..(511): SWISSPROT Homolog: EC 1.14.13.12 Benzoate 4-monooxygenase
MTSYSAILAVLSYPFTSIAVISVAYWAGWIIYARNFHPLSKVPGPWFASVSRLWYMRQIATGETEKITRRLHEKYGPVLRISPNEVTCAAPDAIKLIYRTQQPLNKTDFYTPWNSQNFSKHRDAFTEMNDKRHGERRRIVNNIYSLANILKSEKYIDLCSGIFLKRLETFAASQQEIDLGKWLQMYAFDVIGELYFGRMFGFMENSHDHENWIHSLDLLMPFLCMTSVAPSYVRPLILSSALAVPGSLKALKAIDTIGTASRAVVAQRFDISANPDHEPRADVLQQLHNIYVEKGDKVDFNMGDIEQEAYVALLAGSDTTAIASRSVFYNLMKNPAVYEALIEEIDTAVIDGRLNFPVSYAEAFKLPLLCACIKEALRVHPSVQLTLPRISPPEGLELCGTFVPSGYTVGMNAAVVHFDKTIFGPDAEQFRPSRWLENKEKATNMDRYMLHFGAGTRTCIGKNISIAEIHKLVPEVVRKFKFEMANPGAQWRTNNLWFCKQTGINVKVKKRDTC

SEQ ID NO: 38602 - DNA, 182 bp, Muscodor strobelii
  misc_feature: SGI EST ID NO. CUFF.92825.0
  misc_feature: Variant of the nucleotide sequence at SEQ ID NO 38600
ctgtggcgtactgggcaggatggattatctacgcgaggaatttccaccctctcagcaaggttccaggtccgtggttcgcgtccgtgagtcgattgtggtacatgaggcagatcgcgacaggtgaaacggagaaaattacccggcgccttcacgaaaaatatggcccagtcctcagaatcagc

SEQ ID NO: 38603 - DNA, 1233 bp, Muscodor strobelii
  misc_feature: SGI cDNA ID NO. 573417
  misc_feature: Elevated expression when VOC is produced
  misc_feature: Encodes the peptide sequence at SEQ ID NO 38604
atggcaaagtcagttgtcgtggttggcggttctctcgccgggttaatgcatggacttcagcataaacgactgggcaacaatgttgtcatcctcgaacaggaggctggaaagcggtcagggcaggaagccggcatcggctttggggatgcagtgaacgatttttacaagaaatatgacgcgacgggtgtatcattagctatacacaaccgtgcccgtcgtttcgcatatcgtacgcattcagaagtgttttgtaccgagaaacctttgagcttgacaagctggggtctgatgtacaggcttctgcgtgccaacttcgacggtaaggcatcagctgcctgcataaatccgcctcctgctttagaagaagatggtatagtcagctatctatctggtaaaaaagtcacggctcttgtttacagtccgggaaaagttactgtctgctacacagatgtgcgaacgaacgaagaagcatcattatcagcggatctattgattggggccgatggtatacactctaccattcgtcaacttgttcaaaagcctactctggagcgatatgcaggttacgtatcttggcgaggcactgtgtctgagcgagaattatcaaaagaaatatgcgagtatttttcagattggttatgtctgaacgttgcgaaaaagagctatctagtaggctacatagtacctactgatgacgggaacttcgagcctggggaacggttaatcaacttcgtatggtactacaatttggttcatgactctacagagatgcatgatgtcttcactgatatcaacggacagacacaccgtacaacggtgcctcgtgggcttgttcgaccagatgtttgggataaagtgcgaaataagattgaaattgccagaccattcgcagaggtcctggaaaaagtacaatccccttttgtgactaaaatcaacgacgccattagccactcaccaagcttctgcgatggccatgtcatcctcgtgggtgatgcttttgcttcttttagaccgcatgctgcggcagccactgaacaatgcgcgttccattgtcaaatgattgagcaggtctattcggggcagcgaactatggcatcatgggaacgcgaagctcgtcactatgctcagtatatggttctagtcaatcgaatcattggcgactttgggcgggggtcaatattgtctctgctccaaggcctaatctcctatgcaatatttttgctatggagctag

SEQ ID NO: 38604 - protein, 410 aa, Muscodor strobelii
  misc_feature: SGI Peptide ID NO. 573417
  misc_feature (119)..(178): Pfam Id: PF01494 Pfam Desc: FAD binding domain
  misc_feature (1)..(408): NCBI GI: 121714611 Blast Desc: FAD binding domain protein [Aspergillus clavatus NRRL 1] gi|119403070|gb|EAW13490.1| FAD binding domain protein [Aspergillus clavatus NRRL 1]
  misc_feature (8)..(409): NCBI GI: 171676475 Blast Desc: protein product [Podospora anserina] gi|170936304|emb|CAP60962.1| protein product [Podospora anserina]
  misc_feature (3)..(404): NCBI GI: 116205824 Blast Desc: CHGG_02205 [Chaetomium globosum CBS 148.51] gi|88182802|gb|EAQ90270.1| CHGG_02205 [Chaetomium globosum CBS 148.51]
  misc_feature (3)..(408): NCBI GI: 238498038 Blast Desc: conserved [Aspergillus flavus NRRL3357] gi|220693528|gb|EED49873.1| conserved [Aspergillus flavus NRRL3357]
  misc_feature (3)..(404): NCBI GI: 169768718 Blast Desc: [Aspergillus oryzae RIB40] gi|83766687|dbj|BAE56827.1| protein product [Aspergillus oryzae]
  misc_feature (8)..(403): NCBI GI: 238846081 Blast Desc: FAD binding domain-containing protein [Microsporum canis CBS 113480]
  misc_feature (4)..(388): NCBI GI: 156065277 Blast Desc: SS1G_00649 [Sclerotinia sclerotiorum 1980] gi|154691508|gb|EDN91246.1| SS1G_00649 [Sclerotinia sclerotiorum 1980]
  misc_feature (1)..(314): NCBI GI: 116199061 Blast Desc: CHGG_07686 [Chaetomium globosum CBS 148.51] gi|88178965|gb|EAQ86433.1| CHGG_07686 [Chaetomium globosum CBS 148.51]
  misc_feature (4)..(388): NCBI GI: 154311293 Blast Desc: BC1G_06499 [Botryotinia fuckeliana B05.10] gi|150850896|gb|EDN26089.1| BC1G_06499 [Botryotinia fuckeliana B05.10]
  misc_feature (4)..(406): NCBI GI: 145250487 Blast Desc: An15g02180 [Aspergillus niger] gi|134082277|emb|CAK42321.1| protein product [Aspergillus niger]
  misc_feature: Useful for introducing or modulating the production of volatile compounds
MAKSVVVVGGSLAGLMHGLQHKRLGNNVVILEQEAGKRSGQEAGIGFGDAVNDFYKKYDATGVSLAIHNRARRFAYRTHSEVFCTEKPLSLTSWGLMYRLLRANFDGKASAACINPPPALEEDGIVSYLSGKKVTALVYSPGKVTVCYTDVRTNEEASLSADLLIGADGIHSTIRQLVQKPTLERYAGYVSWRGTVSERELSKEICEYFSDWLCLNVAKKSYLVGYIVPTDDGNFEPGERLINFVWYYNLVHDSTEMHDVFTDINGQTHRTTVPRGLVRPDVWDKVRNKIEIARPFAEVLEKVQSPFVTKINDAISHSPSFCDGHVILVGDAFASFRPHAAAATEQCAFHCQMIEQVYSGQRTMASWEREARHYAQYMVLVNRIIGDFGRGSILSLLQGLISYAIFLLWS

SEQ ID NO: 38605 - DNA, 1505 bp, Muscodor strobelii
  misc_feature: SGI EST ID NO. CUFF.92837.0
  misc_feature: Variant of the nucleotide sequence at SEQ ID NO 38603
ctcaagtcctttgaatttgctcaccatattgtacaaaatggcaaagtcagttgtcgtggttggcggttctctcgccgggttaatgcatggacttcagcataaacgactgggcaacaatgttgtcatcctcgaacaggaggctggaaagcggtcagggcaggaagccggcatcggctttggggatgcagtgaacgatttttacaagaaatatgacgcgacgggtgtatcattagctatacacaaccgtgcccgtcgtttcgcatatcgtacgcattcagaagtgttttgtaccgagaaacctttgagcttgacaagctggggtctgatgtacaggcttctgcgtgccaacttcgacggtaaggcatcagctgcctgcataaatccgcctcctgctttagaagaagatggtatagtcagctatctatctggtaaaaaagtcacggctcttgtttacagtccgggaaaagttactgtctgctacacagatgtgcgaacgaacgaagaagcatcattatcagcggatctattgattggggccgatggtatacactctaccattcgtcaacttgttcaaaagcctactctggagcgatatgcaggttacgtatcttggcgaggcactgtgtctgagcgagaattatcaaaagaaatatgcgagtatttttcagattggttatgtctgaacgttgcgaaaaagagctatctagtaggctacatagtacctactgatgacgggaacttcgagcctggggaacggttaatcaacttcgtatggtactacaatttggttcatgactctacagagatgcatgatgtcttcactgatatcaacggacagacacaccgtacaacggtgcctcgtgggcttgttcgaccagatgtttgggataaagtgcgaaataagattgaaattgccagaccattcgcagaggtcctggaaaaagtacaatccccttttgtgactaaaatcaacgacgccattagccactcaccaagcttctgcgatggccatgtcatcctcgtgggtgatgcttttgcttcttttagaccgcatgctgcggcagccactgaacaatgcgcgttccattgtcaaatgattgagcaggtctattcggggcagcgaactatggcatcatgggaacgcgaagctcgtcactatgctcagtatatggttctagtcaatcgaatcattggcgactttgggcgggggtcaatattgtctctgctccaaggcctaatctcctatgcaatatttttgctatggagctagctgacgttaacgtcttcaagcgcttagacgtcgatggagattgttttgactttgtataggtcgttcatctgacaactgcttcgacagttcggatatggaggaaaagactggagttgcattgctgctgttgttttcgtgtacctggtcagcttcaatgaactcatcagtgatcaaatgaaaaatctggaacttcaagttcagtttatactgcgcattcactctctatccaaatcgg

SEQ ID NO: 38606 - DNA, 1488 bp, Muscodor strobelii
  misc_feature: SGI cDNA ID NO. 573418
  misc_feature: Encodes the peptide sequence at SEQ ID NO 38607
atgacggatctgcttttccaggaactctacggtagcagagtagagtgcccgcttggtaataagttgtacataccgttgagtgtattgtaccacattgtcaccccggaaaaagtattggagatgaaacacactgagtcggatcatgatagcggggccgaatataacattgctgctcgtgcgatcaaagtctttgccatccttctgcttgccggccgatcaagtcccgttgatgatatactccaaaacgagctctcagatgaccagcttcccttcgcctcggcaggcgtgaatgagccattcagcctggtatctctccaagccgcccacaagaccttcaagttggttaatggctggagagcgtatgaagttgcgagtcttctcgagaaacaatggctgttccttgcacccgtattcgactcctatggtagtcatctcactcttagccgggaatgccctttaccactcatgacaccaatcgagcacatcgggtccactccttccagcagagtcttcacctgcgaagtccatccggctcattgcggaaatgaaattcaaggcttacaggtggcaatcaaggaaatgaggaccgaagagagttttgaacttgagaagaaaaacctagccgaaatacaacgtctcaataatccacatctgatcaagcatattgctacatgccagagggacacgctttactatgtcatattcccgttagcaaaaggtggaagccttttgagcttctgggagcaaaataacgagttcccacgcagcagtgaaagcgttgtgtgggccatcaagcagatgcttgggcttgccagtgctatactcgcccttcattatggcttcgagactgaacttcactgtcgccatggtgatctcaagccggctaatattcttcattttgaagaagccggaggtagttctctcgtgatagccgacctaggagtgtcaagtattcacgataagccgacaaaccaacgtcttggtgcgacaatgaccaaggctacgactctgtcgtatgaagctcccgaagcgtacgatgacgaaagcaaagatcgaccgagaagccgaacgtacgacatctggtcgctaggttgtgtctttcttgagtttaccatatggcttcttcacggctttgatgccatcaagaacttcgagtacaacagatatgatcgactcggaaatcccaatgcgagtttctacgagcttcgagacggcaaggcaggcatcccccagacagtcgagcacgcagttgatgccttgaaagaagatgcaagactgggagaacacattgctctgggagaagtcgtgagcttgatatcagacaagcttcttgtccctgttgcgaaagaccgttttaatgctcgagagctccacaccacgcttcagaacattgtcatgcaggccgggaagattactccatatccagtgatcaaaaccccttccttgactcccgggatttttcgcccccagggcgatcagaatacttga

SEQ ID NO: 38607 - protein, 495 aa, Muscodor strobelii
  misc_feature: SGI Peptide ID NO. 573418
  misc_feature (186)..(370): Pfam Id: PF00069 Pfam Desc: Protein kinase domain
  misc_feature (14)..(474): NCBI GI: 256722402 Blast Desc: NECHADRAFT_82208 [Nectria haematococca mpVI 77-13-4]
  misc_feature (73)..(493): NCBI GI: 256730245 Blast Desc: NECHADRAFT_82545 [Nectria haematococca mpVI 77-13-4]
  misc_feature (5)..(491): NCBI GI: 256723878 Blast Desc: [Nectria haematococca mpVI 77-13-4]
  misc_feature (13)..(464): NCBI GI: 256723898 Blast Desc: NECHADRAFT_78374 [Nectria haematococca mpVI 77-13-4]
  misc_feature (21)..(485): NCBI GI: 256721865 Blast Desc: NECHADRAFT_88069 [Nectria haematococca mpVI 77-13-4]
  misc_feature (23)..(448): NCBI GI: 256722363 Blast Desc: NECHADRAFT_82209 [Nectria haematococca mpVI 77-13-4]
  misc_feature (62)..(464): NCBI GI: 256720668 Blast Desc: NECHADRAFT_85605 [Nectria haematococca mpVI 77-13-4]
  misc_feature (128)..(445): NCBI GI: 116202873 Blast Desc: CHGG_09321 [Chaetomium globosum CBS 148.51] gi|88177839|gb|EAQ85307.1| CHGG_09321 [Chaetomium globosum CBS 148.51]
  misc_feature (3)..(479): NCBI GI: 121716138 Blast Desc: protein kinase domain protein [Aspergillus clavatus NRRL 1] gi|119403835|gb|EAW14252.1| protein kinase domain protein [Aspergillus clavatus NRRL 1]
  misc_feature (62)..(440): NCBI GI: 171682622 Blast Desc: protein product [Podospora anserina] gi|170941270|emb|CAP66920.1| protein product [Podospora anserina]
MTDLLFQELYGSRVECPLGNKLYIPLSVLYHIVTPEKVLEMKHTESDHDSGAEYNIAARAIKVFAILLLAGRSSPVDDILQNELSDDQLPFASAGVNEPFSLVSLQAAHKTFKLVNGWRAYEVASLLEKQWLFLAPVFDSYGSHLTLSRECPLPLMTPIEHIGSTPSSRVFTCEVHPAHCGNEIQGLQVAIKEMRTEESFELEKKNLAEIQRLNNPHLIKHIATCQRDTLYYVIFPLAKGGSLLSFWEQNNEFPRSSESVVWAIKQMLGLASAILALHYGFETELHCRHGDLKPANILHFEEAGGSSLVIADLGVSSIHDKPTNQRLGATMTKATTLSYEAPEAYDDESKDRPRSRTYDIWSLGCVFLEFTIWLLHGFDAIKNFEYNRYDRLGNPNASFYELRDGKAGIPQTVEHAVDALKEDARLGEHIALGEVVSLISDKLLVPVAKDRFNARELHTTLQNIVMQAGKITPYPVIKTPSLTPGIFRPQGDQNT

SEQ ID NO: 38608 - DNA, 1557 bp, Muscodor strobelii
  misc_feature: SGI cDNA ID NO. 573419
  misc_feature: Elevated expression when VOC is produced
  misc_feature: Encodes the peptide sequence at SEQ ID NO 38609
atggacggacaagaacaacctgtcgcctcactctacaccaaaccagagtcccacaagaggtatctggggagcctgcagcttggttttcccaaactagtcaatcccggcagcattgcgcactgtaatttgatcagtaagtggatcgacagttgcgatcaacacggatgttatccaaacaacacagatttcttccctacacgagttatcgatgtcaaccactctgtgacaactgttcagctcatgagccgcatccaacttccaccggaaggcgggagataccttgctctatcacaccgatggggtaaatcgactgatcaactcgcgttttgtacaaggaaaaaagacatcgaaggacgagacaaaagagttattgagatgagcacttttccaaagactttccgggacgcagttcaaattactcgcggcttgcacgtatcatatctctggattgattctatctgtatcatccaagacgacgaaaaggactgggatagggaatcacggcttatggagcaggtattcagttccgcatattgtaccattgccgccacgtgtgctacaggatttcatgatggcttcctgaaaagccgaccggatcgacagtatgttacaatgcaagggccagatggcgacggatctatctactacgcatgtgagccgattgacgatttcaataagcatgtagaccagagcgagctgaataccaggggctgggtattgcaagagcgtgccttatctcgtagaactatctacttcactgaaaggcaaacttattgggaatgtggcaaaggtgtgcggtgtgagaccctgactgcgatgaaaaaccaaaaagcgtcctttttaggagactcgaactttccgtactcggccgaagattacgtcaagggcaagaaaatcaaactcatccagacgctatacgaacgatattccagcatggctctcactgttccacgcgataggccattcgcgatccaaggattagagacaagactagtgagcacctttggtggagaaggtcgctatggtatcctagaaatatacttgcaccgctgtttgctgtggaagaaggctgggcacgtcatgaagcccatcagatcgtttccaggcaagactataccgtcctggtcatggatggcatacgaaggcgaaatacgatacgttgacgctcccgggagtgatgtgcactggatgaatgacatcgtgtggtcgcggttcccacacactgggtcgggcggcgcctcgagtctaaatgatcgacagatcaatcatgacgaaccttcgacagaactgcgagcaccggtctgggatcttgtcgatccgccggatcgagatataattctcgatgacgatcgtcctaacgacctgttgtcgttgaaatgtgtcatcattggtgtgagcaaacgccaggccgagcagggcagtaagttacattatgtccttcttgtcgcacgtgcctccatcaagaatgaagagatatggaagagacagggtgtcgggattgtaaagcagcggttcattgcgttggataagacaaagttgtttgggaaaattcggtaa

SEQ ID NO: 38609 - protein, 518 aa, Muscodor strobelii
  misc_feature: SGI Peptide ID NO. 573419
  misc_feature (93)..(242): Pfam Id: PF06985 Pfam Desc: Heterokaryon incompatibility protein (HET)
  misc_feature (2)..(506): NCBI GI: 256723790 Blast Desc: NECHADRAFT_78344 [Nectria haematococca mpVI 77-13-4]
  misc_feature (7)..(517): NCBI GI: 256722363 Blast Desc: NECHADRAFT_82209 [Nectria haematococca mpVI 77-13-4]
  misc_feature (7)..(514): NCBI GI: 256723898 Blast Desc: NECHADRAFT_78374 [Nectria haematococca mpVI 77-13-4]
  misc_feature (20)..(511): NCBI GI: 256729997 Blast Desc: NECHADRAFT_82546 [Nectria haematococca mpVI 77-13-4]
  misc_feature (8)..(491): NCBI GI: 256721865 Blast Desc: NECHADRAFT_88069 [Nectria haematococca mpVI 77-13-4]
  misc_feature (25)..(507): NCBI GI: 170940327 Blast Desc: protein product [Podospora anserina]
  misc_feature (1)..(483): NCBI GI: 256722820 Blast Desc: NECHADRAFT_87137 [Nectria haematococca mpVI 77-13-4]
  misc_feature (15)..(499): NCBI GI: 171694810 Blast Desc: protein product [Podospora anserina] gi|170947647|emb|CAP59809.1| protein product [Podospora anserina]
  misc_feature (24)..(510): NCBI GI: 169607331 Blast Desc: SNOG_06722 [Phaeosphaeria nodorum SN15] gi|160701390|gb|EAT85373.2| SNOG_06722 [Phaeosphaeria nodorum SN15]
  misc_feature (24)..(512): NCBI GI: 164425000 Blast Desc: NCU06583 [Neurospora crassa OR74A] gi|157070747|gb|EAA32707.2| NCU06583 [Neurospora crassa OR74A]
  misc_feature: Useful for introducing or modulating the production of volatile compounds
MDGQEQPVASLYTKPESHKRYLGSLQLGFPKLVNPGSIAHCNLISKWIDSCDQHGCYPNNTDFFPTRVIDVNHSVTTVQLMSRIQLPPEGGRYLALSHRWGKSTDQLAFCTRKKDIEGRDKRVIEMSTFPKTFRDAVQITRGLHVSYLWIDSICIIQDDEKDWDRESRLMEQVFSSAYCTIAATCATGFHDGFLKSRPDRQYVTMQGPDGDGSIYYACEPIDDFNKHVDQSELNTRGWVLQERALSRRTIYFTERQTYWECGKGVRCETLTAMKNQKASFLGDSNFPYSAEDYVKGKKIKLIQTLYERYSSMALTVPRDRPFAIQGLETRLVSTFGGEGRYGILEIYLHRCLLWKKAGHVMKPIRSFPGKTIPSWSWMAYEGEIRYVDAPGSDVHWMNDIVWSRFPHTGSGGASSLNDRQINHDEPSTELRAPVWDLVDPPDRDIILDDDRPNDLLSLKCVIIGVSKRQAEQGSKLHYVLLVARASIKNEEIWKRQGVGIVKQRFIALDKTKLFGKIR

SEQ ID NO: 38610 - DNA, 579 bp, Muscodor strobelii
  misc_feature: SGI EST ID NO. CUFF.92867.0
  misc_feature: Variant of the nucleotide sequence at SEQ ID NO 38608
cggatctatctactacgcatgtgagccgattgacgatttcaataagcatgtagaccagagcgagctgaataccaggggctgggtattgcaagagcgtgccttatctcgtagaactatctacttcactgaaaggcaaacttattgggaatgtggcaaaggtgtgcggtgtgagaccctgactgcgatgaaaaaccaaaaagcgtcctttttaggagactcgaactttccgtactcggccgaagattacgtcaagggcaagaaaatcaaactcatccagacgctatacgaacgatattccagcatggctctcactgttccacgcgataggccattcgcgatccaaggattagagacaagactagtgagcacctttggtggagaaggtcgctatggtatcctagaaatatacttgcaccgctgtttgctgtggaagaaggctgggcacgtcatgaagcccatcagatcgtttccaggcaagactataccgtcctggtcatggatggcatacgaaggcgaaatacgatacgttgacgctcccgggagtgatgtgcactggatgaatgacatcgtgtggtcgcg

SEQ ID NO: 38611 - DNA, 477 bp, Muscodor strobelii
  misc_feature: SGI cDNA ID NO. 573420
  misc_feature: Encodes the peptide sequence at SEQ ID NO 38612
atgaagcccatcagatcgtttccaggcaagactataccgtcctggtcatggatggcatacgaaggcgaaatacgatacgttgacgctcccgggagtgatgtgcactggatgaatgacatcgtgtggtcgcggttcccacacactgggtcgggcggcgcctcgagtctaaatgatcgacagatcaatcatgacgaaccttcgacagaactgcgagcaccggtctgggatcttgtcgatccgccggatcgagatataattctcgatgacgatcgtcctaacgacctgttgtcgttgaaatgtgtcatcattggtgtgagcaaacgccaggccgagcagggcagtaagttacattatgtccttcttgtcgcacgtgcctccatcaagaatgaagagatatggaagagacagggtgtcgggattgtaaagcagcggttcattgcgttggataagacaaagttgtttgggaaaattcggtaa

SEQ ID NO: 38612 - protein, 158 aa, Muscodor strobelii
  misc_feature: SGI Peptide ID NO. 573420
  misc_feature (9)..(146): NCBI GI: 256723790 Blast Desc: NECHADRAFT_78344 [Nectria haematococca mpVI 77-13-4]
  misc_feature (13)..(151): NCBI GI: 156059598 Blast Desc: SS1G_03811 [Sclerotinia sclerotiorum 1980] gi|154701598|gb|EDO01337.1| SS1G_03811 [Sclerotinia sclerotiorum 1980]
  misc_feature (9)..(147): NCBI GI: 170940327 Blast Desc: protein product [Podospora anserina]
  misc_feature (6)..(131): NCBI GI: 256721865 Blast Desc: NECHADRAFT_88069 [Nectria haematococca mpVI 77-13-4]
  misc_feature (10)..(140): NCBI GI: 256722363 Blast Desc: NECHADRAFT_82209 [Nectria haematococca mpVI 77-13-4]
  misc_feature (13)..(147): NCBI GI: 256720668 Blast Desc: NECHADRAFT_85605 [Nectria haematococca mpVI 77-13-4]
  misc_feature (6)..(150): NCBI GI: 169607331 Blast Desc: SNOG_06722 [Phaeosphaeria nodorum SN15] gi|160701390|gb|EAT85373.2| SNOG_06722 [Phaeosphaeria nodorum SN15]
  misc_feature (12)..(151): NCBI GI: 256729997 Blast Desc: NECHADRAFT_82546 [Nectria haematococca mpVI 77-13-4]
  misc_feature (6)..(152): NCBI GI: 164425000 Blast Desc: NCU06583 [Neurospora crassa OR74A] gi|157070747|gb|EAA32707.2| NCU06583 [Neurospora crassa OR74A]
  misc_feature (8)..(143): NCBI GI: 169607619 Blast Desc: SNOG_06868 [Phaeosphaeria nodorum SN15] gi|111064399|gb|EAT85519.1| SNOG_06868 [Phaeosphaeria nodorum SN15]
MKPIRSFPGKTIPSWSWMAYEGEIRYVDAPGSDVHWMNDIVWSRFPHTGSGGASSLNDRQINHDEPSTELRAPVWDLVDPPDRDIILDDDRPNDLLSLKCVIIGVSKRQAEQGSKLHYVLLVARASIKNEEIWKRQGVGIVKQRFIALDKTKLFGKIR

SEQ ID NO: 38613 - DNA, 370 bp, Muscodor strobelii
  misc_feature: SGI EST ID NO. CUFF.92858.0
  misc_feature: Variant of the nucleotide sequence at SEQ ID NO 38611
cgagcaccggtctgggatcttgtcgatccgccggatcgagatataattctcgatgacgatcgtcctaacgacctgttgtcgttgaaatgtgtcatcattggtgtgagcaaacgccaggccgagcagggcagtaagttacattatgtccttcttgtcgcacgtgcctccatcaagaatgaagagatatggaagagacagggtgtcgggattgtaaagcagcggttcattgcgttggataagacaaagttgtttgggaaaattcggtaattactcagttcaactacaagtcaataaatagaaggcgaagtcggcgctaccacagtttttatatgcaccattagtagacctttaattacaatgaagcccctgc

SEQ ID NO: 38614 - DNA, 567 bp, Muscodor strobelii
  misc_feature: SGI cDNA ID NO. 573421
  misc_feature: Reduced expression when VOC is produced
  misc_feature: Encodes the peptide sequence at SEQ ID NO 38615
atggctggctgctgccctgtcttcagcttcggttatcatccctccgtcatagaatttaccgtctccagacgctcatatctcacatctcacccggatgcttgttttggttatgttgctaccagcgctctggtgttggatcatggaatcggatcgaatcctcgtgttctcctacttcaacgtgccgcaagcgactcctgtcccaacaaatgggagcctccgggcggtgcctgcgaagaaactgatgaaagcattctgcacgccgccgttcgtgagctttgggaggaagccgaccttcaagtggcctgcattcttggacttgtcggggttccttacgacttttctatcagtatcggggaggtgcgccagtttggtttcgccgtatccgtcaagactgagaatggaacattgccaatggtaaggctcaatcctgaggagcatcagcgtttcgtttgggctactgaaagtgaggtacgggcgagaaatgtggacggtgtcgacttggaattcacgacagaagaagttgagcgaatggtacttctagcttttaacaatagccggcagaggtga

SEQ ID NO: 38615 - protein, 188 aa, Muscodor strobelii
  misc_feature: SGI Peptide ID NO. 573421
  misc_feature (37)..(176): Pfam Id: PF00293 Pfam Desc: NUDIX domain
  misc_feature (6)..(182): NCBI GI: 46111721 Blast Desc: FG02742.1 [Gibberella zeae PH-1]
  misc_feature (6)..(183): NCBI GI: 256726126 Blast Desc: NECHADRAFT_44269 [Nectria haematococca mpVI 77-13-4]
  misc_feature (8)..(188): NCBI GI: 171680934 Blast Desc: protein product [Podospora anserina] gi|170940425|emb|CAP65652.1| protein product [Podospora anserina]
  misc_feature (6)..(159): NCBI GI: 39974035 Blast Desc: MGG_00836 [Magnaporthe grisea 70-15] gi|145018224|gb|EDK02503.1| MGG_00836 [Magnaporthe grisea 70-15]
  misc_feature (4)..(187): NCBI GI: 189210195 Blast Desc: conserved [Pyrenophora tritici-repentis Pt-1C-BFP] gi|187977522|gb|EDU44148.1| conserved [Pyrenophora tritici-repentis Pt-1C-BFP]
  misc_feature (5)..(187): NCBI GI: 261359231 Blast Desc: conserved [Verticillium albo-atrum VaMs.102]
  misc_feature (8)..(188): NCBI GI: 85090076 Blast Desc: NCU09154 [Neurospora crassa OR74A] gi|28919586|gb|EAA29010.1| conserved [Neurospora crassa OR74A]
  misc_feature (8)..(146): NCBI GI: 116191521 Blast Desc: CHGG_05478 [Chaetomium globosum CBS 148.51] gi|88181391|gb|EAQ88859.1| CHGG_05478 [Chaetomium globosum CBS 148.51]
  misc_feature (8)..(158): NCBI GI: 169773019 Blast Desc: [Aspergillus oryzae RIB40] gi|83768839|dbj|BAE58976.1| protein product [Aspergillus oryzae]
  misc_feature (8)..(158): NCBI GI: 238490950 Blast Desc: NUDIX domain protein [Aspergillus flavus NRRL3357] gi|220697125|gb|EED53466.1| NUDIX domain protein [Aspergillus flavus NRRL3357]
  misc_feature: Useful for introducing or modulating the production of volatile compounds
MAGCCPVFSFGYHPSVIEFTVSRRSYLTSHPDACFGYVATSALVLDHGIGSNPRVLLLQRAASDSCPNKWEPPGGACEETDESILHAAVRELWEEADLQVACILGLVGVPYDFSISIGEVRQFGFAVSVKTENGTLPMVRLNPEEHQRFVWATESEVRARNVDGVDLEFTTEEVERMVLLAFNNSRQR

SEQ ID NO: 38616 - DNA, 2171 bp, Muscodor strobelii
  misc_feature: SGI EST ID NO. CUFF.92896.0
  misc_feature: Variant of the nucleotide sequence at SEQ ID NO 38614
taagtatctaaagcacgccatttggatgggatagttgtctagaaatactggtaggactaaagtagaggaagacaacaatatatgggcagctcattcaagcttggtagcgttgttttggacgtcaaaatcacccctcatcccaactcgcggtaggtccaagcgcgatacctgcgaagacatgttgttccaatgcatgctgaccactgccaatacgcacagcacaaagcctgccaagccatacatacaccccaattctaagtaatggctggctgctgccctgtcttcagcttcggttatcatccctccgtcatagaatttaccgtctccagacgctcatatctcacatctcacccggatgcttgttttggttatgttgctaccagcgctctggtgttggatcatggaatcggatcgaatcctcgtgttctcctacttcaacgtgccgcaagcgactcctgtcccaacaaatgggagcctccgggcggtgcctgcgaagaaactgatgaaagcattctgcacgccgccgttcgtgagctttgggaggaagccgaccttcaagtggcctgcattcttggacttgtcggggttccttacgacttttctatcagtatcggggaggtgcgccagtttggtttcgccgtatccgtcaagactgagaatggaacattgccaatggtaaggctcaatcctgaggagcatcagcgtttcgtttgggctactgaaagtgaggtacgggcgagaaatgtggacggtgtcgacttggaattcacgacagaagaagttgagcgaatggtacttctagcttttaacaatagccggcagaggtgaatagtaaagtgcgcgatagtgacactagaattgagctgacttcatcaaataatatcaaatatcctctcttggacttcataccgagctaacatgtccattgcctcactcttcatcagcccgtggacgtagcactcgccaacaagcaagtaatgcttgtcgatgggtctaaggcagaatggcatcttgcaaccgaacagaacgcatacgatgtctccagcttgcagcactgccgggccgagtacataatagccaccactagtccttgctaacactcgaccgtctgcagctgaagccgcccaccgaccccagctctcatgctgcctttcgtatttcatagcccctacgtctttaattctttgagatatgatgtttgttgttccaaaggtctccacgacatatctcgctgccttctgtagccactctttctctggcacttccccatatgacctacactcatgccctgcggcctgaacgcagccattgctaagtgtctgcatgaaagcgaagaaggccgtctgaccgtctacatacaagtcttccagattgaagcagtctttttggcagatctcatgccatagcttctctatcgtcgtgataggctgatcgagtatcttcttgttataaaagtccgtggcgaacagtcgttcggagcacgctacgatggtgtctatctccacgcccgaggctcgaagcgtgcagcgtttttcaatcgcaatctcagtattcacagtagaattaccgtgggcgtaatgcgggcagatcggctctgctaagattataccctcggagcatctccaatcgggcacccaggatggcagtctgcgctgaacacccgcgcgtgcttctcgactcatgtcttcttcccatcccgatgcaacgcaggacgggaagccttgacgaggatgctgcacagcagccaacacaatgtaagtcgccgccggtctttcgcgtaatatctgtactgcaacatcgaggtatgtctcctcaacagtcctatgataatctgcaatgattgatataggtccacaacttagcgggtgatttgagcggagagaaaaatgtccgagaaaagcaaatattcggtccctgtcgtcgctgaattggaggtggcgcgccctctgtaactcgtatacaaaattaaaccggtttacgtggtgggttaatctgcttggctctacgaaccgccggaacaaaaacgagatgtccgatatgttgtcgatccccagcttattgcgaagatagtgataaggctttagtctttcgcacacattagccagcgtaacccaatcgattgtggcatcgccccagattatagttgccggcgtgttagttcctatctcctg

SEQ ID NO: 38617 - DNA, 828 bp, Muscodor strobelii
  misc_feature: SGI cDNA ID NO. 573422
  misc_feature: Encodes the peptide sequence at SEQ ID NO 38618
atggacagttccccgccagccagcccatccgacttgattactaagaatggagacttcttaaccgaatataaactgcctggaacgcagcagcagtacaataacttaatggaggctacctgcgagaaatgccggacaatgctcaaggatgtagatggaaagatagtcctaggtgttgtgcaaggtagaatcaagaagcccatgtctttaaacgacaagctggatgatttgagaaagaattgggacttcaacaactcagtctctattattgaacatcctgaaatgggcgatcttgctggggttcgcatagggttatacttccctgacgacgtacccaggattgcgaaggtgatcgaagagcacttcgatataaggcatgtatttggtacagtaacgggcggacgggagactgcgacagagagaaatattgatattgacaaacatctggatggaaaatggcactcccaaggcccataccggacagtagagtactgggaacactacggatacaagtcatggcaggtcgtcgtcgagtggaaggattctttatcggaggagcttagagagaagttggttcctagacggcgtagagttgagattcaggttggaacggtggtaacgcaggcctgggcagaagtacaacataacatcatctacaagaaccccaacaacctccacaccacgccgactatgagacgaatgatcgacgcgattaatggcctagcaataactacggatatcatgctcaaagaattagagcagaacttgggaagagcaatggaggaaaagaagatgcaattgcagggtaaatctggttggagtgcgccataa

SEQ ID NO: 38618 - protein, 275 aa, Muscodor strobelii
  misc_feature: SGI Peptide ID NO. 573422
  misc_feature (61)..(222): Pfam Id: PF04607 Pfam Desc: Region found in RelA / SpoT proteins
  misc_feature (61)..(122): Pfam Id: PF04607 Pfam Desc: Region found in RelA / SpoT proteins
  misc_feature (168)..(222): Pfam Id: PF04607 Pfam Desc: Region found in RelA / SpoT proteins
  misc_feature (18)..(255): NCBI GI: 256722284 Blast Desc: NECHADRAFT_87973 [Nectria haematococca mpVI 77-13-4]
  misc_feature (37)..(265): NCBI GI: 229916036 Blast Desc: RelA/SpoT domain protein [Exiguobacterium sp. AT1b] gi|229467465|gb|ACQ69237.1| RelA/SpoT domain protein [Exiguobacterium sp. AT1b]
  misc_feature (18)..(225): NCBI GI: 169781300 Blast Desc: [Aspergillus oryzae RIB40] gi|83773855|dbj|BAE63980.1| protein product [Aspergillus oryzae]
  misc_feature (16)..(240): NCBI GI: 258625321 Blast Desc: conserved [Vibrio mimicus VM603] gi|258582397|gb|EEW07245.1| conserved [Vibrio mimicus VM603]
  misc_feature (34)..(272): NCBI GI: 256801926 Blast Desc: RelA/SpoT domain protein [Streptomyces viridochromogenes DSM 40736]
  misc_feature (55)..(252): NCBI GI: 266624941 Blast Desc: ChatD1_29994 [Clostridium hathewayi DSM 13479]
  misc_feature (18)..(263): NCBI GI: 46127771 Blast Desc: FG08263.1 [Gibberella zeae PH-1]
  misc_feature (55)..(251): NCBI GI: 116179048 Blast Desc: [Chaetomium globosum CBS 148.51] gi|88184449|gb|EAQ91917.1| [Chaetomium globosum CBS 148.51]
  misc_feature (32)..(252): NCBI GI: 239623527 Blast Desc: conserved [Clostridiales bacterium 1_7_47_FAA] gi|239521558|gb|EEQ61424.1| conserved [Clostridiales bacterium 1_7_47_FAA]
  misc_feature (50)..(225): NCBI GI: 238501148 Blast Desc: conserved [Aspergillus flavus NRRL3357] gi|220692045|gb|EED48392.1| conserved [Aspergillus flavus NRRL3357]
MDSSPPASPSDLITKNGDFLTEYKLPGTQQQYNNLMEATCEKCRTMLKDVDGKIVLGVVQGRIKKPMSLNDKLDDLRKNWDFNNSVSIIEHPEMGDLAGVRIGLYFPDDVPRIAKVIEEHFDIRHVFGTVTGGRETATERNIDIDKHLDGKWHSQGPYRTVEYWEHYGYKSWQVVVEWKDSLSEELREKLVPRRRRVEIQVGTVVTQAWAEVQHNIIYKNPNNLHTTPTMRRMIDAINGLAITTDIMLKELEQNLGRAMEEKKMQLQGKSGWSAP

SEQ ID NO: 38619 - DNA, 1181 bp, Muscodor strobelii
  misc_feature: SGI EST ID NO. CUFF.92870.0
  misc_feature: Variant of the nucleotide sequence at SEQ ID NO 38617
cagcatagccctaggctcaccaggcccatgaggctctcagcactgtttcgccattttggtacatatctacaacgccattcaccaattgcttgcacatcgatgttatgatgatgtagtgccccgtatcccgtccaccttggcagtgtgattgatattcgttggtactaagctcttcattcttaaacagtcattcatttggctgagtgtatacatattacttgaagctattttactctctttcagaaaatggacagttccccgccagccagcccatccgacttgattactaagaatggagacttcttaaccgaatataaactgcctggaacgcagcagcagtacaataacttaatggaggctacctgcgagaaatgccggacaatgctcaaggatgtagatggaaagatagtcctaggtgttgtgcaaggtagaatcaagaagcccatgtctttaaacgacaagctggatgatttgagaaagaattgggacttcaacaactcagtctctattattgaacatcctgaaatgggcgatcttgctggggttcgcatagggttatacttccctgacgacgtacccaggattgcgaaggtgatcgaagagcacttcgatataaggcatgtatttggtacagtaacgggcggacgggagactgcgacagagagaaatattgatattgacaaacatctggatggaaaatggcactcccaaggcccataccggacagtagagtactgggaacactacggatacaagtcatggcaggtcgtcgtcgagtggaaggattctttatcggaggagcttagagagaagttggttcctagacggcgtagagttgagattcaggttggaacggtggtaacgcaggcctgggcagaagtacaacataacatcatctacaagaaccccaacaacctccacaccacgccgactatgagacgaatgatcgacgcgattaatggcctagcaataactacggatatcatgctcaaagaattagagcagaacttgggaagagcaatggaggaaaagaagatgcaattgcagggtaaatctggttggagtgcgccataagcttgttctcctccaattaggttgacacacagggacactcggggctccctatgactcctggaaaccatgaaaattcgcttgatgttgatctgatgaggaaatagtac

SEQ ID NO: 38620 - DNA, 678 bp, Muscodor strobelii
  misc_feature: SGI cDNA ID NO. 573423
  misc_feature: Encodes the peptide sequence at SEQ ID NO 38621
atgtctgaactcgacgactcgcgaccatgcgctagtaccatggtacaaaagtacgcatgtcatatcaaggacaaagtagtcctcgtcacaggcgcttccccaaactcactaggagccgcatttgtcaatgctatcaagcacgggcgaccagcacacattattcttgctgggcggagccaagagaaaacaataagaacctatgagttgctcaaaaacacggaaaacgctcctatggtgtctatgccccaattggatctttcatccttcgatgccatccgcacagctgctcaagaggttatgtcctggaatcacatccctaacattgatgttctcgtcaacagtgctgctataatgaccacagactgggccgtatcaaaggacggatacgaactacaattcgcgacaaatcatttaggccctttcctatttacgaacatgataatgccgaagctcctggcatcgcccgcaccccgcatcatcaccgtgagcagcgatcttcatcgattgaacccaattcgtttcttcgatcacaattttcatgacggggagtattatgatagatggcaggcatatgggcaaagtaaaactgcaaatgctctgatggccttgtctttggcagagaagcttggcgacaagcataacatggtgtcggttagcctgcatcctggctacgtctaa

SEQ ID NO: 38621 - protein, 225 aa, Muscodor strobelii
  misc_feature: SGI Peptide ID NO. 573423
  misc_feature (10)..(225): NCBI GI: 189211632 Blast Desc: retinol dehydrogenase 13 [Pyrenophora tritici-repentis Pt-1C-BFP] gi|187979344|gb|EDU45970.1| retinol dehydrogenase 13 [Pyrenophora tritici-repentis Pt-1C-BFP]
  misc_feature (11)..(225): NCBI GI: 255953383 Blast Desc: Pc21g03960 [Penicillium chrysogenum Wisconsin 54-1255] gi|211589155|emb|CAP95293.1| Pc21g03960 [Penicillium chrysogenum Wisconsin 54-1255]
  misc_feature (11)..(225): NCBI GI: 255942229 Blast Desc: Pc18g00360 [Penicillium chrysogenum Wisconsin 54-1255] gi|211586616|emb|CAP94260.1| Pc18g00360 [Penicillium chrysogenum Wisconsin 54-1255]
  misc_feature (6)..(225): NCBI GI: 121700999 Blast Desc: short-chain dehydrogenase, [Aspergillus clavatus NRRL 1] gi|119396907|gb|EAW07338.1| short-chain dehydrogenase, [Aspergillus clavatus NRRL 1]
  misc_feature (6)..(225): NCBI GI: 171685268 Blast Desc: protein product [Podospora anserina] gi|170942595|emb|CAP68247.1| protein product [Podospora anserina]
  misc_feature (14)..(225): NCBI GI: 115387141 Blast Desc: conserved [Aspergillus terreus NIH2624] gi|114195160|gb|EAU36860.1| conserved [Aspergillus terreus NIH2624]
  misc_feature (7)..(225): NCBI GI: 159124059 Blast Desc: short-chain dehydrogenase, [Aspergillus fumigatus A1163]
  misc_feature (6)..(225): NCBI GI: 67522653 Blast Desc: AN1783.2 [Aspergillus nidulans FGSC A4] gi|40744803|gb|EAA63959.1| AN1783.2 [Aspergillus nidulans FGSC A4] gi|259487128|tpe|CBF85553.1| TPA: short-chain dehydrogenase,
  misc_feature (14)..(225): NCBI GI: 119483516 Blast Desc: short-chain dehydrogenase, [Neosartorya fischeri NRRL 181] gi|119409817|gb|EAW19764.1| short-chain dehydrogenase, [Neosartorya fischeri NRRL 181]
  misc_feature (6)..(225): NCBI GI: 238839103 Blast Desc: WW domain-containing oxidoreductase [Microsporum canis CBS 113480]
  misc_feature (22)..(225): SWISSPROT Homolog: EC 1.3.1.33 Protochlorophyllide reductase
MSELDDSRPCASTMVQKYACHIKDKVVLVTGASPNSLGAAFVNAIKHGRPAHIILAGRSQEKTIRTYELLKNTENAPMVSMPQLDLSSFDAIRTAAQEVMSWNHIPNIDVLVNSAAIMTTDWAVSKDGYELQFATNHLGPFLFTNMIMPKLLASPAPRIITVSSDLHRLNPIRFFDHNFHDGEYYDRWQAYGQSKTANALMALSLAEKLGDKHNMVSVSLHPGYV

SEQ ID NO: 38622 - DNA, 1632 bp, Muscodor strobelii
  misc_feature: SGI cDNA ID NO. 573424
  misc_feature: Encodes the peptide sequence at SEQ ID NO 38623
atgggtgacgcgattgaagcggctgcgccgcataccacttttgacaccattttggtgctcgattttggatctcagactagccatctcatcctgcgtcgtctaagatcgctcaaagtgtatgccgaaatgcttagctgcactaccaaacttgcggatcttacctggaagcctgctggcattattctcagcggaggtccatcctctgtttacgatgaaggatctcctcatgttgatcctgctgtctttgatctcggggtcccaatcctgggtatctgctacggctgccaggaaatcgcctggcgtatcgatgcacagaacgtcgctcgcggtactaatagagagtacggcgagacggaccttaacatccacaaggtttccaaccatgccgaccgactgttcgatggacttggagacaccctacatgttttcatgagccactttgacaagctcgttcatcttccggagaatttcatcactattgccagcacgaagaacgctgagtatgctggcatcgcccatgaatcgaagccaatcttcggaatccagcttcaccctgagatctctcacacatcacgtggaaccgatatcctcggcaattttgcacttaagatttgcggcacccgggcagattgggagatggagaatttcaccgaaaaggagatcattcgaatccgaaagcttgtcggagataccgctcaagttattggagcagtctctgggggtgtcgatagcacggtggccgctaaattgatgaaagaagctatcggcgacagattccacgctattctcattgacactggcctgatgcgactgaatgaatgtccacaagtcaaagaaacccttgaggagcatctcggcatcaacctcactgtcgtggatgggtccgagctcttccttggacggcttgccggagttctagaacctgaggctaagcggaagatcatcggcggaaccttcatcgacctcttcgagattgaggcactcagaattgagagagaagccgagaacacagctcgtgctggcaaggtcgagtggtttctccaaggtaccctctacgccgatctaatagagagtctcagcttcaagggcccttcggccacaattaaatcccaccacaacgccggaggtctcccagcacgcatgcagaacggcgaagcacagctcaagttgcttgagccactgcgtgagctattcaaggacgaggtgaggagcttcggtcgccaactgggaatccatgaggatctcatcatgagacatccattccccggtccaggactcggagtgcgtatcataggggaggttacgcccgaaagggtcgatattatcaaaaaggccgatcacatcttcatgtcaatgatcaaagaggccggtatatacaacgagattacccaagcctacgctgctcttgattcgaacagagccgttggtgtgcagggagactccagggtatacggatacatctgcgtcctaagagcagtgaccagcttagacatgatgagcgccgaaccgtatgagttttcgtggaagttcctcaaggccgtcagcaggcggatcgtcaacgaagtcgaaggcatcgccagggttgtctacgatacaacatcaaaacctcctggaacgatcgagttagagtga

SEQ ID NO: 38623 - protein, 543 aa, Muscodor strobelii
  misc_feature: SGI Peptide ID NO. 573424
  misc_feature (18)..(204): Pfam Id: PF00117 Pfam Desc: Glutamine amidotransferase class-I
  misc_feature (450)..(542): Pfam Id: PF00958 Pfam Desc: GMP synthase C terminal domain
  misc_feature (232)..(254): Pfam Id: PF03054 Pfam Desc: tRNA methyl transferase
  misc_feature (1)..(543): NCBI GI: 261356632 Blast Desc: GMP synthase [Verticillium albo-atrum VaMs.102]
  misc_feature (1)..(543): NCBI GI: 46137685 Blast Desc: FG10358.1 [Gibberella zeae PH-1] gi|121810368|sp|Q4HXF0.1|GUAA_GIBZE RecName: Full=GMP synthase [glutamine-hydrolyzing]; AltName: Full=Glutamine AltName:
  misc_feature (1)..(543): NCBI GI: 115437102 Blast Desc: GMP synthase [Aspergillus terreus NIH2624] gi|114188541|gb|EAU30241.1| GMP synthase [Aspergillus terreus NIH2624]
  misc_feature (6)..(543): NCBI GI: 242814184 Blast Desc: GMP synthase [Talaromyces stipitatus ATCC 10500] gi|218714659|gb|EED14082.1| GMP synthase [Talaromyces stipitatus ATCC 10500]
  misc_feature (1)..(543): NCBI GI: 212538631 Blast Desc: GMP synthase [Penicillium marneffei ATCC 18224] gi|210069213|gb|EEA23304.1| GMP synthase [Penicillium marneffei ATCC 18224]
  misc_feature (1)..(543): NCBI GI: 256720942 Blast Desc: NECHADRAFT_64031 [Nectria haematococca mpVI 77-13-4]
  misc_feature (1)..(543): NCBI GI: 256722804 Blast Desc: NECHADRAFT_97500 [Nectria haematococca mpVI 77-13-4]
  misc_feature (6)..(543): NCBI GI: 39973869 Blast Desc: MGG_00919 [Magnaporthe grisea 70-15] gi|145018133|gb|EDK02412.1| MGG_00919 [Magnaporthe grisea 70-15]
  misc_feature (10)..(543): NCBI GI: 169774339 Blast Desc: [Aspergillus oryzae RIB40] gi|238497143|ref|XP_002379807.1| GMP synthase [Aspergillus flavus NRRL3357] gi|121802477|sp|Q2UFN0.1|GUAA_ASPOR RecName: Full=GMP
  misc_feature (10)..(543): NCBI GI: 119175480 Blast Desc: GMP synthase [Coccidioides immitis RS]
  misc_feature (1)..(543): SWISSPROT Homolog: EC 6.3.5.2 GMP synthase (glutamine-hydrolyzing)
MGDAIEAAAPHTTFDTILVLDFGSQTSHLILRRLRSLKVYAEMLSCTTKLADLTWKPAGIILSGGPSSVYDEGSPHVDPAVFDLGVPILGICYGCQEIAWRIDAQNVARGTNREYGETDLNIHKVSNHADRLFDGLGDTLHVFMSHFDKLVHLPENFITIASTKNAEYAGIAHESKPIFGIQLHPEISHTSRGTDILGNFALKICGTRADWEMENFTEKEIIRIRKLVGDTAQVIGAVSGGVDSTVAAKLMKEAIGDRFHAILIDTGLMRLNECPQVKETLEEHLGINLTVVDGSELFLGRLAGVLEPEAKRKIIGGTFIDLFEIEALRIEREAENTARAGKVEWFLQGTLYADLIESLSFKGPSATIKSHHNAGGLPARMQNGEAQLKLLEPLRELFKDEVRSFGRQLGIHEDLIMRHPFPGPGLGVRIIGEVTPERVDIIKKADHIFMSMIKEAGIYNEITQAYAALDSNRAVGVQGDSRVYGYICVLRAVTSLDMMSAEPYEFSWKFLKAVSRRIVNEVEGIARVVYDTTSKPPGTIELE

SEQ ID NO: 38624 - DNA, 2254 bp, Muscodor strobelii
  misc_feature: SGI EST ID NO. CUFF.92899.1
  misc_feature: Variant of the nucleotide sequence at SEQ ID NO 38622
cccgggttgggcaactcaatcattggaactatcttatacttacgaggtgtaactacaataacacagtgttttatccaaagaggggcaaatatacaagggtccgatgaacggtagtaaaccgattagatagctggtggggtggggcccgcgactcgattttctactcaccacccttctgacgtctcacaatacagattgcaggcagcaaattttcgtcgagctgtcaagtaatcatatcaccagtgtaccaggctgatttcaggtgtcctctaaatctactggcgaattattttcacaatgggtgacgcgattgaagcggctgcgccgcataccacttttgacaccattttggtgctcgattttggatctcagactagccatctcatcctgcgtcgtctaagatcgctcaaagtgtatgccgaaatgcttagctgcactaccaaacttgcggatcttacctggaagcctgctggcattattctcagcggaggtccatcctctgtttacgatgaaggatctcctcatgttgatcctgctgtctttgatctcggggtcccaatcctgggtatctgctacggctgccaggaaatcgcctggcgtatcgatgcacagaacgtcgctcgcggtactaatagagagtacggcgagacggaccttaacatccacaaggtttccaaccatgccgaccgactgttcgatggacttggagacaccctacatgttttcatgagccactttgacaagctcgttcatcttccggagaatttcatcactattgccagcacgaagaacgctgagtatgctggcatcgcccatgaatcgaagccaatcttcggaatccagcttcaccctgagatctctcacacatcacgtggaaccgatatcctcggcaattttgcacttaagatttgcggcacccgggcagattgggagatggagaatttcaccgaaaaggagatcattcgaatccgaaagcttgtcggagataccgctcaagttattggagcagtctctgggggtgtcgatagcacggtggccgctaaattgatgaaagaagctatcggcgacagattccacgctattctcattgacactggcctgatgcgactgaatgaatgtccacaagtcaaagaaacccttgaggagcatctcggcatcaacctcactgtcgtggatgggtccgagctcttccttggacggcttgccggagttctagaacctgaggctaagcggaagatcatcggcggaaccttcatcgacctcttcgagattgaggcactcagaattgagagagaagccgagaacacagctcgtgctggcaaggtcgagtggtttctccaaggtaccctctacgccgatctaatagagagtctcagcttcaagggcccttcggccacaattaaatcccaccacaacgccggaggtctcccagcacgcatgcagaacggcgaagcacagctcaagttgcttgagccactgcgtgagctattcaaggacgaggtgaggagcttcggtcgccaactgggaatccatgaggatctcatcatgagacatccattccccggtccaggactcggagtgcgtatcataggggaggttacgcccgaaagggtcgatattatcaaaaaggccgatcacatcttcatgtcaatgatcaaagaggccggtatatacaacgagattacccaagcctacgctgctcttgattcgaacagagccgttggtgtgcagggagactccagggtatacggatacatctgcgtcctaagagcagtgaccagcttagacatgatgagcgccgaaccgtatgagttttcgtggaagttcctcaaggccgtcagcaggcggatcgtcaacgaagtcgaaggcatcgccagggttgtctacgatacaacatcaaaacctcctggaacgatcgagttagagtgatgcgatttacgtataatttagatagatagatcccttattctgcatgactttcgtgaatgagcttcaagtatgcattggtcgggtcgaaccagagcaatcgtggcaagacaatcattcagaatggaacagcaaggaagactaaaaagaaatgcctaaaggtctgttcagatgacgcccaacagggtgtggtcaacgtcaagtagggcatctatcatgccaatattttggacttgtcatctcctgcagagtcagacacaagaataaatgcgctcgagcgccaggttctacatcaagaagatcgtagtttcataaaccttctattttg

SEQ ID NO: 38625 - DNA, 1698 bp, Muscodor strobelii
  misc_feature: SGI cDNA ID NO. 573425
  misc_feature: Encodes the peptide sequence at SEQ ID NO 38626
atgggtgacgcgattgaagcggctgcgccgcataccacttttgacaccattttggtgctcgattttggatctcagactagccatctcatcctgcgtcgtctaagatcgctcaaagtgtatgccgaaatgcttagctgcactaccaaacttgcggatcttacctggaagcctgctggcattattctcagcggaggtccatcctctgtttacgatgaaggatctcctcatgttgatcctgctgtctttgatctcggggtcccaatcctgggtatctgctacggctgccaggaaatcgcctggcgtatcgatgcacagaacgtcgctcgcggtactaatagagagtacggcgagacggaccttaacatccacaaggtttccaaccatgccgaccgactgttcgatggacttggagacaccctacatgttttcatgagccactttgacaagctcgttcatcttccggagaatttcatcactattgccagcacgaagaacgctgagtatgctggcatcgcccatgaatcgaagccaatcttcggaatccagcttcaccctgagatctctcacacatcacgtggaaccgatatcctcggcaattttgcacttaagatttgcggcacccgggcagattgggagatggagaatttcaccgaaaaggagatcattcgaatccgaaagcttgtcggagataccgctcaagttattggagcagtctctgggggtgtcgatagcacggtggccgctaaattgatgaaagaagctatcggcgacagattccacgctattctcattgacactggcctgatgcgactgaatgaatgtccacaagtcaaagaaacccttgaggagcatctcggcatcaacctcactgtcgtggatgggtccgagctcttccttggacggcttgccggagttctagaacctgaggctaagcggaagatcatcggcggaaccttcatcgacctcttcgagattgaggcactcagaattgagagagaagccgagaacacagctcgtgctggcaaggtcgagtggtttctccaaggtaccctctacgccgatctaatagagagtctcagcttcaagggcccttcggccacaattaaatcccaccacaacgccggaggtctcccagcacgcatgcagaacggcgaagcacagctcaagttgcttgagccactgcgtgagctattcaaggacgaggtgaggagcttcggtcgccaactgggaatccatgaggatctcatcatgagacatccattccccggtccaggactcggagtgcgtatcataggggaggttacgcccgaaagggtcgatattatcaaaaaggccgatcacatcttcatgtcaatgatcaaagaggccggtatatacaacgagattacccaagcctacgctgctcttgattcgaacagagccgttggtgtgcagggagactccagggtatacggatacatctgcgtcctaagagcagtgaccagcttagacatgatgagcgccgaaccgtatgagttttcgtggaagttcctcaaggccgtcagcaggcggatcgtcaacgaagtcgaaggcatcgccagggttgtctacgatacaacatcaaaacctcctggtaagatagccctcctctcttctcataacctcacgtggacgtgttcaatactaataaccatcctaggaacgatcgagttagagtga

SEQ ID NO: 38626 - protein, 565 aa, Muscodor strobelii
  misc_feature: SGI Peptide ID NO. 573425
  misc_feature (18)..(204): Pfam Id: PF00117 Pfam Desc: Glutamine amidotransferase class-I
  misc_feature (450)..(542): Pfam Id: PF00958 Pfam Desc: GMP synthase C terminal domain
  misc_feature (450)..(538): Pfam Id: PF00958 Pfam Desc: GMP synthase C terminal domain
  misc_feature (232)..(254): Pfam Id: PF03054 Pfam Desc: tRNA methyl transferase
  misc_feature (1)..(542): NCBI GI: 261356632 Blast Desc: GMP synthase [Verticillium albo-atrum VaMs.102]
  misc_feature (1)..(542): NCBI GI: 46137685 Blast Desc: FG10358.1 [Gibberella zeae PH-1] gi|121810368|sp|Q4HXF0.1|GUAA_GIBZE RecName: Full=GMP synthase [glutamine-hydrolyzing]; AltName: Full=Glutamine AltName:
  misc_feature (1)..(542): NCBI GI: 115437102 Blast Desc: GMP synthase [Aspergillus terreus NIH2624] gi|114188541|gb|EAU30241.1| GMP synthase [Aspergillus terreus NIH2624]
  misc_feature (6)..(542): NCBI GI: 242814184 Blast Desc: GMP synthase [Talaromyces stipitatus ATCC 10500] gi|218714659|gb|EED14082.1| GMP synthase [Talaromyces stipitatus ATCC 10500]
  misc_feature (1)..(542): NCBI GI: 212538631 Blast Desc: GMP synthase [Penicillium marneffei ATCC 18224] gi|210069213|gb|EEA23304.1| GMP synthase [Penicillium marneffei ATCC 18224]
  misc_feature (1)..(542): NCBI GI: 256720942 Blast Desc: NECHADRAFT_64031 [Nectria haematococca mpVI 77-13-4]
  misc_feature (1)..(542): NCBI GI: 256722804 Blast Desc: NECHADRAFT_97500 [Nectria haematococca mpVI 77-13-4]
  misc_feature (6)..(542): NCBI GI: 39973869 Blast Desc: MGG_00919 [Magnaporthe grisea 70-15] gi|145018133|gb|EDK02412.1| MGG_00919 [Magnaporthe grisea 70-15]
  misc_feature (10)..(542): NCBI GI: 169774339 Blast Desc: [Aspergillus oryzae RIB40] gi|238497143|ref|XP_002379807.1| GMP synthase [Aspergillus flavus NRRL3357] gi|121802477|sp|Q2UFN0.1|GUAA_ASPOR RecName: Full=GMP
  misc_feature (10)..(542): NCBI GI: 119175480 Blast Desc: GMP synthase [Coccidioides immitis RS]
  misc_feature (1)..(542): SWISSPROT Homolog: EC 6.3.5.2 GMP synthase (glutamine-hydrolyzing)
MGDAIEAAAPHTTFDTILVLDFGSQTSHLILRRLRSLKVYAEMLSCTTKLADLTWKPAGIILSGGPSSVYDEGSPHVDPAVFDLGVPILGICYGCQEIAWRIDAQNVARGTNREYGETDLNIHKVSNHADRLFDGLGDTLHVFMSHFDKLVHLPENFITIASTKNAEYAGIAHESKPIFGIQLHPEISHTSRGTDILGNFALKICGTRADWEMENFTEKEIIRIRKLVGDTAQVIGAVSGGVDSTVAAKLMKEAIGDRFHAILIDTGLMRLNECPQVKETLEEHLGINLTVVDGSELFLGRLAGVLEPEAKRKIIGGTFIDLFEIEALRIEREAENTARAGKVEWFLQGTLYADLIESLSFKGPSATIKSHHNAGGLPARMQNGEAQLKLLEPLRELFKDEVRSFGRQLGIHEDLIMRHPFPGPGLGVRIIGEVTPERVDIIKKADHIFMSMIKEAGIYNEITQAYAALDSNRAVGVQGDSRVYGYICVLRAVTSLDMMSAEPYEFSWKFLKAVSRRIVNEVEGIARVVYDTTSKPPGKIALLSSHNLTWTCSILITILGTIELE

SEQ ID NO: 38627 - DNA, 2254 bp, Muscodor strobelii; identical to SEQ ID NO: 38624
  misc_feature: SGI EST ID NO. CUFF.92899.1
  misc_feature: Variant of the nucleotide sequence at SEQ ID NO 38625

SEQ ID NO: 38628 - DNA, 1764 bp, Muscodor strobelii
  misc_feature: SGI cDNA ID NO. 573426
  misc_feature: Reduced expression when VOC is produced
  misc_feature: Encodes the peptide sequence at SEQ ID NO 38629
atggaatcgaccgaacgtacctggggcatcacgggccccatcgccgtcatcctccccacgcccgccgagaccagcgccaccaatgccttactcgaggagctgcgccgccagaacaccttcgagcctgccgccgacacccgcaagagagagaaggtgctagacgacatccagcgcttcaccgacgagttcgtccgcagggtcgccaagcagaaggagccgcacaacgccgtgctgatccgcgatgcccgcggccaggtcttcacctacggcagctactgcctcggcgtctacggccccggctccgacatcgacaccctcgtcaccgccccccgctacgtctcccgccccgacttcttccgcatgttccccgacatcctcagggagctctccccgcccgacgccatcaccgagctcgtcgtcgtcgaggaagcccacgtgcccatcatcaagctcgagtactggggcatcagcatcgacctgatcttctcccgcatcgccaccctgacccagttccccccgcgcggccagctgcagctgaccaacaacgagtacctccgcggcctcgacgagcaggagctgcgctccctcaacggcacccgtgtcacccgcgagatcctcaacctcgtccccgagcagagcaccttccgcaccgccctgcgcgccatcaagctgtgggctcagcgccgagccatctatgccaatatcatcggcttcccgggcggagtcgtctgggccatgatggtcgcccgcgtctgccagctgtacccgaaagccacgagttctgtcatcatcgccaagttcttcatagtaatgaagacctggccctggccgatgcccgtgcagctgaagaagctggaggacggtcccctcaacgtgcgcacctggaaccccaaagtgtacaagtctgacgcctatcatctgatgcctgttatcacgcctgcctatccccagatgtgtgccacgtacaatatcaaccactcaggcaaggccgtcatccagaaggagctggaacgcggcgcccagctgaccgagaacatcatggatggcaagctgccatggaaggaactgtttgtcaaacacaccttcttcaccaaggactacaaatactacctcgccatcgtcgccacgagcacgaccaaggaggcccacagtatctggtctggattcatagagtctaaggttcgtatcctcgtggtcgatctggagcgccacgcctcgatcgccattgctcggcccttcaataagaaattcgagcgccagcacaagaccaagaacgaccaggagacggaacaggtgcagaacgactcgataagatacgtagtgaaagacgaagagccccccaagaaagacggtgctactgatgccaatggtgcaaacggagacagcaaggataaatcggagacttccgccgacggcacacgactctatacggcgacgatgtatgtcggtctggatcttgctgaaggcgccaagtcgctggatttatcctaccaagtcaacaacttcaagaggctttgccatgattgggacaagtacaaagaggacctcaactttatcaacattcaacacgtcaaggctgccaatctacccgacgatgtcttcgagcccggcgaggtcaagcctgttcgctcccttaagaaggcgggcacgaacggggccactgcacccgcgcctcggaagcgcactgctccagttgatggccaccaacctccagcaaaacgacaacaccagaccgccgagaccgccgtcgctcccgccggatga

SEQ ID NO: 38629 - protein, 587 aa, Muscodor strobelii
  misc_feature: SGI Peptide ID NO. 573426
  misc_feature (71)..(167): Pfam Id: PF01909 Pfam Desc: Nucleotidyltransferase domain
  misc_feature (5)..(360): Pfam Id: PF04928 Pfam Desc: Poly(A) polymerase central domain
  misc_feature (361)..(544): Pfam Id: PF04926 Pfam Desc: Poly(A) polymerase RNA binding domain
  misc_feature (86)..(167): Pfam Id: PF01909 Pfam Desc: Nucleotidyltransferase domain
  misc_feature (3)..(587): NCBI GI: 46122023 Blast Desc: FG05389.1 [Gibberella zeae PH-1]
  misc_feature (3)..(587): NCBI GI: 256729956 Blast Desc: [Nectria haematococca mpVI 77-13-4]
  misc_feature (9)..(559): NCBI GI: 261358438 Blast Desc: Poly(A) polymerase pla1 [Verticillium albo-atrum VaMs.102]
  misc_feature (9)..(579): NCBI GI: 156037648 Blast Desc: SS1G_12538 [Sclerotinia sclerotiorum 1980] gi|154697946|gb|EDN97684.1| SS1G_12538 [Sclerotinia sclerotiorum 1980]
  misc_feature (4)..(579): NCBI GI: 145608864 Blast Desc: MGG_06313 [Magnaporthe grisea 70-15] gi|145016290|gb|EDK00780.1| MGG_06313 [Magnaporthe grisea 70-15]
  misc_feature (6)..(575): NCBI GI: 212531585 Blast Desc: poly(A) polymerase Pap [Penicillium marneffei ATCC 18224] gi|210071313|gb|EEA25402.1| poly(A) polymerase Pap [Penicillium marneffei ATCC 18224]
  misc_feature (6)..(575): NCBI GI: 242773312 Blast Desc: poly(A) polymerase Pap [Talaromyces stipitatus ATCC 10500] gi|218721833|gb|EED21251.1| poly(A) polymerase Pap [Talaromyces stipitatus ATCC 10500]
  misc_feature (6)..(579): NCBI GI: 154316305 Blast Desc: BC1G_03738 [Botryotinia fuckeliana B05.10] gi|150846524|gb|EDN21717.1| BC1G_03738 [Botryotinia fuckeliana B05.10]
  misc_feature (6)..(575): NCBI GI: 115397689 Blast Desc: Poly(A) polymerase [Aspergillus terreus NIH2624] gi|114192627|gb|EAU34327.1| Poly(A) polymerase [Aspergillus terreus NIH2624]
  misc_feature (6)..(543): NCBI GI: 119494846 Blast Desc: poly(A) polymerase Pap [Neosartorya fischeri NRRL 181] gi|119412387|gb|EAW22328.1| poly(A) polymerase Pap [Neosartorya fischeri NRRL 181]
  misc_feature (4)..(548): SWISSPROT Homolog: EC 2.7.7.19 Polynucleotide adenylyltransferase
  misc_feature: Useful for introducing or modulating the production of volatile compounds
MESTERTWGITGPIAVILPTPAETSATNALLEELRRQNTFEPAADTRKREKVLDDIQRFTDEFVRRVAKQKEPHNAVLIRDARGQVFTYGSYCLGVYGPGSDIDTLVTAPRYVSRPDFFRMFPDILRELSPPDAITELVVVEEAHVPIIKLEYWGISIDLIFSRIATLTQFPPRGQLQLTNNEYLRGLDEQELRSLNGTRVTREILNLVPEQSTFRTALRAIKLWAQRRAIYANIIGFPGGVVWAMMVARVCQLYPKATSSVIIAKFFIVMKTWPWPMPVQLKKLEDGPLNVRTWNPKVYKSDAYHLMPVITPAYPQMCATYNINHSGKAVIQKELERGAQLTENIMDGKLPWKELFVKHTFFTKDYKYYLAIVATSTTKEAHSIWSGFIESKVRILVVDLERHASIAIARPFNKKFERQHKTKNDQETEQVQNDSIRYVVKDEEPPKKDGATDANGANGDSKDKSETSADGTRLYTATMYVGLDLAEGAKSLDLSYQVNNFKRLCHDWDKYKEDLNFINIQHVKAANLPDDVFEPGEVKPVRSLKKAGTNGATAPAPRKRTAPVDGHQPPAKRQHQTAETAVAPAG

SEQ ID NO: 38630 - DNA, 2829 bp, Muscodor strobelii
  misc_feature: SGI EST ID NO. CUFF.92907.1
  misc_feature: Variant of the nucleotide sequence at SEQ ID NO 38628
gcggcgtagaaattgaagcgtgccttccgtgcgtttggagcgcctcttccacctaccacatttcctttccttttccccatctctctgtctctatggccctggcatcatcggcggcgtctcgttcagaattgatgctctagcctgtatctttacattttctttccttcttgtctctttctcccaactggcggcagacttagtgcgctgtgaccatctcgtcgcacatctcgtcgtcatccttgccgtcgactctctctcccatcgtcatccaccaccattgattctgacttgagttggtctccacaacgtccacgacgccaacagcctcatggaatcgaccgaacgtacctggggcatcacgggccccatcgccgtcatcctccccacgcccgccgagaccagcgccaccaatgccttactcgaggagctgcgccgccagaacaccttcgagcctgccgccgacacccgcaagagagagaaggtgctagacgacatccagcgcttcaccgacgagttcgtccgcagggtcgccaagcagaaggagccgcacaacgccgtgctgatccgcgatgcccgcggccaggtcttcacctacggcagctactgcctcggcgtctacggccccggctccgacatcgacaccctcgtcaccgccccccgctacgtctcccgccccgacttcttccgcatgttccccgacatcctcagggagctctccccgcccgacgccatcaccgagctcgtcgtcgtcgaggaagcccacgtgcccatcatcaagctcgagtactggggcatcagcatcgacctgatcttctcccgcatcgccaccctgacccagttccccccgcgcggccagctgcagctgaccaacaacgagtacctccgcggcctcgacgagcaggagctgcgctccctcaacggcacccgtgtcacccgcgagatcctcaacctcgtccccgagcagagcaccttccgcaccgccctgcgcgccatcaagctgtgggctcagcgccgagccatctatgccaatatcatcggcttcccgggcggagtcgtctgggccatgatggtcgcccgcgtctgccagctgtacccgaaagccacgagttctgtcatcatcgccaagttcttcatagtaatgaagacctggccctggccgatgcccgtgcagctgaagaagctggaggacggtcccctcaacgtgcgcacctggaaccccaaagtgtacaagtctgacgcctatcatctgatgcctgttatcacgcctgcctatccccagatgtgtgccacgtacaatatcaaccactcaggcaaggccgtcatccagaaggagctggaacgcggcgcccagctgaccgagaacatcatggatggcaagctgccatggaaggaactgtttgtcaaacacaccttcttcaccaaggactacaaatactacctcgccatcgtcgccacgagcacgaccaaggaggcccacagtatctggtctggattcatagagtctaaggttcgtatcctcgtggtcgatctggagcgccacgcctcgatcgccattgctcggcccttcaataagaaattcgagcgccagcacaagaccaagaacgaccaggagacggaacaggtgcagaacgactcgataagatacgtagtgaaagacgaagagccccccaagaaagacggtgctactgatgccaatggtgcaaacggagacagcaaggataaatcggagacttccgccgacggcacacgactctatacggcgacgatgtatgtcggtctggatcttgctgaaggtacgttgtccacctctccaatgcagttgatttgctcaaagacatgccaatgcgcaacggctcgccatgattttaacttgatcaccgcatcacctaggcgccaagtcgctggatttatcctaccaagtcaacaacttcaagaggctttgccatgattgggacaagtacaaagaggacctcaactttatcaacattcaacacgtcaaggctgccaatctacccgacgatgtcttcgagcccggcgaggtcaagcctgttcgctcccttaagaaggcgggcacgaacggggccactgcacccgcgcctcggaagcgcactgctccagttgatggccaccaacctccagcaaaacgacaacaccagaccgccgagaccgccgtcgctcccgccggatgacacagggatccgcccgcggttgtatacctgctctactgagcacgttggcctaacgccattctgaagtcacggtttatcagggatcacttgtcatggctgtaaaaatgctgacttcgcagtgtcttgagaaaactggataacccacacctgactggtcctcgagatatcgtatctcacttcgaccagattaaaaaaaggaggatcgacatcctccgaatatgacctgagatagcccgtccgttgaccgatccaatacgcacacataggttgaaggacggcaagcattacgacaatgacttcggaaacttagaaaaaaatgcaaatgagtatcgacgacgccccgatacttaatactgaccctccactattgctccgatagacgccagctagctggttcctcacggaagaaatacgctgaaatgacagtgtagtgactgataagaaaatgctcggtgctagtaataggcggacattccacgggtgtggacgtcgctgagtgagagcggtgctctgtcctcatgggaggcgcagaggagaggcaaggaacggaaaatgtatctagtcaagcttgcagatacgagataatcacaaataaaaagaacttttgaggcttatgagcctcggttaaagtcactccgct

SEQ ID NO: 38631 - DNA, 462 bp, Muscodor strobelii
  misc_feature: SGI cDNA ID NO. 573427
  misc_feature: Encodes the peptide sequence at SEQ ID NO 38632
atgcgactactcaatacaaccacttttgagataagagagtttctaggcaacacagtccccgaatacgcaattctctcgcatacatggggacccgctgccgatgaggtctcctatcaagaccttgtgtcgggtaaatggctttccattaccagccccggacgacacaagatccaagcattctgtgaccttgctcgcgatgaaggttatgagtggggctggattgatacgtgctgcattgacaagaccagcagcgcagagctgtccgagtccatcaactcgatgtacagatggtacagagaagctcacatatgctatgcccttctgaacgacgtcaaaatgaagtcggagatccatttggctcgtgtagtggcttacgcggggctggaccctgcaggagcttttggcacctccggaagtcgagttctacgatggcgaatggaatctgatgtgcaccagaagtga

SEQ ID NO: 38632 - protein, 153 aa, Muscodor strobelii
  misc_feature: SGI Peptide ID NO. 573427
  misc_feature (22)..(147): Pfam Id: PF06985 Pfam Desc: Heterokaryon incompatibility protein (HET)
  misc_feature (22)..(106): Pfam Id: PF06985 Pfam Desc: Heterokaryon incompatibility protein (HET)
  misc_feature (1)..(114): NCBI GI: 238492441 Blast Desc: ankyrin repeat-containing protein, [Aspergillus flavus NRRL3357] gi|220695951|gb|EED52293.1| ankyrin repeat-containing protein, [Aspergillus flavus NRRL3357]
  misc_feature (1)..(117): NCBI GI: 171677580 Blast Desc: protein product [Podospora anserina] gi|170936858|emb|CAP61516.1| protein product [Podospora anserina]
  misc_feature (1)..(114): NCBI GI: 169782792 Blast Desc: [Aspergillus oryzae RIB40] gi|83774602|dbj|BAE64725.1| protein product [Aspergillus oryzae]
  misc_feature (1)..(111): NCBI GI: 171694479 Blast Desc: protein product [Podospora anserina] gi|170947188|emb|CAP73993.1| protein product [Podospora anserina]
  misc_feature (1)..(114): NCBI GI: 238485594 Blast Desc: ankyrin repeat-containing protein, [Aspergillus flavus NRRL3357] gi|220698914|gb|EED55253.1| ankyrin repeat-containing protein, [Aspergillus flavus NRRL3357]
  misc_feature (1)..(111): NCBI GI: 256732223 Blast Desc: NECHADRAFT_93752 [Nectria haematococca mpVI 77-13-4]
  misc_feature (1)..(121): NCBI GI: 145257695 Blast Desc: An04g04570 [Aspergillus niger] gi|134058737|emb|CAK38721.1| protein product [Aspergillus niger]
  misc_feature (1)..(111): NCBI GI: 46139565 Blast Desc: FG11297.1 [Gibberella zeae PH-1]
  misc_feature (1)..(111): NCBI GI: 261354085 Blast Desc: HET domain-containing protein [Verticillium albo-atrum VaMs.102]
  misc_feature (1)..(118): NCBI GI: 171683780 Blast Desc: protein product [Podospora anserina] gi|170941850|emb|CAP67503.1| protein product [Podospora anserina]
MRLLNTTTFEIREFLGNTVPEYAILSHTWGPAADEVSYQDLVSGKWLSITSPGRHKIQAFCDLARDEGYEWGWIDTCCIDKTSSAELSESINSMYRWYREAHICYALLNDVKMKSEIHLARVVAYAGLDPAGAFGTSGSRVLRWRMESDVHQK

SEQ ID NO: 38633 - DNA, 2653 bp, Muscodor strobelii
  misc_feature: SGI EST ID NO. CUFF.92891.0
  misc_feature: Variant of the nucleotide sequence at SEQ ID NO 38631
ctgcgatcatctactccttccgcatagcattgattggcgctattcgctgttccatctcagctgccgacctttgacttcgccccctcttagcctcacccattcatgccatacatgtgtattttcaaatatgatcttttcaaacatattgtccgtcatctgacgatgatcatcgcacctcccgctgtcgaccatgcgactactcaatacaaccacttttgagataagagagtttctaggcaacacagtccccgaatacgcaattctctcgcatacatggggacccgctgccgatgaggtctcctatcaagaccttgtgtcgggtaaatggctttccattaccagccccggacgacacaagatccaagcattctgtgaccttgctcgcgatgaaggttatgagtggggctggattgatacgtgctgcattgacaagaccagcagcgcagagctgtccgagtccatcaactcgatgtacagatggtacagagaagctcacatatgctatgcccttctgaacgacgtcaaaatgaagtcggagatccatttggctcgttggcttacgcggggctggaccctgcaggagcttttggcacctccggaagtcgagttctacgatggcgaatggaatctgatgtgcaccagaagtgaggctgcaaagcacatttcgggagctaccggcattgcaatagaagtgctgctcaaccagacaggtattgatcgttatcccgtggccactcgcatgtcatgggcagcaaaccgagtcaccacaagggtggaagacactgcatactgtcttctgggaatcttcgaggtgaatatgccactactctatggagaaggtaacagagcatttcggcggctacaagaggaaatattgaagataacagaggattacaccttactggcatggtcagggaacggaagaggagtcctcgcaacctctccccattccttccggaacgagtcttcgtctcgtctgtctagttggtcttataatgacattaagataattcgagccaacaagtcatatatcgagcaaacagactttccgtggccgactgatctctccgtggtaagacgcgactgttcgtcagatcaaagaaggaacaatattttggacaccgaatttgaccctcctgtattgacgccccgtggccttcgtgtccgccttccgatcatcgaagaatacgtcccacagggcatgaccgtggatgctcagaaggtgttcttactatttttgaattgctattgccaaaaagacaaatctgtcgtgtgcattcgactaaacccaagtcaaagagagatcacggacacgtatgcgggcccatattatcgtttcgagcaaggtgccctctgccttgtgaaggcaaggagtctgagcgtcgcaatgagaacgatttatttgcatgtgaacttttcgggatacctggcacggaaacaaactcttctcgagaattaccgtcatggtaagctatccgactcgcaagtatctttgttttggtttggtcagtccccattcccgggaaagtttatcacacgatatcatggagcgaagtcaccaacttatcttgccttttcccggggatccgcacacgcatttctcgtctgttccatgtcagcacaaccgtggtgcaaattgatccggaacattgaaggcacactcccccttaacgcgaaggatattgcaccaaagctcgcaagaagcggcagtactcaacagtcacgagactatgtgctgttattttcgggagaagaagtctactgcacattgaaacgtcgaccccgacgctggctggacgttcatctgagaaaattacccaaattttgggagcagacgtggtatttgagcagatcagattgcgactcgtgtagcgaaggtccagagctgccatattttatgccctcttggctacacggtggtccatggatgagggacatctccgagctgtatacagtccaggtatggatcgagcctgagaccaacgaacaagtgacaatgcatctatgggatgagtcggaaggcaaatggacgcattggcctattgataggaagtttgacaaagcatatcttcctcctgatcatccggagtggaaggacgatcctgcgccttgggtggacgaaggagttggatctgactacgataggtatttcgaacacccagataagtaggacgacgaatgagatgcagaggcctttacgaaatgtttccatagcttgatgaccttactatgtgaggcatttgcgtttgatgaacagatcttagaggtgaggatcgctcgtagcagcccaaacaatacggctgccgtgctcttgtaacatgtgcagattacgatcacgctgtcagactctagcgatcagagaatgaggagcctcatcaacccgcaatgttagctcgtcgtcttggaattcatgattcgggatatcgccacgatacattgattagttaaaggtatttccaagcaacggtgtctgatacactgatgtcaagtttacgactgctagtttaactcgcctacggtatgaggaaaggctacgttaatcattgcaacgtaaagtcgttctcaaccgatccagtcgtcctggcatttcttattactctctacagagcttgtggatagctcatctcgtagagacgaaataatacgagttggc

SEQ ID NO: 38634 - DNA, 906 bp, Muscodor strobelii
  misc_feature: SGI cDNA ID NO. 573428
  misc_feature: Elevated expression when VOC is produced
  misc_feature: Encodes the peptide sequence at SEQ ID NO 38635
atggcgctttcaccccctactacagcaatcatcatcgcaattatctttcccattctctcgctcgtcgccgttatatttagattcattgctcgttataagcaggaagcacctgtacaattagatgactacttcatagtcggagctcttgctttcaaccttgggctggggtcaaccaccatttcctctgtactcttgggccatattgggcagcatgtctccgtcagcccagaggggatccccgagtatggtccgtggctcacgacttctcttaaaattcaatggattggactcctcatacaaattgctacgttcgcgctgactaagctgtcgatcgtcctgttctaccgtcgtatcttctgtggccgccggttctacatcattaccggatcgctcctcgcgctgatatccgcatgggccttaacatttctcgtcaccataatcctccaatgtattcctgttgagcaggcttgggtactcccaccccagcaaacaggccgctgttactactatcctgcggtattcaatacactgactactaccaacttcgttattggggttagtgcagttcgcatctattacttctacattatcaatgcagatcccaagcttgactatgattacacatacaatgtgacgccggcttacatatggaccaatattgacacaagtgttgctatcgtgtgtgcgtcactgccttcaatatacgtgcttgtgccgaaagtatccattgaggaagttctgcagaggttttcaagcaaactatccctgtggaagtcaagtagatacagcagttcatcccaaacagagcagaatatgggcaatcagaggcaaggaagcacatcgtctaccaagaagctcaatcaaccgtctagcgaatccatctcattgcctaactactctgcctaa

SEQ ID NO: 38635 - protein, 301 aa, Muscodor strobelii
  misc_feature: SGI Peptide ID NO. 573428
  misc_feature (9)..(268): NCBI GI: 119473771 Blast Desc: integral membrane protein, [Neosartorya fischeri NRRL 181] gi|119406914|gb|EAW16864.1| integral membrane protein, [Neosartorya fischeri NRRL 181]
  misc_feature (9)..(261): NCBI GI: 146323145 Blast Desc: integral membrane protein Pth11-like [Aspergillus fumigatus Af293] gi|129556487|gb|EAL86403.2| integral membrane protein Pth11-like, [Aspergillus fumigatus Af293] integral A1163]
  misc_feature (19)..(298): NCBI GI: 169603796 Blast Desc: SNOG_04906 [Phaeosphaeria nodorum SN15] gi|111066177|gb|EAT87297.1| SNOG_04906 [Phaeosphaeria nodorum SN15]
  misc_feature (19)..(243): NCBI GI: 121719918 Blast Desc: integral membrane protein [Aspergillus clavatus NRRL 1] gi|119404869|gb|EAW15231.1| integral membrane protein [Aspergillus clavatus NRRL 1]
  misc_feature (10)..(277): NCBI GI: 238501762 Blast Desc: conserved [Aspergillus flavus NRRL3357] gi|220692352|gb|EED48699.1| conserved [Aspergillus flavus NRRL3357]
  misc_feature (14)..(252): NCBI GI: 156057509 Blast Desc: [Sclerotinia sclerotiorum 1980] gi|154702271|gb|EDO02010.1| [Sclerotinia sclerotiorum 1980]
  misc_feature (10)..(267): NCBI GI: 212534488 Blast Desc: conserved [Penicillium marneffei ATCC 18224] gi|210069799|gb|EEA23889.1| conserved [Penicillium marneffei ATCC 18224]
  misc_feature (10)..(234): NCBI GI: 121712439 Blast Desc: integral membrane protein, [Aspergillus clavatus NRRL 1] gi|119401983|gb|EAW12405.1| integral membrane protein, [Aspergillus clavatus NRRL 1]
  misc_feature (24)..(277): NCBI GI: 154324046 Blast Desc: [Botryotinia fuckeliana B05.10] gi|150842651|gb|EDN17844.1| [Botryotinia fuckeliana B05.10]
  misc_feature (19)..(243): NCBI GI: 238483045 Blast Desc: integral membrane protein [Aspergillus flavus NRRL3357] gi|220700811|gb|EED57149.1| integral membrane protein [Aspergillus flavus NRRL3357]
  misc_feature: Useful for introducing or modulating the production of volatile compounds
MALSPPTTAIIIAIIFPILSLVAVIFRFIARYKQEAPVQLDDYFIVGALAFNLGLGSTTISSVLLGHIGQHVSVSPEGIPEYGPWLTTSLKIQWIGLLIQIATFALTKLSIVLFYRRIFCGRRFYIITGSLLALISAWALTFLVTIILQCIPVEQAWVLPPQQTGRCYYYPAVFNTLTTTNFVIGVSAVRIYYFYIINADPKLDYDYTYNVTPAYIWTNIDTSVAIVCASLPSIYVLVPKVSIEEVLQRFSSKLSLWKSSRYSSSSQTEQNMGNQRQGSTSSTKKLNQPSSESISLPNYSA

SEQ ID NO: 38636 - DNA, 766 bp, Muscodor strobelii
  misc_feature: SGI EST ID NO. CUFF.92904.0
  misc_feature: Variant of the nucleotide sequence at SEQ ID NO 38634
caatctcctgctatttttatccttcgccttgctaggctcaggagtggcaaagagaaaatattgttgcttgatatgaccttaactacccataaaacacctgattacctattcatttcatctccttgagacgtagagactgttatcaatctcgcaatagttgtttatgtgccaacttggcttattctgctaacgttttcccgcgcacatcgtggatctcatttcggctcgccctgggaagctatggcgctttcaccccctactacagcaatcatcatcgcaattatctttcccattctctcgctcgtcgccgttatatttagattcattgctcgttataagcaggaagcacctgtacaattagatgactacttcatagtcggagctcttgctttcaaccttgggctggggtcaaccaccatttcctctgtactcttgggccatattgggcagcatgtctccgtcagcccagaggggatccccgagtatggtccgtggctcacgacttctcttaaaattcaatggattggactcctcatacaaattgctacgttcgcgctgactaagctgtcgatcgtcctgttctaccgtcgtatcttctgtggccgccggttctacatcattaccggatcgctcctcgcgctgatatccgcatgggccttaacatttctcgtcaccataatcctccaatgtattcctgttgagcaggcttgggtactcccaccccagcaaacaggccgctgttactactatcctgcggtattcaata

SEQ ID NO: 38637 - DNA, 492 bp, Muscodor strobelii
  misc_feature: SGI cDNA ID NO. 573429
  misc_feature: Elevated expression when VOC is produced
  misc_feature: Encodes the peptide sequence at SEQ ID NO 38638
atgtcgtcatcctcgacaagaaattatggtgggaacttccctaagatcaccccggcagaatttgcacttgaatggcatgcgaagagcgtcgaggctctttcgtcaccatatagcggttatccaaactcagagtctgaatccgcctggagagatctcctccgaggatttggtcttaaaatactacctcatgaaatggatcgcctcaatatgacatcattgaagctgaatgatgggtcaggctatgtcggctcccttggagtatatcatgagctccattgcattaaacgagttcgtcggatgctgtacaaagactattactacgcgaatatgacgactgatgaatggtatcgtaagatggaccatattggttctacttcgcagcacttttgcgttaactgggacagactagatgagtgggttcaatctcgtcgactggatctgtcagacgaagggttgctagttcccccttcgctgactatgacagcgttttga

SEQ ID NO: 38638 - protein, 163 aa, Muscodor strobelii
  misc_feature: SGI Peptide ID NO. 573429
  misc_feature (14)..(154): NCBI GI: 238501772 Blast Desc: conserved [Aspergillus flavus NRRL3357] gi|220692357|gb|EED48704.1| conserved [Aspergillus flavus NRRL3357]
  misc_feature (37)..(154): NCBI GI: 169769306 Blast Desc: [Aspergillus oryzae RIB40] gi|83766981|dbj|BAE57121.1| protein product [Aspergillus oryzae]
  misc_feature (35)..(153): NCBI GI: 67900556 Blast Desc: AN7265.2 [Aspergillus nidulans FGSC A4] gi|40741946|gb|EAA61136.1| AN7265.2 [Aspergillus nidulans FGSC A4] gi|259483389|tpe|CBF78739.1| TPA: conserved [Aspergillus FGSC
  misc_feature (19)..(156): NCBI GI: 156044674 Blast Desc: SS1G_10441 [Sclerotinia sclerotiorum 1980] gi|154694829|gb|EDN94567.1| SS1G_10441 [Sclerotinia sclerotiorum 1980]
  misc_feature (37)..(161): NCBI GI: 261204982 Blast Desc: conserved [Ajellomyces dermatitidis SLH14081] gi|239592287|gb|EEQ74868.1| conserved [Ajellomyces dermatitidis SLH14081] gi|239611559|gb|EEQ88546.1| conserved [Ajellomyces
  misc_feature (16)..(157): NCBI GI: 154279258 Blast Desc: [Ajellomyces capsulatus NAm1] gi|150412385|gb|EDN07772.1| [Ajellomyces capsulatus NAm1]
  misc_feature (2)..(157): NCBI GI: 225562435 Blast Desc: conserved [Ajellomyces capsulatus G186AR]
  misc_feature (16)..(156): NCBI GI: 225680940 Blast Desc: conserved [Paracoccidioides brasiliensis Pb03]
  misc_feature (35)..(156): NCBI GI: 212534486 Blast Desc: conserved [Penicillium marneffei ATCC 18224] gi|210069798|gb|EEA23888.1| conserved [Penicillium marneffei ATCC 18224]
  misc_feature (18)..(157): NCBI GI: 242817099 Blast Desc: conserved [Talaromyces stipitatus ATCC 10500] gi|218713349|gb|EED12773.1| conserved [Talaromyces stipitatus ATCC 10500]
  misc_feature: Useful for introducing or modulating the production of volatile compounds
MSSSSTRNYGGNFPKITPAEFALEWHAKSVEALSSPYSGYPNSESESAWRDLLRGFGLKILPHEMDRLNMTSLKLNDGSGYVGSLGVYHELHCIKRVRRMLYKDYYYANMTTDEWYRKMDHIGSTSQHFCVNWDRLDEWVQSRRLDLSDEGLLVPPSLTMTAF

SEQ ID NO: 38639 - DNA, 1322 bp, Muscodor strobelii
  misc_feature: SGI EST ID NO. CUFF.92957.0
  misc_feature: Variant of the nucleotide sequence at SEQ ID NO 38637
cttatgtcgagagccgataatcttcttagaaaattcggttgtcatgatttacaaactctgtgtttgatattatcgcagtgaaatggagcgcgactttgcagcaaacgaaagcgcgcctttcctgacccttgagaaggcccctgagtcacattcaccatgtcgtcatcctcgacaagaaattatggtgggaacttccctaagatcagtgttcacctgctcaaaaatcgcttgtcttacctatcttgtccttttaattctttatagcggagttctagtctccatttctgtaacatacaccgcacgctcttgcgggtgcatgtcccaaccatggtccccggcagaatttgcacttgaatggcatgcgaagagcgtcgaggctctttcgtcaccatatagcggttatccaaactcagagtctgaatccgcctggagagatctcctccgaggatttggtcttaaaatactacctcatgaaatggatcgcctcaatatgacatcattgaagctgaatgatgggtcaggctatgtcggctcccttggagtatatcatgagctccattgcattaaacgagttcgtcggatgctgtacaaagactattactacgcgaatatgacgactgatgaatggtatcgtaagatggaccatattgaacactgtctagaaagaattcggcattcagcaatgtgccgtagtgatgttagcgtcattccatttacatggctgaaggatgctgaacacgagactccggtgccgacaataggttctacttcgcagcacttttgcgttaactgggacagactagatgagtgggttcaatctcgtcgactggatctgtcagacgaagggttgctagttcccccttcgctgactatgacagcgttttgaactccaacaagtagttctatatgcattcataaacatagcacatgctccaaatacaaacgggtttcttgccaatcttgttttaaactatttctcatatagtctctaattgtaatttagatactattaactctcagatcttcaatcccatactgtatctagtcatttgtcttgtcatacggagttctcatgcttcgctatacccgcaacctagttcatgtttgatggtggttggatattggctctccaatgctctgcccaatccttgatgcgatcatagtcgcgacactttctgttagatccaaagcctgtgacacccccgagatctgcccgtatgggttccagattagtgtcagataagcacataagaacctgtcgaagataatctatgcagtggcgcacatgagcaggccgagcgtggtgactaggcttaataccg

SEQ ID NO: 38640 - DNA, 1269 bp, Muscodor strobelii
  misc_feature: SGI cDNA ID NO. 573430
  misc_feature: Elevated expression when VOC is produced
  misc_feature: Encodes the peptide sequence at SEQ ID NO 38641
atggccgttccgcacattgttcaactagctacgcgtattgcaaccaatacggccagagtcagcgactatcttgtggccaatgatttgccccaaccgtcttttgatattgatgctcctcttcatggcgctgtgccttccaatgctccagatatagtcgctttgagagactcaattattcaagacacggccgagttgcgtgacctcatgcttggtccacgagactatctcttccgcaatttcgttcataacacacttctacctccgcaagctactacccggttcagcctcgcccgaaaccttcctataggaggccaacaaacctttgcagagatggcctctaaggctggtcttcccgagacgagtgtcaagagactgatacgatatgccactacccagcgaatcttcgtggaggcacctcaaggtgttgtcgctcataacgctgtctctcggcttctcgctgaggataccggtatgcatgactttattgcaacttgtacagatgatttgtggcaagctgctgctcagacatgcaacgccatgatcaaatttcctggatcggaagaaccaaatgagactggcttcgcactagcgaacaatactgccctatccgttcacgagtttcttgcgaaccacccagaccgctcggtccgtttctccaacatgatgacaggctttactgccagtcaagcttttgatctgaagtttgtcagcgatttttatccttggtcgcaacatgcagcagcaacgatcgtcgatgtgggcggctcgcgaggtcacgtcagtgttcacctagcgcgcaagttccctgacttgaagttcgttgttcaggatcttgagcccgtcattaccgaagcccagaagcaactccccgtagatgtagccgaccgtgtttcgctgatgacgcatgatttcttcaaaccacaacccgtgagcgccgatatatactacttgcgatggatattccataattggtcagataaatattcgatccaaatattacggagcctgatcccggccatgaaacctggggcgaaagtcatcgtaaatgatgccatcctccccgagccaggtaaaatgtcgaggaaaatcgaacaaagcgttcgggcgttcgacctcgtcatgggtagtattcaaaatgctaaagagagagagtataatgattgggctgagctgtttcgtaaaacggatgagcgattcagaattgaggacgtaatgacaccctcaggctcccagctgtctttgatagttgtaacttgggatggtaattga

SEQ ID NO: 38641 - protein, 422 aa, Muscodor strobelii
  misc_feature: SGI Peptide ID NO. 573430
  misc_feature (137)..(393): Pfam Id: PF00891 Pfam Desc: O-methyltransferase
  misc_feature (249)..(393): Pfam Id: PF00891 Pfam Desc: O-methyltransferase
  misc_feature (4)..(421): NCBI GI: 116192635 Blast Desc: CHGG_06035 [Chaetomium globosum CBS 148.51] gi|88181948|gb|EAQ89416.1| CHGG_06035 [Chaetomium globosum CBS 148.51]
  misc_feature (1)..(419): NCBI GI: 212536596 Blast Desc: O-methyltransferase, [Penicillium marneffei ATCC 18224] gi|210070853|gb|EEA24943.1| O-methyltransferase, [Penicillium marneffei ATCC 18224]
  misc_feature (6)..(420): NCBI GI: 242800307 Blast Desc: O-methyltransferase, [Talaromyces stipitatus ATCC 10500] gi|218716905|gb|EED16326.1| O-methyltransferase, [Talaromyces stipitatus ATCC 10500]
  misc_feature (6)..(420): NCBI GI: 212534482 Blast Desc: O-methyltransferase, [Penicillium marneffei ATCC 18224] gi|210069796|gb|EEA23886.1| O-methyltransferase, [Penicillium marneffei ATCC 18224]
  misc_feature (2)..(420): NCBI GI: 116206014 Blast Desc: CHGG_02300 [Chaetomium globosum CBS 148.51] gi|88182897|gb|EAQ90365.1| CHGG_02300 [Chaetomium globosum CBS 148.51]
  misc_feature (1)..(421): NCBI GI: 154292573 Blast Desc: BC1G_14810 [Botryotinia fuckeliana B05.10] gi|150845891|gb|EDN21084.1| BC1G_14810 [Botryotinia fuckeliana B05.10]
  misc_feature (1)..(421): NCBI GI: 154317924 Blast Desc: BC1G_02945 [Botryotinia fuckeliana B05.10] gi|150843603|gb|EDN18796.1| BC1G_02945 [Botryotinia fuckeliana B05.10]
  misc_feature (6)..(421): NCBI GI: 171681439 Blast Desc: protein product [Podospora anserina] gi|170940678|emb|CAP65906.1| protein product [Podospora anserina]
  misc_feature (3)..(421): NCBI GI: 238841485 Blast Desc: sterigmatocystin 8-O-methyltransferase [Microsporum canis CBS 113480]
  misc_feature (6)..(420): NCBI GI: 169613869 Blast Desc: SNOG_10068 [Phaeosphaeria nodorum SN15] gi|111061283|gb|EAT82403.1| SNOG_10068 [Phaeosphaeria nodorum SN15]
  misc_feature (1)..(413): SWISSPROT Homolog: EC 2.1.1.110 Sterigmatocystin 8-O-methyltransferase
  misc_feature: Useful for introducing or modulating the production of volatile compounds
MAVPHIVQLATRIATNTARVSDYLVANDLPQPSFDIDAPLHGAVPSNAPDIVALRDSIIQDTAELRDLMLGPRDYLFRNFVHNTLLPPQATTRFSLARNLPIGGQQTFAEMASKAGLPETSVKRLIRYATTQRIFVEAPQGVVAHNAVSRLLAEDTGMHDFIATCTDDLWQAAAQTCNAMIKFPGSEEPNETGFALANNTALSVHEFLANHPDRSVRFSNMMTGFTASQAFDLKFVSDFYPWSQHAAATIVDVGGSRGHVSVHLARKFPDLKFVVQDLEPVITEAQKQLPVDVADRVSLMTHDFFKPQPVSADIYYLRWIFHNWSDKYSIQILRSLIPAMKPGAKVIVNDAILPEPGKMSRKIEQSVRAFDLVMGSIQNAKEREYNDWAELFRKTDERFRIEDVMTPSGSQLSLIVVTWDGN

SEQ ID NO: 38642 - DNA, 1590 bp, Muscodor strobelii
  misc_feature: SGI EST ID NO. CUFF.92948.0
  misc_feature: Variant of the nucleotide sequence at SEQ ID NO 38640
gatcaatcgttcacctcttgcgttgtctcgcgaccctatatgaaatttctagccctagcctctagcatactctcaaattcacttaaacatggccgttccgcacattgttcaactagctacgcgtattgcaaccaatacggccagagtcagcgactatcttgtggccaatgatttgccccaaccgtcttttgatattgatgctcctcttcatggcgctgtgccttccaatgctccagatatagtcgctttgagagactcaattattcaagacacggccgagttgcgtgacctcatgcttggtccacgagactatctcttccgcaatttcgttcataacacacttctacctccgcaagctactacccggttcagcctcgcccgaaaccttcctataggaggccaacaaacctttgcagagatggcctctaaggctggtcttcccgagacgagtgtcaagagactgatacgatatgccactacccagcgaatcttcgtggaggcacctcaaggtgttgtcgctcataacgctgtctctcggcttctcgctgaggataccggtatgcatgactttattgcaacttgtacagatgatttgtggcaagctgctgctcagacatgcaacgccatgatcaaatttcctggatcggaagaaccaaatgagactggcttcgcactagcgaacaatactgccctatccgttcacgagtttcttgcgaaccacccagaccgctcggtccgtttctccaacatgatgacaggctttactgccagtcaagcttttgatctgaagtttgtcagcgatttttatccttggtcgcaacatgcagcagcaacgatcgtcgatgtgggcggctcgcgaggtcacgtcagtgttcacctagcgcgcaagttccctgacttgaagttcgttgttcaggatcttgagcccgtcattaccgaagcccagaagcaactccccgtagatgtagccgaccgtgtttcgctgatgacgcatgatttcttcaaaccacaacccgtgagcgccgatatatactacttgcgatggatattccataattggtcagataaatattcgatccaaatattacggagcctgatcccggccatgaaacctggggcgaaagtcatcgtaaatgatgccatcctccccgagccaggtaaaatgtcgaggaaaatcgaacaaagcgttcgggcgttcgacctcgtcatgggtagtattcaaaatgctaaagagagagagtataatgattgggctgagctgtttcgtaaaacggatgagcgattcagaattgaggacgtaatgacaccctcaggctcccagctgtctttgatagttgtaacttgggatggtaattgaataaagctttagattatgatataatctggacgggcgacccgctatctgagggtaaaagtcagagtcgttgactatctcttctgctctcatctgctctcatctgtgattagaccacagtatttctggcgatagctgattggcaatctcagagagcattacgcgagatctattagcggagtaactatttaggtagtgtttaccaatttgtggacgggtctcttatagtagacagc

SEQ ID NO: 38643 - DNA, 1317 bp, Muscodor strobelii
  misc_feature: SGI cDNA ID NO. 573431
  misc_feature: Encodes the peptide sequence at SEQ ID NO 38644
atggccgttccgcacattgttcaactagctacgcgtattgcaaccaatacggccagagtcagcgactatcttgtggccaatgatttgccccaaccgtcttttgatattgatgctcctcttcatggcgctgtgccttccaatgctccagatatagtcgctttgagagactcaattattcaagacacggccgagttgcgtgacctcatgcttggtccacgagactatctcttccgcaatttcgttcatgtagagaagtgtttaccatcgaaacatgacactaacatgataaagcataacacacttctacctccgcaagctactacccggttcagcctcgcccgaaaccttcctataggaggccaacaaacctttgcagagatggcctctaaggctggtcttcccgagacgagtgtcaagagactgatacgatatgccactacccagcgaatcttcgtggaggcacctcaaggtgttgtcgctcataacgctgtctctcggcttctcgctgaggataccggtatgcatgactttattgcaacttgtacagatgatttgtggcaagctgctgctcagacatgcaacgccatgatcaaatttcctggatcggaagaaccaaatgagactggcttcgcactagcgaacaatactgccctatccgttcacgagtttcttgcgaaccacccagaccgctcggtccgtttctccaacatgatgacaggctttactgccagtcaagcttttgatctgaagtttgtcagcgatttttatccttggtcgcaacatgcagcagcaacgatcgtcgatgtgggcggctcgcgaggtcacgtcagtgttcacctagcgcgcaagttccctgacttgaagttcgttgttcaggatcttgagcccgtcattaccgaagcccagaagcaactccccgtagatgtagccgaccgtgtttcgctgatgacgcatgatttcttcaaaccacaacccgtgagcgccgatatatactacttgcgatggatattccataattggtcagataaatattcgatccaaatattacggagcctgatcccggccatgaaacctggggcgaaagtcatcgtaaatgatgccatcctccccgagccaggtaaaatgtcgaggaaaatcgaacaaagcgttcgggcgttcgacctcgtcatgggtagtattcaaaatgctaaagagagagagtataatgattgggctgagctgtttcgtaaaacggatgagcgattcagaattgaggacgtaatgacaccctcaggctcccagctgtctttgatagttgtaacttgggatggtaattga

SEQ ID NO: 38644 - protein, 438 aa, Muscodor strobelii
  misc_feature: SGI Peptide ID NO. 573431
  misc_feature (153)..(409): Pfam Id: PF00891 Pfam Desc: O-methyltransferase
  misc_feature (265)..(409): Pfam Id: PF00891 Pfam Desc: O-methyltransferase
  misc_feature (4)..(437): NCBI GI: 116192635 Blast Desc: CHGG_06035 [Chaetomium globosum CBS 148.51] gi|88181948|gb|EAQ89416.1| CHGG_06035 [Chaetomium globosum CBS 148.51]
  misc_feature (1)..(435): NCBI GI: 212536596 Blast Desc: O-methyltransferase, [Penicillium marneffei ATCC 18224] gi|210070853|gb|EEA24943.1| O-methyltransferase, [Penicillium marneffei ATCC 18224]
  misc_feature (2)..(436): NCBI GI: 242800307 Blast Desc: O-methyltransferase, [Talaromyces stipitatus ATCC 10500] gi|218716905|gb|EED16326.1| O-methyltransferase, [Talaromyces stipitatus ATCC 10500]
  misc_feature (6)..(436): NCBI GI: 212534482 Blast Desc: O-methyltransferase, [Penicillium marneffei ATCC 18224] gi|210069796|gb|EEA23886.1| O-methyltransferase, [Penicillium marneffei ATCC 18224]
  misc_feature (2)..(436): NCBI GI: 116206014 Blast Desc: CHGG_02300 [Chaetomium globosum CBS 148.51] gi|88182897|gb|EAQ90365.1| CHGG_02300 [Chaetomium globosum CBS 148.51]
  misc_feature (1)..(437): NCBI GI: 154292573 Blast Desc: BC1G_14810 [Botryotinia fuckeliana B05.10] gi|150845891|gb|EDN21084.1| BC1G_14810 [Botryotinia fuckeliana B05.10]
  misc_feature (1)..(437): NCBI GI: 154317924 Blast Desc: BC1G_02945 [Botryotinia fuckeliana B05.10] gi|150843603|gb|EDN18796.1| BC1G_02945 [Botryotinia fuckeliana B05.10]
  misc_feature (6)..(436): NCBI GI: 169613869 Blast Desc: SNOG_10068 [Phaeosphaeria nodorum SN15] gi|111061283|gb|EAT82403.1| SNOG_10068 [Phaeosphaeria nodorum SN15]
  misc_feature (3)..(437): NCBI GI: 238841485 Blast Desc: sterigmatocystin 8-O-methyltransferase [Microsporum canis CBS 113480]
  misc_feature (6)..(437): NCBI GI: 171681439 Blast Desc: protein product [Podospora anserina] gi|170940678|emb|CAP65906.1| protein product [Podospora anserina]
  misc_feature (1)..(429): SWISSPROT Homolog: EC 2.1.1.110 Sterigmatocystin 8-O-methyltransferase
MAVPHIVQLATRIATNTARVSDYLVANDLPQPSFDIDAPLHGAVPSNAPDIVALRDSIIQDTAELRDLMLGPRDYLFRNFVHVEKCLPSKHDTNMIKHNTLLPPQATTRFSLARNLPIGGQQTFAEMASKAGLPETSVKRLIRYATTQRIFVEAPQGVVAHNAVSRLLAEDTGMHDFIATCTDDLWQAAAQTCNAMIKFPGSEEPNETGFALANNTALSVHEFLANHPDRSVRFSNMMTGFTASQAFDLKFVSDFYPWSQHAAATIVDVGGSRGHVSVHLARKFPDLKFVVQDLEPVITEAQKQLPVDVADRVSLMTHDFFKPQPVSADIYYLRWIFHNWSDKYSIQILRSLIPAMKPGAKVIVNDAILPEPGKMSRKIEQSVRAFDLVMGSIQNAKEREYNDWAELFRKTDERFRIEDVMTPSGSQLSLIVVTWDGN

SEQ ID NO: 38645 - DNA, 1590 bp, Muscodor strobelii; identical to SEQ ID NO: 38642
  misc_feature: SGI EST ID NO. CUFF.92948.0
  misc_feature: Variant of the nucleotide sequence at SEQ ID NO 38643

SEQ ID NO: 38646 - DNA, 1527 bp, Muscodor strobelii
  misc_feature: SGI cDNA ID NO. 573432
  misc_feature: Elevated expression when VOC is produced
  misc_feature: Encodes the peptide sequence at SEQ ID NO 38647
atggtggtaatatcgctgccgtcgcttccagtgtatttggtcatcgtcttcgctgcatatcggctgtacacagcctataggctgcgacgcgcgacccaactgcatggatgccaagcggcaacctactacaagcacaaagaccctctcttcggtctggatatcttcctacgcacgggatctgcaattagcaaaaacgaatttctggttgaacaccagcgccgatatgatacctatggccatactttcgaagcgctgaacttgggcgcgcgtgtcatatactctattcatccagataacattcgagcagtcttttccaagaatgctgcagactggggcgttcaacctcttcgtctcagcaaaatgagcccattctgcggcgcggggtttctcacgactgacggctcgagctggaagatctcgcacgacctgctcaagcctagctttcataggtctaatatctctgatttcggcccccttgaagagcatctgcgcattctactagaacagatcccaaaagatggttccagatttgatctacagccatacatcttaaggctgtacctcgatatgaatacgctcttcctgttcggcgagcctattggcatgctttcaggcaccccgcaaccgcatgcggagggattcctcgatgcatttcaggcagggttcaatggctgcggactacgcatcgccttgggcccactaagcttcctcattccaaagggatcttggctcaaggcatgcgataaagtgcacaaatttgccgatgtatatgttgacagggctgtcgagtaccgcaaaaaggtaaacttggttgaacatagccaagccgacacagatcagcgtacgcttctgttcagcatggcacaaaagaccgatgataggaccattctgcggaaccaatctgtccaggctatgatggcggcaatggaaacaacagcatcttcgaccagccatgtcattagaaacttggccagcaacccagtaatgtatgcccatctgcgaacagaagtcttggctctgggtgacgcggcgctcgaattcgaccaattaccccgtattaagtctctgcaacatatcatattggaaacgcttcgcctatgccccgtgttcccacagaacaatcgcgttgcgttgaaagacacaattctgcctaccggaggaggcccagatggcaccgctccagtgttcgctccagctggcaccctattcgatacctccttctctacgcttcaccgccatccgaagatctggggcgccgacgctgatgagtttcgtccctcccgctgggaaaacgattacactcctcctccgttcacgtacatgccatttggagctgggcctcggcagtgcttggcacaacaaaaggctactatggagacctcatatatagtagcacgatttttgcaggagttcagtggaatcaagagcaaagacgagaaaccctatcaggcacaggtagcacttactgcaaagagcgctaacgggtgtctcgtatccctaaccccagcaagacaaattgtcaagtag

SEQ ID NO: 38647 - protein, 508 aa, Muscodor strobelii
  misc_feature: SGI Peptide ID NO. 573432
  misc_feature (48)..(497): Pfam Id: PF00067 Pfam Desc: Cytochrome P450
  misc_feature (305)..(472): Pfam Id: PF00067 Pfam Desc: Cytochrome P450
  misc_feature (31)..(503): NCBI GI: 156054506 Blast Desc: SS1G_06101 [Sclerotinia sclerotiorum 1980] gi|154703881|gb|EDO03620.1| SS1G_06101 [Sclerotinia sclerotiorum 1980]
  misc_feature (11)..(507): NCBI GI: 212536398 Blast Desc: cytochrome P450 alkane hydroxylase, [Penicillium marneffei ATCC 18224] gi|210070754|gb|EEA24844.1| cytochrome P450 alkane hydroxylase, [Penicillium marneffei ATCC 18224]
  misc_feature (8)..(502): NCBI GI: 225556140 Blast Desc: N-alkane-inducible cytochrome P450 [Ajellomyces capsulatus G186AR]
  misc_feature (10)..(502): NCBI GI: 240111506 Blast Desc: Cytochrome P450 family protein [Coccidioides posadasii C735 delta SOWgp]
  misc_feature (16)..(502): NCBI GI: 119188703 Blast Desc: CIMG_04399 [Coccidioides immitis RS]
  misc_feature (8)..(500): NCBI GI: 70990140 Blast Desc: cytochrome P450 alkane hydroxylase [Aspergillus fumigatus Af293] gi|66847551|gb|EAL87881.1| cytochrome P450 alkane hydroxylase, [Aspergillus fumigatus Af293]
  misc_feature (2)..(503): NCBI GI: 169626152 Blast Desc: SNOG_16355 [Phaeosphaeria nodorum SN15] gi|111055221|gb|EAT76341.1| SNOG_16355 [Phaeosphaeria nodorum SN15]
  misc_feature (8)..(500): NCBI GI: 159130401 Blast Desc: cytochrome P450 alkane hydroxylase, [Aspergillus fumigatus A1163]
  misc_feature (14)..(500): NCBI GI: 119497443 Blast Desc: cytochrome P450 alkane hydroxylase, [Neosartorya fischeri NRRL 181] gi|119413642|gb|EAW23583.1| cytochrome P450 alkane hydroxylase, [Neosartorya fischeri NRRL 181]
  misc_feature (6)..(504): NCBI GI: 156039263 Blast Desc: SS1G_11768 [Sclerotinia sclerotiorum 1980] gi|154697505|gb|EDN97243.1| SS1G_11768 [Sclerotinia sclerotiorum 1980]
  misc_feature (58)..(472): SWISSPROT Homolog: EC 1.14.14.1 Unspecific monooxygenase
  misc_feature: Useful for introducing or modulating the production of volatile compounds
MVVISLPSLPVYLVIVFAAYRLYTAYRLRRATQLHGCQAATYYKHKDPLFGLDIFLRTGSAISKNEFLVEHQRRYDTYGHTFEALNLGARVIYSIHPDNIRAVFSKNAADWGVQPLRLSKMSPFCGAGFLTTDGSSWKISHDLLKPSFHRSNISDFGPLEEHLRILLEQIPKDGSRFDLQPYILRLYLDMNTLFLFGEPIGMLSGTPQPHAEGFLDAFQAGFNGCGLRIALGPLSFLIPKGSWLKACDKVHKFADVYVDRAVEYRKKVNLVEHSQADTDQRTLLFSMAQKTDDRTILRNQSVQAMMAAMETTASSTSHVIRNLASNPVMYAHLRTEVLALGDAALEFDQLPRIKSLQHIILETLRLCPVFPQNNRVALKDTILPTGGGPDGTAPVFAPAGTLFDTSFSTLHRHPKIWGADADEFRPSRWENDYTPPPFTYMPFGAGPRQCLAQQKATMETSYIVARFLQEFSGIKSKDEKPYQAQVALTAKSANGCLVSLTPARQIVK

SEQ ID NO: 38648 - DNA, 1975 bp, Muscodor strobelii
  misc_feature: SGI EST ID NO. CUFF.92961.1
  misc_feature: Variant of the nucleotide sequence at SEQ ID NO 38646
tccggctgcaatccatcaccgccacgctaaatgctgtcatggtggtaatatcgctgccgtcgcttccagtgtatttggtcatcgtcttcgctgcatatcggctgtacacagcctataggctgcgacgcgcgacccaactgcatggatgccaagcggcaacctactacaagcacaaagaccctctcttcggtctggatatcttcctacgcacgggatctgcaattagcaaaaacgaatttctggttgaacaccagcgccgatatgatacctatggccatactttcgaagcgctgaacttgggcgcgcgtgtcatatactctattcatccagataacattcgagcagtcttttccaagaatgctgcagactggggcgttcaacctcttcgtctcagcaaaatgagcccattctgcggcgcggggtttctcacgactgacggctcgagctggaagatctcgcacgacctgctcaagcctagctttcataggtctaatatctctgatttcggcccccttgaagagcatctgcgcattctactagaacagatcccaaaagatggttccagatttgatctacagccatacatcttaaggctggcatttcttcctcgttcccacctaggcttcatgcgcactaacatatgtggtccagtacctcgatatgaatacgctcttcctgttcggcgagcctattggcatgctttcaggcaccccgcaaccgcatgcggagggattcctcgatgcatttcaggcagggttcaatggctgcggactacgcatcgccttgggcccactaagcttcctcattccaaagggatcttggctcaaggcatgcgataaagtgcacaaatttgccgatgtatatgttgacagggctgtcgagtaccgcaaaaaggtaaacttggttgaacatagccaagccgacacagatcagcgtacgcttctgttcagcatggcacaaaagaccgatgataggaccattctgcggaaccaatctgtccaggctatgatggcggcaatggaaacaacagcatcttcgaccagccatgtcattagaaacttggccagcaacccagtaatgtatgcccatctgcgaacagaagtcttggctctgggtgacgcggcgctcgaattcgaccaattaccccgtattaagtctctgcaacatatcatattggaaacgcttcgcctatgccccgtgttcccacagaacaatcgcgttgcgttgaaagacacaattctgcctaccggaggaggcccagatggcaccgctccagtgttcgctccagctggcaccctattcgatacctccttctctacgcttcaccgccatccgaagatctggggcgccgacgctgatgagtttcgtccctcccgctgggaaaacgattacactcctcctccgttcacgtacatgccatttggagctgggcctcggcagtgcttggcacaacaaaaggctactatggagacctcatatatagtagcacgatttttgcaggagttcagtggaatcaagagcaaagacgagaaaccctatcaggcacaggtagcacttactgcaaagagcgctaacgggtgtctcgtatccctaaccccagcaagacaaattgtcaagtagggaaccaggccaaacccagtcatgctcgtggcaattacactattttctgcgacatgatatcaagctcgggatatcattgcacccgatagctccaatagaaatatggtactctcaagtcgcgtctcatgcttcctaattaggtccttcttcaaagccagctctatcgtcgcaacatgtcttcgaccttttcgagaagcgctaatggtattagaactcagcttagccgcaaggtcacccaacatttacgaagccttatcgtaatgccctgcgatcgatgcttcccatagtattgaatctcgatactgtgtctgttctatgaaaagattcatcctctctgatacgtccatcacctccc

SEQ ID NO: 38649 - DNA, 252 bp, Muscodor strobelii
  misc_feature: SGI cDNA ID NO. 573433
  misc_feature: Encodes the peptide sequence at SEQ ID NO 38650
atggtgggcgccaaggcggacgatacctcgacggggggtgcaaggccaagtttggcgaccagtgtgcggctcaagaagcagctggcggacctcgaggccaagatggataaggccgagacggaggcgaaccagagggccggcaggaggcacgagagcaaccccgcgctggtcaagctggagctggagcggctactggactacaagagcaaggaacaactccacgccgcaggagcattgggtaacaagggatag

SEQ ID NO: 38650 - protein, 83 aa, Muscodor strobelii
  misc_feature: SGI Peptide ID NO. 573433
  misc_feature (22)..(71): NCBI GI: 154296979 Blast Desc: endocytosis and cytoskeletal organization protein [Botryotinia fuckeliana B05.10] gi|205716451|sp|A6SIJ6.1|END3_BOTFB RecName: Full=Actin complex 3
  misc_feature (22)..(71): NCBI GI: 156062398 Blast Desc: SS1G_01315 [Sclerotinia sclerotiorum 1980] gi|205716456|sp|A7E7N7.1|END3_SCLS1 RecName: Full=Actin cytoskeleton-regulatory complex protein end3; AltName: protein 3
  misc_feature (22)..(71): NCBI GI: 164425144 Blast Desc: Eps15-like protein pan1p [Neurospora crassa OR74A] gi|205716836|sp|Q7S9V9.2|END3_NEUCR RecName: Full=Actin cytoskeleton-regulatory complex protein end-3; AltName: protein 3
  misc_feature (3)..(68): NCBI GI: 169605801 Blast Desc: SNOG_05930 [Phaeosphaeria nodorum SN15] gi|160706845|gb|EAT86994.2| SNOG_05930 [Phaeosphaeria nodorum SN15]
  misc_feature (22)..(71): NCBI GI: 39975787 Blast Desc: conserved [Magnaporthe grisea 70-15] gi|74681601|sp|Q5EN00.1|END3_MAGGR RecName: Full=Actin cytoskeleton-regulatory complex protein END3; AltName: protein 3
  misc_feature (8)..(71): NCBI GI: 116194580 Blast Desc: conserved [Chaetomium globosum CBS 148.51] gi|121927659|sp|Q2H2V8.1|END3_CHAGB RecName: Full=Actin cytoskeleton-regulatory complex protein END3; AltName: protein 3
  misc_feature (9)..(68): NCBI GI: 189198003 Blast Desc: cytoskeletal adaptor protein SagA [Pyrenophora tritici-repentis Pt-1C-BFP] gi|187981287|gb|EDU47913.1| cytoskeletal adaptor protein SagA [Pyrenophora tritici-repentis
  misc_feature (22)..(71): NCBI GI: 256727501 Blast Desc: [Nectria haematococca mpVI 77-13-4]
  misc_feature (4)..(71): NCBI GI: 171683311 Blast Desc: protein product [Podospora anserina] gi|205716455|sp|B2AS96.1|END3_PODAN RecName: Full=Actin cytoskeleton-regulatory complex protein END3; AltName: protein 3
  misc_feature (22)..(71): NCBI GI: 46136411 Blast Desc: FG09721.1 [Gibberella zeae PH-1]
MVGAKADDTSTGGARPSLATSVRLKKQLADLEAKMDKAETEANQRAGRRHESNPALVKLELERLLDYKSKEQLHAAGALGNKG

SEQ ID NO: 38651 - DNA, 900 bp, Muscodor strobelii
  misc_feature: SGI cDNA ID NO. 573434
  misc_feature: Encodes the peptide sequence at SEQ ID NO 38652
atggcggaaaagcaactcgacatcgaagatacggttcgcacaacacgatccaacctgaagtatctattagatggacccaaaatcaatcgtcgcttcgtctcggccggtgtcgaggtgaacaccggtcgctacgggccctacgagaccacgatccgcgacggccgggacatcaagtcccatttctcattcgatagacacggcttcagcctcctcgacgcgccgacgaccgttattgactttcatgacaaggatgaggtcgagactaaatatcaggacgaagtgcgcaatcatgtccagcgcgctttcggcgctgacatagtcgtgccgatgggctggatgatccgcacttcgggcagcattcctaaaccgaaggagacgaacggcccgtacaggcattacggtggacttcagcctcccgcaggcgaagttcacgtcgacacggagccgagccgccagctcgcggccgcccagcgcgcctatgagagcgcacggcccgacgggcctggtttcaagcgattcatcatttcaagcttctggcgcactttcacagcgcctccgcaaaactgcccactagccgtgtgcgatgcgcaaagcgtccgggacgacgagggaacacccaatgtgctctggatcgttgacaaaatccccgagggtgacgacatgttcgccgatatggacgacgataagcagctggcggcagccatcttccgccatagccctgatcatcgatggtggtacttttcgggaatgacgcgcgacgaggcgttgctgctcaagtttcatgatagcgatcgctctgtcggctggcgcacgccgcacacggctttttgggatgacagcttcaagggtgccaatgtgcgcgagagcatcgagtgtagaagcattgctttctttgagtga

SEQ ID NO: 38652 - protein, 299 aa, Muscodor strobelii
  misc_feature: SGI Peptide ID NO. 573434
  misc_feature (7)..(299): NCBI GI: 87200596 Blast Desc: Saro_2583 [Novosphingobium aromaticivorans DSM 12444] gi|87136277|gb|ABD27019.1| conserved [Novosphingobium aromaticivorans DSM 12444]
  misc_feature (36)..(299): NCBI GI: 229589701 Blast Desc: PFLU2207 [Pseudomonas fluorescens SBW25] gi|229361567|emb|CAY48444.1| conserved [Pseudomonas fluorescens SBW25]
  misc_feature (36)..(298): NCBI GI: 186685770 Blast Desc: Npun_F5723 [Nostoc punctiforme PCC 73102] gi|186468222|gb|ACC84023.1| conserved [Nostoc punctiforme PCC 73102]
  misc_feature (46)..(297): NCBI GI: 148254706 Blast Desc: BBta_3280 [Bradyrhizobium sp. BTAi1] gi|146406879|gb|ABQ35385.1| BBta_3280 [Bradyrhizobium sp. BTAi1]
  misc_feature (36)..(298): NCBI GI: 196256911 Blast Desc: conserved [Cyanothece sp. PCC 7822] gi|196202306|gb|EDX97124.1| conserved [Cyanothece sp. PCC 7822]
  misc_feature (46)..(297): NCBI GI: 146341215 Blast Desc: BRADO4289 [Bradyrhizobium sp. ORS278] gi|146194021|emb|CAL78038.1| conserved [Bradyrhizobium sp. ORS278]
  misc_feature (12)..(299): NCBI GI: 169856373 Blast Desc: CC1G_08491 [Coprinopsis cinerea okayama7#130] gi|116504125|gb|EAU87020.1| CC1G_08491 [Coprinopsis cinerea okayama7#130]
  misc_feature (14)..(298): NCBI GI: 75906327 Blast Desc: Ava_0102 [Anabaena variabilis ATCC 29413] gi|75700052|gb|ABA19728.1| conserved [Anabaena variabilis ATCC 29413]
  misc_feature (46)..(297): NCBI GI: 27381560 Blast Desc: bll6449 [Bradyrhizobium japonicum USDA 110] gi|27354728|dbj|BAC51714.1| bll6449 [Bradyrhizobium japonicum USDA 110]
  misc_feature (28)..(299): NCBI GI: 115399682 Blast Desc: [Aspergillus terreus NIH2624] gi|114192286|gb|EAU33986.1| [Aspergillus terreus NIH2624]
MAEKQLDIEDTVRTTRSNLKYLLDGPKINRRFVSAGVEVNTGRYGPYETTIRDGRDIKSHFSFDRHGFSLLDAPTTVIDFHDKDEVETKYQDEVRNHVQRAFGADIVVPMGWMIRTSGSIPKPKETNGPYRHYGGLQPPAGEVHVDTEPSRQLAAAQRAYESARPDGPGFKRFIISSFWRTFTAPPQNCPLAVCDAQSVRDDEGTPNVLWIVDKIPEGDDMFADMDDDKQLAAAIFRHSPDHRWWYFSGMTRDEALLLKFHDSDRSVGWRTPHTAFWDDSFKGANVRESIECRSIAFFE

SEQ ID NO: 38653 - DNA, 1569 bp, Muscodor strobelii
  misc_feature: SGI EST ID NO. CUFF.92939.0
  misc_feature: Variant of the nucleotide sequence at SEQ ID NO 38651
caaagctcagaccttgagagttgttgtctgccctctatggatcccagcgcccctacttcactacttcctcgttcgatctacaagggtcaaggaaataatattttcgctaaattgttggcgggcggactcgcaaaggagacgggctaccgtacagctccgtttgcgaagaacaataaaggcagggctcgttttgaaaagattatattgttacgaccttgagtatacccatgatacaccctcaaaatcgagagctaagagaacggaggcacgtgtggtgctctagccgcaccaaggctatctcgaatgtgcccctgcgctgtcaagcagccagggtcgcgtctaagatcaggtgactagactaggcgcaacgcttcaatagaatgataaccaatgggggtaaatataatgtgacagctttttcctcgttagaaagtcggtaaaaagaacctcgaacaccctgaattcgaatgctcttgctagggttacgcggctaaatgggaagaggggtaaaagccgtggtagggactgaaggacacaagccaagttattgcgaaacacagactgggacagagttaacatcttgaagtgatggcggaaaagcaactcgacatcgaagatacggttcgcacaacacgatccaacctgaagtatctattagatggacccaaaatcaatcgtcgcttcgtctcggccggtgtcgaggtgaacaccggtcgctacgggccctacgagaccacgatccgcgacggccgggacatcaagtcccatttctcattcgatagacacggcttcagcctcctcgacgcgccgacgaccgttattgactttcatgacaaggatgaggtcgagactaaatatcaggacgaagtgcgcaatcatgtccagcgcgctttcggcgctgacatagtcgtgccgatgggctggatgatccgcacttcgggcagcattcctaaaccgaaggagacgaacggcccgtacaggcattacggtggacttcagcctcccgcaggcgaagttcacgtcgacacggagccgagccgccagctcgcggccgcccagcgcgcctatgagagcgcacggcccgacgggcctggtttcaagcgattcatcatttcaagcttctggcgcactttcacagcgcctccgcaaaactgcccactagccgtgtgcgatgcgcaaagcgtccgggacgacgagggaacacccaatgtgctctggatcgttgacaaaatccccgagggtgacgacatgttcgccgatatggacgacgataagcagctggcggcagccatcttccgccatagccctgatcatcgatggtggtacttttcgggaatgacgcgcgacgaggcgttgctgctcaagtttcatgatagcgatcgctctgtcggctggcgcacgccgcacacggctttttgggatgacagcttcaagggtgccaatgtgcgcgagagcatcgagtgtagaagcattgctttctttgagtgagtcgcgcatttaagcaatcactattacatctatagttccgttgcacaagagtgttgtgagtaccttaagtaaagtgcgtcg

SEQ ID NO: 38654 - DNA, 549 bp, Muscodor strobelii
  misc_feature: SGI cDNA ID NO. 573435
  misc_feature: Encodes the peptide sequence at SEQ ID NO 38655
atgcatttcccaatcattgctgctgggctcctctcgtcggtgactctcgtcaacgctctgcctcaggacggcctccttaatcgaccggacggtgtgtataaggtccaattcaaagatgacgggacgagcactgtccttcatttcatcgaatcagcaagcttgagtgtaaacgagacccttctcgagcgcactgttgtcgatccgagaggcgcctccgccacttgcgagaacgaggttcttgacagaacaaacctcatccaggcctggcaagctgagatgaactacttcggaggcggtcagagccttggcccaaaccaagtcctatacaataaaatcggatccgtggtggtttatgcttgtagctactctggttctaacactttcactgcttctgctattcaaaacgccttgactgctgtcagttcgacatgcggcgatctcacggctggctacgagcgatgcaaaggtgcctgtggcacttcggacagtaccattggcagaaagcgaaacggtgatgacttttgctggaaggggttcaagggacaatga

SEQ ID NO: 38655 - protein, 182 aa, Muscodor strobelii
  misc_feature: SGI Peptide ID NO. 573435
MHFPIIAAGLLSSVTLVNALPQDGLLNRPDGVYKVQFKDDGTSTVLHFIESASLSVNETLLERTVVDPRGASATCENEVLDRTNLIQAWQAEMNYFGGGQSLGPNQVLYNKIGSVVVYACSYSGSNTFTASAIQNALTAVSSTCGDLTAGYERCKGACGTSDSTIGRKRNGDDFCWKGFKGQ

SEQ ID NO: 38656 - DNA, 1647 bp, Muscodor strobelii
  misc_feature: SGI cDNA ID NO. 573436
  misc_feature: Encodes the peptide sequence at SEQ ID NO 38657
atgatcgatccctcatgcgacgcatcagctgctagcgctccatcttctaggaggaactctgtcacgagctccttatccgagatcgccatgagcatgaatgacgagaccacagacgattcggccaccaatatgctggatagtggtagtgctccacagctcataatgcccagcattaacatgcctagcaggcggccattcacggagacgggaaagagtctcggccgcctgaagatcttggtcgccggttcggctggtgttggcaagactgcactgctcaaggccatcgtccaggcttgccaccacattgtacatgtcgatcctctttcgggaggctcaagtaggaggaattccctgtccgacaccatgacctctctatccagacagaccatcacacctactacaaatattgccgagatacatgccagcacgaaaccctacccagagtggtggtccgagctggacacgtctcgtgcccctcacagacgaaagagtcttggcgatagtgttttggagcgaaatatctgctttgttgacacaccgggttacggcatggatacttctgtaatggaaacagtcattccttgcgtcgattatgttgagtcatatttgaataaagtgtcaacagatgacttggacgattcagatgtcatgaatatgctgggtggcggtggtggatcacaaatcgacgttgtcctctacctcatatcgcgcagcgtgaaaccagcagatctggagtacatgcgccggctttccccgttaacaaatattatccccatactagctcaagcagatttgctttcggcggaccaaattatagcattaaaacgagaaatcgcaatgcaacttcaaaacgccagcatatcacctttttcgttcacaacaggcagccatgacgaaaaggtgcatattatccctagcgttccatatacagcatcgagcgtatccatagcagaccacgacgaaatggatgctagtctcctcatgagctcggagtatctgcagccgttagtacgaacagaccttggcttcctagtcgagaagatattcagcgtcgacggcgcatcttggcttcggcattcagcggcaaggaagtatctgcaatggcgggaggccaccccgtcgaggccgagacatttgtatagacctcttataccgcccaggcaaaccgctttactacctgttagcccatcatcactggccttagctagggtccagagaccaacgcctgaaaccaaagaaactagacttcacctcgccgactgggcggctgatctacagcgcagtgtaatgggcgagagagcttggtacgagaccctgtctcgtggtgagcaggctgtttggctcacggagaaggtggccgagtgtgtgcaagatgggacgcttgtagcccgaaggccgcgacaagagcggcagtcaagaacagcgacgaggagagccagtggaagagaggggcccaggacgcagcggacacagcaacaccaggaccctctgggactattacaagtcgctgccgatatcaaggcctcgggttgggtggctttggagatggttggtgggctgggattaattggcaccgccgtctatatcatgggacggaactggcaggacattgaggtctacgatagagtttgggatctggtgttttga

SEQ ID NO: 38657 - protein, 548 aa, Muscodor strobelii
  misc_feature: SGI Peptide ID NO. 573436
  misc_feature (31)..(535): NCBI GI: 156051636 Blast Desc: SS1G_07225 [Sclerotinia sclerotiorum 1980] gi|154705003|gb|EDO04742.1| SS1G_07225 [Sclerotinia sclerotiorum 1980]
  misc_feature (8)..(535): NCBI GI: 154312794 Blast Desc: BC1G_05098 [Botryotinia fuckeliana B05.10] gi|150849800|gb|EDN24993.1| BC1G_05098 [Botryotinia fuckeliana B05.10]
  misc_feature (8)..(542): NCBI GI: 39976877 Blast Desc: MGG_06341 [Magnaporthe grisea 70-15] gi|145016259|gb|EDK00749.1| MGG_06341 [Magnaporthe grisea 70-15]
  misc_feature (44)..(520): NCBI GI: 171686924 Blast Desc: protein product [Podospora anserina] gi|170943423|emb|CAP69076.1| protein product [Podospora anserina]
  misc_feature (8)..(462): NCBI GI: 85076626 Blast Desc: NCU06414 [Neurospora crassa OR74A] gi|28916991|gb|EAA26720.1| [Neurospora crassa OR74A]
  misc_feature (20)..(534): NCBI GI: 119498715 Blast Desc: NFIA_037920 [Neosartorya fischeri NRRL 181] gi|119414279|gb|EAW24218.1| conserved [Neosartorya fischeri NRRL 181]
  misc_feature (20)..(534): NCBI GI: 159126150 Blast Desc: conserved [Aspergillus fumigatus A1163]
  misc_feature (20)..(534): NCBI GI: 70984838 Blast Desc: conserved [Aspergillus fumigatus Af293] gi|66845553|gb|EAL85887.1| conserved [Aspergillus fumigatus Af293]
  misc_feature (20)..(534): NCBI GI: 115432958 Blast Desc: conserved [Aspergillus terreus NIH2624] gi|114189468|gb|EAU31168.1| conserved [Aspergillus terreus NIH2624]
  misc_feature (12)..(534): NCBI GI: 225562870 Blast Desc: heat shock protein [Ajellomyces capsulatus G186AR]
MIDPSCDASAASAPSSRRNSVTSSLSEIAMSMNDETTDDSATNMLDSGSAPQLIMPSINMPSRRPFTETGKSLGRLKILVAGSAGVGKTALLKAIVQACHHIVHVDPLSGGSSRRNSLSDTMTSLSRQTITPTTNIAEIHASTKPYPEWWSELDTSRAPHRRKSLGDSVLERNICFVDTPGYGMDTSVMETVIPCVDYVESYLNKVSTDDLDDSDVMNMLGGGGGSQIDVVLYLISRSVKPADLEYMRRLSPLTNIIPILAQADLLSADQIIALKREIAMQLQNASISPFSFTTGSHDEKVHIIPSVPYTASSVSIADHDEMDASLLMSSEYLQPLVRTDLGFLVEKIFSVDGASWLRHSAARKYLQWREATPSRPRHLYRPLIPPRQTALLPVSPSSLALARVQRPTPETKETRLHLADWAADLQRSVMGERAWYETLSRGEQAVWLTEKVAECVQDGTLVARRPRQERQSRTATRRASGREGPRTQRTQQHQDPLGLLQVAADIKASGWVALEMVGGLGLIGTAVYIMGRNWQDIEVYDRVWDLVF

SEQ ID NO: 38658 - DNA, 2652 bp, Muscodor strobelii
  misc_feature: SGI EST ID NO. CUFF.92964.0
  misc_feature: Variant of the nucleotide sequence at SEQ ID NO 38656
gcaggtttctggaagagttgttcgctctcggctgggctgtttggatagtgaggcattgtggggcgcgagtatggcactatgacagcgcgacggagcttatctgttcacttgatgcggggtgagatcacgctggtgacctgatcgccatgtctctgctcaattccgacctcccctcaacaatgcggtcccctatcaccggacgaataccgggcactagatgaatgacatccactttctctagtagatccatcatgtcagaggaatcattagagtattactacgctgattgtcggtgagctgtgttgattcacatactttggtcatctcatatccaagcatgtctcgatgagtgtcttgaggagtctatttgctcagtacgcctcatatacccgaagctcaactcaagagataggtctccgccgttaactccattgcttccgaggcagagtgcttcacaaaagtagtcaacttgaacattgttatatatcttttactcccttgtgctctactgttgctccgtactctacatagagacaaaaccgtaccccagacacaatgcgtccacttcccggtgacgacacatcttggtctggccgtccacgccaacgtccgaacccccaaatgtccttctttcttgccgacgaagcttctctagattctcatctagatcagcgcccgatccaccctccaacgcgatccagagatcaccggaagagagcttctacccgagaactctcccctcattcaccgctatcgagagcttccgcatactcccacagcctggcgtctctgccttcgcagtcatcccatttccagccatccatatcatcccgacctgtcacacccatcatgatcgatccctcatgcgacgcatcagctgctagcgctccatcttctaggaggaactctgtcacgagctccttatccgagatcgccatgagcatgaatgacgagaccacagacgattcggccaccaatatgctggatagtggtagtgctccacagctcataatgcccagcattaacatgcctagcaggcggccattcacggagacgggaaagagtctcggccgcctgaagatcttggtcgccggttcggctggtgttggcaagactgcactgctcaaggccatcgtccaggcttgccaccacattgtacatgtcgatcctctttcgggaggctcaagtaggaggaattccctgtccgacaccatgacctctctatccagacagaccatcacacctactacaaatattgccgagatacatgccagcacgaaaccctacccagagtggtggtccgagctggacacgtctcgtgcccctcacagacgaaagagtcttggcgatagtgttttggagcgaaatatctgctttgttgacacaccgggttacggcatggatacttctgtaagcttataacccgacggtctgcgtttacgacacttgttaataatttttctaggtaatggaaacagtcattccttgcgtcgattatgttgagtcatatttgaataaagtgtcaacagatgacttggacgattcagatgtcatgaatatgctgggtggcggtggtggatcacaaatcgacgttgtcctctacctcatatcgcgcagcgtgaaaccagcagatctggagtacatgcgccggctttccccgttaacaaatattatccccatactagctcaagcagatttgctttcggcggaccaaattatagcattaaaacgagaaatcgcaatgcaacttcaaaacgccagcatatcacctttttcgttcacaacaggcagccatgacgaaaaggtgcatattatccctagcgttccatatacagcatcgagcgtatccatagcagaccacgacgaaatggatgctagtctcctcatgagctcggagtatctgcagccgttagtacgaacagaccttggcttcctagtcgagaagatattcagcgtcgacggcgcatcttggcttcggcattcagcggcaaggaagtatctgcaatggcgggaggccaccccgtcgaggccgagacatttgtatagacctcttataccgcccaggcaaaccgctttactacctgttagcccatcatcactggccttagctagggtccagagaccaacgcctgaaaccaaagaaactagacttcacctcgccgactgggcggctgatctacagcgcagtgtaatgggcgagagagcttggtacgagaccctgtctcgtggtgagcaggctgtttggctcacggagaaggtggccgagtgtgtgcaagatgggacgcttgtagcccgaaggccgcgacaagagcggcagtcaagaacagcgacgaggagagccagtggaagagaggggcccaggacgcagcggacacagcaacaccaggaccctctgggactattacaagtcgctgccgatatcaaggcctcgggttgggtggctttggagatggttggtgggctgggattaattggcaccgccgtctatatcatgggacggaactggcaggacattgaggtctacgatagagtttgggatctggtgttttgatcaatgagatataggagggacatgaaggatatgaaagatatgaagcatagttgatcagtatataattagcaaaacatggcccatctcacagcaagttcgtg

SEQ ID NO: 38659 - DNA, 786 bp, Muscodor strobelii
  misc_feature: SGI cDNA ID NO. 573437
  misc_feature: Encodes the peptide sequence at SEQ ID NO 38660
atgctggtcttcgagtacatggacggtgatctcaaaaagtacatggacacccatggcgaccgtggcgctctcgaccccaagaccatcaacagattcatgtaccagctgctcaagggcatcgagtactgccacgacagccgcgtcctccaccgcgacctcaagccccagaatctcctcattagcagccagaacgacaccctcaaactcggcgactttggcctggcccgtgccttcggcatccccgtcaacaccttctccaatgaggtcgtaactctctggtaccgcgccccggacgtcctgcttggcagccgcacctacagcacaagcattgacatctggtcggccggctgcatcatggccgagatgtacacgggccgtcccttgttccccggcaccaccaacgaggatcagatcatccgcatcttccgcatcatgggcacccccaccgagcgcacctggcccaacatcagccagctccccgagtacaagcctagcatgcagcactacgccacccaggatctacgcgtcattctacctcagatcgaccccgtgggcatcgaccttctgagccgcatgctcgtcctccgccccgagcaccgcatcacagccaaggacgccatcaatcacccctggtttgagggactcagggaagaggaccgccgaaaggcaaagcaacagtttgacatggcccagggacagcgccaacaaccgcacatgcacccccaggctgctttcgcgcctcatgcagtgccgtcacagggcaactatgaccaccggacttactag

SEQ ID NO: 38660 - protein, 261 aa, Muscodor strobelii
  misc_feature: SGI Peptide ID NO. 573437
  misc_feature (2)..(212): Pfam Id: PF00069 Pfam Desc: Protein kinase domain
  misc_feature (1)..(77): Pfam Id: PF07714 Pfam Desc: Protein tyrosine kinase
  misc_feature (1)..(254): NCBI GI: 46122031 Blast Desc: FG05393.1 [Gibberella zeae PH-1]
  misc_feature (1)..(215): NCBI GI: 256729954 Blast Desc: [Nectria haematococca mpVI 77-13-4]
  misc_feature (1)..(256): NCBI GI: 156051638 Blast Desc: negative regulator of the PHO system [Sclerotinia sclerotiorum 1980] gi|154705004|gb|EDO04743.1| negative regulator of the PHO system [Sclerotinia sclerotiorum 1980]
  misc_feature (1)..(256): NCBI GI: 154312796 Blast Desc: BC1G_05099 [Botryotinia fuckeliana B05.10] gi|150849801|gb|EDN24994.1| BC1G_05099 [Botryotinia fuckeliana B05.10]
  misc_feature (1)..(212): NCBI GI: 261358440 Blast Desc: Protein tyrosine kinase [Verticillium albo-atrum VaMs.102]
  misc_feature (1)..(212): NCBI GI: 145614510 Blast Desc: MGG_04660 [Magnaporthe grisea 70-15] gi|145021420|gb|EDK05549.1| MGG_04660 [Magnaporthe grisea 70-15]
  misc_feature (1)..(215): NCBI GI: 145242790 Blast Desc: An09g06530 [Aspergillus niger] gi|134078525|emb|CAK40446.1| protein product [Aspergillus niger]
  misc_feature (1)..(215): NCBI GI: 70984850 Blast Desc: cyclin-dependent protein kinase PhoA [Aspergillus fumigatus Af293] gi|66845559|gb|EAL85893.1| cyclin-dependent protein kinase PhoA [Aspergillus fumigatus Af293] protein kinase
  misc_feature (1)..(215): NCBI GI: 255931719 Blast Desc: Pc12g05720 [Penicillium chrysogenum Wisconsin 54-1255] gi|211582035|emb|CAP80199.1| Pc12g05720 [Penicillium chrysogenum Wisconsin 54-1255]
  misc_feature (1)..(215): NCBI GI: 238503309 Blast Desc: cyclin-dependent protein kinase PhoA [Aspergillus flavus NRRL3357] gi|220691698|gb|EED48046.1| cyclin-dependent protein kinase PhoA [Aspergillus flavus NRRL3357]
  misc_feature (2)..(212): SWISSPROT Homolog: EC 2.7.11.22 Cyclin-dependent kinase
MLVFEYMDGDLKKYMDTHGDRGALDPKTINRFMYQLLKGIEYCHDSRVLHRDLKPQNLLISSQNDTLKLGDFGLARAFGIPVNTFSNEVVTLWYRAPDVLLGSRTYSTSIDIWSAGCIMAEMYTGRPLFPGTTNEDQIIRIFRIMGTPTERTWPNISQLPEYKPSMQHYATQDLRVILPQIDPVGIDLLSRMLVLRPEHRITAKDAINHPWFEGLREEDRRKAKQQFDMAQGQRQQPHMHPQAAFAPHAVPSQGNYDHRTY

SEQ ID NO: 38661 - DNA, 3898 bp, Muscodor strobelii
  misc_feature: SGI EST ID NO. CUFF.92970.0
  misc_feature: Variant of the nucleotide sequence at SEQ ID NO 38659
tgcggcttccgtgactcagatttgacactcgccatactttccaaatgggcgtagaccatagacctcgagcacccaggaaccgtgcattgtttgcgtaacgcgtcgtaaactcttcgaatagctgcgaactaaagctatctgcgaaagcaccacctccggctcaacccctgagcccctcgacttgtctaccgggcgtcgagcggccagccagcttttcctcctcacaaacgccgacttcctccgtttgcattgcgtagccagggacaccatttttgtcagcagcagctctgatcctaggccagcaggcgacggtgacatcgcccaacatgaccatggacaagcaacgcctcccccgacttcgttccagcagctggagaagctgggcgagggcacctatgccacggtattcaaaggccgcaaccgccagaccggcgagctcgtcgccctcaaggagatccagctcgactccgaagagggcaccccctccaccgccatccgcgaaatctcccttctcaaggagctcaagcacgagaacattgtcggcctgcacgacgtcgtccacaccgagaacaagctgatgctggtcttcgagtacatggacggtgatctcaaaaagtacatggacacccatggcgaccgtggcgctctcgaccccaagaccatcaacagattcatgtaccagctgctcaagggcatcgagtactgccacgacagccgcgtcctccaccgcgacctcaagccccagaatctcctcattagcagccagaacgacaccctcaaactcggcgactttggcctggcccgtgccttcggcatccccgtcaacaccttctccaatgaggtcgtaactctctggtaccgcgccccggacgtcctgcttggcagccgcacctacagcacaagcattgacatctggtcggccggctgcatcatggccgagatgtacacgggccgtcccttgttccccggcaccaccaacgaggatcagatcatccgcatcttccgcatcatgggcacccccaccgagcgcacctggcccaacatcagccagctccccgagtacaagcctagcatgcagcactacgccacccaggatctacgcgtcattctacctcagatcgaccccgtgggcatcgaccttctgagccgcatgctcgtcctccgccccgagcaccgcatcacagccaaggacgccatcaatcacccctggtttgagggactcagggaagaggaccgccgaaaggcaaagcaacagtttgacatggcccagggacagcgccaacaaccgcacatgcacccccaggctgctttcgcgcctcatgcagtgccgtcacagggcaactatgaccaccggacttactagggttatcatccgatggaagacaatagtagccaagcaactcctcgccagagctggtacaccggggcctggcgcccaggccgacaatggcttagcaaacaatagtcgacaagccagtggccaggcaaatcttgttcgtacacccacgacagataggaagtgaaaacgcggaagacatggactgaaacagcagtatcatacaatgtggataatgtggactgatggagctggatacaatctgcatctctcagatgatatgcactgtttcattacgcaaagagtcagacgggagaaaagaaaattgcgtgttctttcctacgaacgcagagcaaacgaggagagaaggggaaaagatggatttcttttttcctccgttctatcttgtggggaggagtgggaatgatatgaatccgagatgatgatcgctaggcgttcggggcggccggggcttgtcgtgaatagacttgcgcctgcgttttgtgtgcatttacaggacgtggtggagtttgcttttctgatagtaggcaattgatactttgagcgttcaccagtctgttgtaattctgtgagggtatggtaatttgaacgtgatgttctaaatgggtatagtgggtttagtgagatgtgagataagtcgaggaagatgtatagcagttcacacatttcgttaaagagatctagagtgtagatttggggtatgtgggaactcatatacggcactcgacgatggtgtcgcatcagcggaacctatataattacgaaacgaaacggtgtagaaatatctctggcagatacacttagatatccgtctccaaacaacgatatccaatccgacgaagcacaattcgctcgcacttgcacctgccctcattcaaactccccgtgtttgtttctcttgcatagaaataaaaatcctgagaaagatatcacacccggatcatcacagcttacacccctccccacgatcaagcaacacccagaatccccaaaagttcctcgcctttcggcgcagtggttaggttctcatagccatcctcggtaaccaagatacaatcttcgatccgtacaccgcctacatcccagtacttgtcaagaacggtggtattgatgtatttcttgtgttcctcgctgcgcaggaaatacgcctcgatgtagggacggcagaagtagaggcccggttcgatggtcactatcatgtttggggacagggtgttgaatttggttgatgtggttgagggcttggaggaggtggaggatgaggaggcagattgagaggcttgtgcgatcatggctcggacggagtgtggaccgatcggtcgccgttttccccataggctttctcctgcgggtcggaggaggtttttgcttaggacgctggagagttatcagtacacaacacgatacatgcccttcgtagaacagggaagggagaaatggggaaagaggagtgagactaactcatgaacatccaacccaacatggtgtccaagcccatgcgggaaaaacgccgcccccgtcccattcttaaagatctcatccgcactcccaccgcacaaaatacccagctccagcaatcccttaacagcaacgagcatagcatggagttgcaaatccctaaacacaacaccaggtgctatcttcctaatacactcatcctgcatcctatgcacaagatcataaatccctctcgcctcatccgaaaacttcggaccaataggcaacgtcctagtaacatcgctagcatagcattgccactcggccccagcatcgaggactacgagttgtcttccggcaagcggctcgttgttggattcgtagtgcagcgtagatgcgttgggaccagatcctgcaatcacagggtaagattgtgcgtgtgagttttgagccgtgcaccacccgatgaaggatgcttggatttgacactcgttgtcccattggtacatcgactgcgctacgtgtttatgtgctgaggatgagactaggtttgcttttttgatcatggatatttcatacggactcttgattacgcgggcttcgtccatagtgggttggagggatgtggtgtcgatgtggagacgcggtttcaacgcgttgaaggcgtcgaattggggaagttgggaggcacgtagcacgaatagggtctttatggtggtgaggcgggaagtgagatattttcctagacctgagatgtattgcacgtcgtgcacgtcggagcgtgcgagacatgattctggggagggtgtgttgccgaaccagaggattgttgcgggtggtgtgtaggggatccagagggttagtttgtccgctgctatgtcgtacgttacgctgcagcctggaaagtcggcgcctgtgaggtagtagaagctgggtctgttgttagctatagggtctatgagacggcatgaagaggtttggttgtctagatagacatactagcgacgttggcggaagggtgggccttgatcggagtcttcgtagtttgtttcatattggcctggcagatagacgattccttcttgacacccgagccctttggct

SEQ ID NO: 38662 - DNA, 1557 bp, Muscodor strobelii
  misc_feature: SGI cDNA ID NO. 573438
  misc_feature: Encodes the peptide sequence at SEQ ID NO 38663
atggaggccgttgatatcgagcataacctcgtcgtgatcgatgagttcgatgcactttcaattgagattcatgaaccggtgccttcatttgctaagcccgatgtgaagtatcctgccaaactccacgcccgtaaagtagccaaagggctcgggtgtcaagaaggaatcgtctatctgccaggccaatatgaaacaaactacgaagactccgatcaaggcccacccttccgccaacgtcgctacttctactacctcacaggcgccgactttccaggctgcagcgtaacgtacgacatagcagcggacaaactaaccctctggatcccctacacaccacccgcaacaatcctctggttcggcaacacaccctccccagaatcatgtctcgcacgctccgacgtgcacgacgtgcaatacatctcaggtctaggaaaatatctcacttcccgcctcaccaccataaagaccctattcgtgctacgtgcctcccaacttccccaattcgacgccttcaacgcgttgaaaccgcgtctccacatcgacaccacatccctccaacccactatggacgaagcccgcgtaatcaagagtccgtatgaaatatccatgatcaaaaaagcaaacctagtctcatcctcagcacataaacacgtagcgcagtcgatgtaccaatgggacaacgagtgtcaaatccaagcatccttcatcgggtggtgcacggctcaaaactcacacgcacaatcttaccctgtgattgcaggatctggtcccaacgcatctacgctgcactacgaatccaacaacgagccgcttgccggaagacaactcgtagtcctcgatgctggggccgagtggcaatgctatgctagcgatgttactaggacgttgcctattggtccgaagttttcggatgaggcgagagggatttatgatcttgtgcataggatgcaggatgagtgtattaggaagatagcacctggtgttgtgtttagggatttgcaactccatgctatgctcgttgctgttaagggattgctggagctgggtattttgtgcggtgggagtgcggatgagatctttaagaatgggacgggggcggcgtttttcccgcatgggcttggacaccatgttgggttggatgttcatgacgtcctaagcaaaaacctcctccgacccgcaggagaaagcctatggggaaaacggcgaccgatcggtccacactccgtccgagccatgatcgcacaagcctctcaatctgcctcctcatcctccacctcctccaagccctcaaccacatcaaccaaattcaacaccctgtccccaaacatgatagtgaccatcgaaccgggcctctacttctgccgtccctacatcgaggcgtatttcctgcgcagcgaggaacacaagaaatacatcaataccaccgttcttgacaagtactgggatgtaggcggtgtacggatcgaagattgtatcttggttaccgaggatggctatgagaacctaaccactgcgccgaaaggcgaggaacttttggggattctgggtgttgcttga

SEQ ID NO: 38663 - protein, 518 aa, Muscodor strobelii
  misc_feature: SGI Peptide ID NO. 573438
  misc_feature (202)..(504): Pfam Id: PF00557 Pfam Desc: metallopeptidase family M24
  misc_feature (248)..(504): Pfam Id: PF00557 Pfam Desc: metallopeptidase family M24
  misc_feature (26)..(515): NCBI GI: 171685998 Blast Desc: protein product [Podospora anserina] gi|170942960|emb|CAP68613.1| protein product [Podospora anserina]
  misc_feature (6)..(515): NCBI GI: 39941546 Blast Desc: MGG_05684 [Magnaporthe grisea 70-15] gi|145022377|gb|EDK06397.1| MGG_05684 [Magnaporthe grisea 70-15]
  misc_feature (13)..(515): NCBI GI: 156051082 Blast Desc: SS1G_06948 [Sclerotinia sclerotiorum 1980] gi|154704726|gb|EDO04465.1| SS1G_06948 [Sclerotinia sclerotiorum 1980]
  misc_feature (36)..(516): NCBI GI: 116207298 Blast Desc: CHGG_02942 [Chaetomium globosum CBS 148.51] gi|88183539|gb|EAQ91007.1| CHGG_02942 [Chaetomium globosum CBS 148.51]
  misc_feature (13)..(515): NCBI GI: 154295235 Blast Desc: BC1G_13431 [Botryotinia fuckeliana B05.10] gi|150844158|gb|EDN19351.1| BC1G_13431 [Botryotinia fuckeliana B05.10]
  misc_feature (36)..(515): NCBI GI: 189209145 Blast Desc: Xaa-Pro dipeptidase [Pyrenophora tritici-repentis Pt-1C-BFP] gi|187976998|gb|EDU43624.1| Xaa-Pro dipeptidase [Pyrenophora tritici-repentis Pt-1C-BFP]
  misc_feature (5)..(515): NCBI GI: 121700997 Blast Desc: peptidase D, [Aspergillus clavatus NRRL 1] gi|119396906|gb|EAW07337.1| peptidase D, [Aspergillus clavatus NRRL 1]
  misc_feature (36)..(515): NCBI GI: 169767434 Blast Desc: [Aspergillus oryzae RIB40] gi|83766043|dbj|BAE56186.1| protein product [Aspergillus oryzae]
  misc_feature (36)..(515): NCBI GI: 145230884 Blast Desc: An01g13040 [Aspergillus niger] gi|134055829|emb|CAK37351.1| protein product [Aspergillus niger]
  misc_feature (11)..(515): NCBI GI: 119494934 Blast Desc: peptidase D, [Neosartorya fischeri NRRL 181] gi|119412428|gb|EAW22369.1| peptidase D, [Neosartorya fischeri NRRL 181]
  misc_feature (53)..(503): SWISSPROT Homolog: EC 3.4.13.9 Xaa-Pro dipeptidase
MEAVDIEHNLVVIDEFDALSIEIHEPVPSFAKPDVKYPAKLHARKVAKGLGCQEGIVYLPGQYETNYEDSDQGPPFRQRRYFYYLTGADFPGCSVTYDIAADKLTLWIPYTPPATILWFGNTPSPESCLARSDVHDVQYISGLGKYLTSRLTTIKTLFVLRASQLPQFDAFNALKPRLHIDTTSLQPTMDEARVIKSPYEISMIKKANLVSSSAHKHVAQSMYQWDNECQIQASFIGWCTAQNSHAQSYPVIAGSGPNASTLHYESNNEPLAGRQLVVLDAGAEWQCYASDVTRTLPIGPKFSDEARGIYDLVHRMQDECIRKIAPGVVFRDLQLHAMLVAVKGLLELGILCGGSADEIFKNGTGAAFFPHGLGHHVGLDVHDVLSKNLLRPAGESLWGKRRPIGPHSVRAMIAQASQSASSSSTSSKPSTTSTKFNTLSPNMIVTIEPGLYFCRPYIEAYFLRSEEHKKYINTTVLDKYWDVGGVRIEDCILVTEDGYENLTTAPKGEELLGILGVA

SEQ ID NO: 38664 - DNA, 3629 bp, Muscodor strobelii
  misc_feature: SGI EST ID NO. CUFF.92971.1
  misc_feature: Variant of the nucleotide sequence at SEQ ID NO 38662
gtgtttctggacgagtaacatcgcaaaaactaactctgtcaactttgcacgctccaatgattcgataatcgcccgatatttggcctcagtcattgaccgattattgcaggactctgctcctttcggctgaaatggaggccgttgatatcgagcataacctcgtcgtgatcgatgagttcgatgcactttcaattgagattcatgaaccggtgccttcatttgctaagcccgatgtgaagtatcctgccaaactccacgcccgtaaagtagccaaagggctcgggtgtcaagaaggaatcgtctatctgccaggccaatatgaaacaaactacgaagactccgatcaaggcccacccttccgccaacgtcgctacttctactacctcacaggcgccgactttccaggctgcagcgtaacgtacgacatagcagcggacaaactaaccctctggatcccctacacaccacccgcaacaatcctctggttcggcaacacaccctccccagaatcatgtctcgcacgctccgacgtgcacgacgtgcaatacatctcaggtctaggaaaatatctcacttcccgcctcaccaccataaagaccctattcgtgctacgtgcctcccaacttccccaattcgacgccttcaacgcgttgaaaccgcgtctccacatcgacaccacatccctccaacccactatggacgaagcccgcgtaatcaagagtccgtatgaaatatccatgatcaaaaaagcaaacctagtctcatcctcagcacataaacacgtagcgcagtcgatgtaccaatgggacaacgagtgtcaaatccaagcatccttcatcgggtggtgcacggctcaaaactcacacgcacaatcttaccctgtgattgcaggatctggtcccaacgcatctacgctgcactacgaatccaacaacgagccgcttgccggaagacaactcgtagtcctcgatgctggggccgagtggcaatgctatgctagcgatgttactaggacgttgcctattggtccgaagttttcggatgaggcgagagggatttatgatcttgtgcataggatgcaggatgagtgtattaggaagatagcacctggtgttgtgtttagggatttgcaactccatgctatgctcgttgctgttaagggattgctggagctgggtattttgtgcggtgggagtgcggatgagatctttaagaatgggacgggggcggcgtttttcccgcatgggcttggacaccatgttgggttggatgttcatgacgtcctaagcaaaaacctcctccgacccgcaggagaaagcctatggggaaaacggcgaccgatcggtccacactccgtccgagccatgatcgcacaagcctctcaatctgcctcctcatcctccacctcctccaagccctcaaccacatcaaccaaattcaacaccctgtccccaaacatgatagtgaccatcgaaccgggcctctacttctgccgtccctacatcgaggcgtatttcctgcgcagcgaggaacacaagaaatacatcaataccaccgttcttgacaagtactgggatgtaggcggtgtacggatcgaagattgtatcttggttaccgaggatggctatgagaacctaaccactgcgccgaaaggcgaggaacttttggggattctgggtgttgcttgatcgtggggaggggtgtaagctgtgatgatccgggtgtgatatctttctcaggatttttatttctatgcaagagaaacaaacacggggagtttgaatgagggcaggtgcaagtgcgagcgaattgtgcttcgtcggattggatatcgttgtttggagacggatatctaagtgtatctgccagagatatttctacaccgtttcgtttcgtaattatataggttccgctgatgcgacaccatcgtcgagtgccgtatatgagttcccacataccccaaatctacactctagatctctttaacgaaatgtgtgaactgctatacatcttcctcgacttatctcacatctcactaaacccactatacccatttagaacatcacgttcaaattaccataccctcacagaattacaacagactggtgaacgctcaaagtatcaattgcctactatcagaaaagcaaactccaccacgtcctgtaaatgcacacaaaacgcaggcgcaagtctattcacgacaagccccggccgccccgaacgcctagcgatcatcatctcggattcatatcattcccactcctccccacaagatagaacggaggaaaaaagaaatccatcttttccccttctctcctcgtttgctctgcgttcgtaggaaagaacacgcaattttcttttctcccgtctgactctttgcgtaatgaaacagtgcatatcatctgagagatgcagattgtatccagctccatcagtccacattatccacattgtatgatactgctgtttcagtccatgtcttccgcgttttcacttcctatctgtcgtgggtgtacgaacaagatttgcctggccactggcttgtcgactattgtttgctaagccattgtcggcctgggcgccaggccccggtgtaccagctctggcgaggagttgcttggctactattgtcttccatcggatgataaccctagtaagtccggtggtcatagttgccctgtgacggcactgcatgaggcgcgaaagcagcctgggggtgcatgtgcggttgttggcgctgtccctgggccatgtcaaactgttgctttgcctttcggcggtcctcttccctgagtccctcaaaccaggggtgattgatggcgtccttggctgtgatgcggtgctcggggcggaggacgagcatgcggctcagaaggtcgatgcccacggggtcgatctgaggtagaatgacgcgtagatcctgggtggcgtagtgctgcatgctaggcttgtactcggggagctggctgatgttgggccaggtgcgctcggtgggggtgcccatgatgcggaagatgcggatgatctgatcctcgttggtggtgccggggaacaagggacggcccgtgtacatctcggccatgatgcagccggccgaccagatgtcaatgcttgtgctgtaggtgcggctgccaagcaggacgtccggggcgcggtaccagagagttacgacctcattggagaaggtgttgacggggatgccgaaggcacgggccaggccaaagtcgccgagtttgagggtgtcgttctggctgctaatgaggagattctggggcttgaggtcgcggtggaggacgcggctgtcgtggcagtactcgatgcccttgagcagctggtacatgaatctgttgatggtcttggggtcgagagcgccacggtcgccatgggtgtccatgtactttttgagatcaccgtccatgtactcgaagaccagcatcagcttgttctcggtgtggacgacgtcgtgcaggccgacaatgttctcgtgcttgagctccttgagaagggagatttcgcggatggcggtggagggggtgccctcttcggagtcgagctggatctccttgagggcgacgagctcgccggtctggcggttgcggcctttgaatacctgtgatgtagcacaagac

SEQ ID NO: 38665 - DNA, 2844 bp, Muscodor strobelii
  misc_feature: SGI cDNA ID NO. 573439
  misc_feature: Reduced expression when VOC is produced
  misc_feature: Encodes the peptide sequence at SEQ ID NO 38666
atgcctccagcttcgcgcccatcgcggccttctgccgaaccttcgacatccagcacacctgcaggcgccaatccgcccagcgccacccattccgatgatgagtctaccgatctagcttttgaccccgaatctccagccaacggctctcagcaaggcgacgatgccgaggaacaaacacccggctcctcgcgtcctgcatcctctgctcctctccagaaaagacgtcgggtgacgcgcgcgtgcgacgaatgccgccgcaagaagatcaaatgtgatgggaaacagccgtgcacgcattgccaagtatacagctatgagtgtacatacgataagccctctaacaggaggagaaatccagcaccgcagtatatcgaagccctggagaacaagctttcccgggcggaggcgctgttgcgcaagttcatgcccgatgtcgacctcaacgaccctgagcttgacccttcggtgcagcaagaattccggatgcgagaacaggcaaggcaaagagccttggcccagaaaaaagataagtctagttcatcgagctcaggtgggcagctacagtccatgatatccagtatagggcagttggatctcgacgaaaagggtgattatgatttccacggtaactcctctgggtcggtattcttcaaacggatgaaagatcactttcgctccatgcttggaaaggattaccagcttcctcttttgcctcggccccctcggtcgtccgccctgatcggacttgaatctcctcgggctacctcaagtcctctcgggtccggtcctggtcgcgtcaagtacgatttaccagccaaagagagggcactcgcactttgttccgagtccttagacaacgcaacgtgcttattgcgaattgtccataaaccgtcgttctatgaaatgctggaccgcctctaccaaaagccacgggatctatatgaaactgaagataagagaaatttagctttagcatttgcggctatggcgctcggttgcatgtataacgtctcggataatgcgcagacagggacaccgtataaactctccatcgatgaagcattacactactatggcgcggcgaaagacttattgcaggacatcacggcgatccgagatgtcacatcactccaggcactccttttcatgatcttgtttatgcaatccatctccaacctaagcacctgctatggcttcgtgggtatcgccctccgaagtgcactgagattaggtcttcatcgccatttcccaccatcactctgcaaactgagtcctattgagtccgaaacgagacgtagagtcttctatatttgccggcaaatggacacttacgtctccgcgctcctggggttcccgctcttactgaatgacgacgacatagatcagctgttgccgaccactgtggatgatcaatttgttaccaaggatgcaatcatcgaaccaccaacgggcactccatcattcttcgaggcatttaatgctcatgtcaaactgatggatttgctgggcaaagtagtcaagcaagtgtatccgcttaagcgagttgaggctgagcgggataccgccgagagcgccgaccagtatgcatcctatgatgtcagctatacgaagatcaaggatatggaagaagaacttcagcaatggaatgagaatctgcctgaattctggcggcctaattccgatgggacggtcgaagtagtccgggtccgcaacttgctccggtttacgtttgcgcatgtccagatggtgctctataggcccttcctgcattatgtctccccaagactttgcgctagcaagactatcaacgaacgagcatacgcatgtggtgctgctggtatcaatgttgcccgaaacatcttacgcatcggaacagaaatgcggaaacaagtctctcttgtaggaccttactggttcacgctgttctctgagttctttgccataatctcattggcattcttcgtccttgagaaccaggacaagccaggctcgaaggaaattttgtccgaggctattgctgggaaagagatgattgacgagctggctaagaagagtatgatcgcagatcgagtagcagcttctcttgaaactgttttcagtcaactaccaggacatcttgaggattcccagggccgaacgatagtttcgaggaagcgaccagtatctagcagcaactcctcgggtcacagtgtgaagcaaccttcgtctactagcctcgcatcgaaaatatctaaaaaggccaaaggtgccacaacaaagggcaaaaagtctgccaaacccatgacagaaccaatacagacaagcctcgcgttcgaaaacgagatgttatccagccctgagtttggaacaccctacggctccatgatgttttcccctatagatgtctccgcagcatctcatggaccgtctggaactgttctgtcacatgacacgatcaacgttaaaacggagccaggtgcacccggggctgcgcagcagattcatcgcctcgatgcaattatgttttcttcagatgacccacttgcatatccaaaccaaccacgttcggattttcatcaaaacggaggactgcatagcgcgaactccatggtacatcacgacatgcctcagtactatgttccccaactatatgatggtattgaaggacaactactaggcccgctgccaccatacctcatgcaatcacagcaccagcccgggtttcattttccctcgcagatgttttccgaccccatgctgtcatctcaacaaatgcatccatcgcaacatcattctcaacagcgacagaatatggggaactacgaggacatgaacgctggtaattggcaaggcatgtttccataa

SEQ ID NO: 38666 - protein, 947 aa, Muscodor strobelii
  misc_feature: SGI Peptide ID NO. 573439
  misc_feature (79)..(116): Pfam Id: PF00172 Pfam Desc: Fungal Zn(2)-Cys(6) binuclear cluster domain
  misc_feature (373)..(471): Pfam Id: PF04082 Pfam Desc: Fungal specific transcription factor domain
  misc_feature (6)..(926): NCBI GI: 171686000 Blast Desc: protein product [Podospora anserina] gi|170942961|emb|CAP68614.1| protein product [Podospora anserina]
  misc_feature (3)..(922): NCBI GI: 116207300 Blast Desc: CHGG_02943 [Chaetomium globosum CBS 148.51] gi|88183540|gb|EAQ91008.1| CHGG_02943 [Chaetomium globosum CBS 148.51]
  misc_feature (41)..(942): NCBI GI: 256725796 Blast Desc: [Nectria haematococca mpVI 77-13-4]
  misc_feature (25)..(941): NCBI GI: 46111299 Blast Desc: FG02531.1 [Gibberella zeae PH-1]
  misc_feature (11)..(898): NCBI GI: 145615569 Blast Desc: MGG_05683 [Magnaporthe grisea 70-15] gi|145022376|gb|EDK06396.1| MGG_05683 [Magnaporthe grisea 70-15]
  misc_feature (23)..(856): NCBI GI: 238486650 Blast Desc: C6 transcription factor (Mut3), [Aspergillus flavus NRRL3357] gi|220699442|gb|EED55781.1| C6 transcription factor (Mut3), [Aspergillus flavus NRRL3357]
  misc_feature (23)..(856): NCBI GI: 169770871 Blast Desc: [Aspergillus oryzae RIB40] gi|83767764|dbj|BAE57903.1| protein product [Aspergillus oryzae]
  misc_feature (15)..(857): NCBI GI: 115396564 Blast Desc: conserved [Aspergillus terreus NIH2624] gi|114193490|gb|EAU35190.1| conserved [Aspergillus terreus NIH2624]
  misc_feature (70)..(849): NCBI GI: 242784576 Blast Desc: C6 transcription factor (Mut3), [Talaromyces stipitatus ATCC 10500] gi|218720562|gb|EED19981.1| C6 transcription factor (Mut3), [Talaromyces stipitatus ATCC 10500]
  misc_feature (44)..(854): NCBI GI: 259486212 Blast Desc: TPA: Zn(II)2Cys6 transcription factor (Eurofung) [Aspergillus nidulans FGSC A4]
  misc_feature: Useful for introducing or modulating the production of volatile compounds
MPPASRPSRPSAEPSTSSTPAGANPPSATHSDDESTDLAFDPESPANGSQQGDDAEEQTPGSSRPASSAPLQKRRRVTRACDECRRKKIKCDGKQPCTHCQVYSYECTYDKPSNRRRNPAPQYIEALENKLSRAEALLRKFMPDVDLNDPELDPSVQQEFRMREQARQRALAQKKDKSSSSSSGGQLQSMISSIGQLDLDEKGDYDFHGNSSGSVFFKRMKDHFRSMLGKDYQLPLLPRPPRSSALIGLESPRATSSPLGSGPGRVKYDLPAKERALALCSESLDNATCLLRIVHKPSFYEMLDRLYQKPRDLYETEDKRNLALAFAAMALGCMYNVSDNAQTGTPYKLSIDEALHYYGAAKDLLQDITAIRDVTSLQALLFMILFMQSISNLSTCYGFVGIALRSALRLGLHRHFPPSLCKLSPIESETRRRVFYICRQMDTYVSALLGFPLLLNDDDIDQLLPTTVDDQFVTKDAIIEPPTGTPSFFEAFNAHVKLMDLLGKVVKQVYPLKRVEAERDTAESADQYASYDVSYTKIKDMEEELQQWNENLPEFWRPNSDGTVEVVRVRNLLRFTFAHVQMVLYRPFLHYVSPRLCASKTINERAYACGAAGINVARNILRIGTEMRKQVSLVGPYWFTLFSEFFAIISLAFFVLENQDKPGSKEILSEAIAGKEMIDELAKKSMIADRVAASLETVFSQLPGHLEDSQGRTIVSRKRPVSSSNSSGHSVKQPSSTSLASKISKKAKGATTKGKKSAKPMTEPIQTSLAFENEMLSSPEFGTPYGSMMFSPIDVSAASHGPSGTVLSHDTINVKTEPGAPGAAQQIHRLDAIMFSSDDPLAYPNQPRSDFHQNGGLHSANSMVHHDMPQYYVPQLYDGIEGQLLGPLPPYLMQSQHQPGFHFPSQMFSDPMLSSQQMHPSQHHSQQRQNMGNYEDMNAGNWQGMFP

SEQ ID NO: 38667 - DNA, 7344 bp, Muscodor strobelii
  misc_feature: SGI EST ID NO. CUFF.92967.2
  misc_feature: Variant of the nucleotide sequence at SEQ ID NO 38665
aagccgtgtatgtgttgaggagaaatattgggtatgtggtaatactcggagatcccaatgccggatgggccaagtgggcatcccgtgagaaggctgacccttaagatgctccaccacaggtctgttcaccagcggttggaagctgtcgcttggaaacactcattttcacccacaggaaagcaacgataagaggcaggcgagcaggtaagcgaggcagattagtacctctctagaacgcatgcagaggccgtacgtatatgtaggtagttacaccctccttaatgcaccttactcagttatagataatagtctgccatgtttgtcgggtaatttgtgcgatctcctgcgacccgtactctcaacattcaggcattcctgaccacatgtagcgaattgtacctcataacgtgagagaatagcagcacaaatgtattgctttcatactagtaattgtctcttgactgtagatttacaatgctgtcaaccttcctagctgaggccgccagtctgtaagttcaaggacgataaccccctcaacttacatacacgatcgtacggtacctacctggatacgttgataccgcccgtacattagttccaaactcaccattcggcgaagaccatcgcgtgagtttgcgactctaccgccgacgggtcaacctcccgaacacggtgctcgtccatccgaatacctcgcttacctttatgtttcctgccacctcagagcgcaccgtctgtgattagtagtaggctcaagctgtgttacagtgagatcgatcgtcgctgtgaaaacatcagtgacgccaagggcaatgtgagaacttgtatgccccgtcgaacccacgtagtgcccaccttcgcaacatgcccaccacccttgtcgccctgccaagagctcacccccccttcttcgatctgggacgtctatcgacctccatctctgcttaattccccattggatcatttcacactcacctcgactcaattccaagccaagctcccatcacccctcaaacctcaaaccgccatcgccacgactgctgcctcttcgaagctcacatctagcgcacgccattgtcgcggccgttctgtttgattatcaattcgaccagcagcccatcccaaaaatgcaagaagaacgctcgcttctccataacaagtagtggtagatcgtgccccataggacgcggcatcttgttttgccggctatccgtatctgccgcgtgtgtcgaccaagaagaacggcgaaccatcatcagcatctcttgacacctcggcatgcctccagcttcgcgcccatcgcggccttctgccgaaccttcgacatccagcacacctgcaggcgccaatccgcccagcgccacccattccgatgatgagtctaccgatctagcttttgaccccgaatctccagccaacggctctcagcaaggcgacgatgccgaggaacaaacacccggctcctcgcgtcctgcatcctctgctcctctccagaaaagacgtcgggtgacgcgcgcgtgcgacgaatgccgccgcaagaagatcaaatgtgatgggaaacagccgtgcacgcattgccaagtatacagctatgagtgtacatacgataagccctctaacaggaggagaaatccagcaccgcagtatatcgaagccctggagaacaagctttcccgggcggaggcgctgttgcgcaagttcatgcccgatgtcgacctcaacgaccctgagcttgacccttcggtgcagcaagaattccggatgcgagaacaggcaaggcaaagagccttggcccagaaaaaagataagtctagttcatcgagctcaggtgggcagctacagtccatgatatccagtatagggcagttggatctcgacgaaaagggtgattatgatttccacggtaactcctctgggtcggtattcttcaaacggatgaaagatcactttcgctccatgcttggaaaggattaccagcttcctcttttgcctcggccccctcggtcgtccgccctgatcggacttgaatctcctcgggctacctcaagtcctctcgggtccggtcctggtcgcgtcaagtacgatttaccagccaaagagagggcactcgcactttgttccgagtccttagacaacgcaacgtgcttattgcgaattgtccataaaccgtcgttctatgaaatgctggaccgcctctaccaaaagccacgggatctatatgaaactgaagataagagaaatttagctttagcatttgcggctatggcgctcggttgcatgtataacgtctcggataatgcgcagacagggacaccgtataaactctccatcgatgaagcattacactactatggcgcggcgaaagacttattgcaggacatcacggcgatccgagatgtcacatcactccaggcactccttttcatgatcttgtttatgcaatccatctccaacctaagcacctgctatggcttcgtgggtatcgccctccgaagtgcactgagattaggtcttcatcgccatttcccaccatcactctgcaaactgagtcctattgagtccgaaacgagacgtagagtcttctatatttgccggcaaatggacacttacgtctccgcgctcctggggttcccgctcttactgaatgacgacgacatagatcagctgttgccgaccactgtggatgatcaatttgttaccaaggatgcaatcatcgaaccaccaacgggcactccatcattcttcgaggcatttaatgctcatgtcaaactgatggatttgctgggcaaagtagtcaagcaagtgtatccgcttaagcgagttgaggctgagcgggataccgccgagagcgccgaccagtatgcatcctatgatgtcagctatacgaagatcaaggatatggaagaagaacttcagcaatggaatgagaatctgcctgaattctggcggcctaattccgatgggacggtcgaagtagtccgggtccgcaacttgctccggtttacgtttgcgcatgtccagatggtgctctataggcccttcctgcattatgtctccccaagactttgcgctagcaagactatcaacgaacgagcatacgcatgtggtgctgctggtatcaatgttgcccgaaacatcttacgcatcggaacagaaatgcggaaacaagtctctcttgtaggaccttactggttcacgctgttctctgagttctttgccataatctcattggcattcttcgtccttgagaaccaggacaagccaggctcgaaggaaattttgtccgaggctattgctgggaaagagatgattgacgagctggctaagaagagtatgatcgcagatcgagtagcagcttctcttgaaactgttttcagtcaactaccaggacatcttgaggattcccagggccgaacgatagtttcgaggaagcgaccagtatctagcagcaactcctcgggtcacagtgtgaagcaaccttcgtctactagcctcgcatcgaaaatatctaaaaaggccaaaggtgccacaacaaagggcaaaaagtctgccaaacccatgacagaaccaatacagacaagcctcgcgttcgaaaacgagatgttatccagccctgagtttggaacaccctacggctccatgatgttttcccctatagatgtctccgcagcatctcatggaccgtctggaactgttctgtcacatgacacgatcaacgttaaaacggagccaggtgcacccggggctgcgcagcagattcatcgcctcgatgcaattatgttttcttcagatgacccacttgcatatccaaaccaaccacgttcggattttcatcaaaacggaggactgcatagcgcgaactccatggtacatcacgacatgcctcagtactatgttccccaactatatgatggtattgaaggacaactactaggcccgctgccaccatacctcatgcaatcacagcaccagcccgggtttcattttccctcgcagatgttttccgaccccatgctgtcatctcaacaaatgcatccatcgcaacatcattctcaacagcgacagaatatggggaactacgaggacatgaacgctggtaattggcaaggcatgtttccataaagtggcataggctactatccagcattgatctcgagaattattgcttaaatagggacacggtacacttaaaaagcagaactaaagaggctgaggcgaaaaagatacccaagtaggacggcgttaccgactaggacttatgcgagatgtcggaccgatgggcgtaggacgtgttcaacatcagcataggactatcgactgtatacaagattccagcattcttaacgaatttccttccgatacgagcatgggcgcgtcaaaaagctaagcagaggcccaccggtgggggaccggtggccaatgagggatctgatcatcgtattcacgtcatgttgtttttattcgtgtgggatacatatacatagagatacctgctcgctatttatgtgtacatatcaaatatcggatttttgtgagatgggtacttgtgtgtagatatgaggaatacgaaatgcatatttatgtacccacccaaatctaaccgactcgcctatcgcctacttgctaaacagtacgaggttttgtcgagattgataactgagttaaataaagcaatagtgccttcaggcgagttcaggtgaatccggggtcgcgggagcgggacgatgtagatccgtcaacgttacatgccatacttcgggaatgatctgcacgtggtggaggggtgacgcaggcgacggggcttttggacgtgggctttttctaaggacggacgaggctcggggtgttgctggtgataacgggataggtgcgcgtatgtttgtgaagacatgagatgaatacgagttgatgttggagctttcgagacgatcaaacgagagatttgtcaagtgtttgggttgattttggatgttcgatgtgggcggcctcacgattgaaggaagtggagctagttgatgattcaagttttgcgatacggattatagggtttatacacgtggggttgaagaaagtgattcgggagatgattgagccgacgttgaggggcaattagaagaagtattgatatttgtttcattaacttcaagatatagatttccaatatggagtttcatccttgcgatgtgaaggcatgttgagactatgagtagataaattttacggcagaaatctcatagcatatcaccaatcgatccggaaactccatacgcaagagacacgacctgcgctactaagtttgaacgtaaaggacccttcgatagcgccacctaaagagaagcagattatataggtccgacatgactacggaactcggatctatcggtcttgtagaagacactgttgatcgactaagtgagctattgttcatctagttgcaggagtcgactgctaagtaggttgataaggtcaattgtccgtgggcgattattcaatgtgcctatcggctgccttggagagtgtatgcctaggatcctgacacttaatcgaatagctatcctttggtatcgatctgggccaactccgcgcccagtgtatagcgcaatctgagtatatatcatgcataggacaacgcttggtcaacagcatcatcattcatacagccgtccagcgacgagaggcttgactctccccttgagagcaaatccaatagatccgacgtcagaatcgtgtctcaagtccccaattcgaacatgtagatcacctagaatctttgccctatcctcggcatctaatgtagtgccgccaggctcgaggtcaaatttttctctgtcgtaagtaaaagcaaagacaggatcgaaaatgcgtggtgtcaatgacctcatatcgcacatggccccgatcataccggcaatcagtgctgtggaagagcaaagaagcaggatcacaacccaaaaagccacagactggtacacctctgtgtcgtagactgtcgtcaaatttgctccagcattgaagaatttagtcagctccgttacttccatagcggttgtgacttctataatgtcctgagactgactgatgagtcgcaaaccatcagatgggttatagtgagcgccccatccacggtctttgattatcagatcaggatcgtatttggtatcaagatacaaccgaacagtcgcgtccagaaatgaggcgagtctcaaggaaagccgggcattaggaccctcgcttatcaaatcagacagagtaatagggccgtacctaatccagctaggggggtctgaagcagtaaggtagcgaagaagcgcgacagactcggttggggaatttccggcccaaattactctgcctgcccagtaatcaaatgcagtcacatttgaagaccgttggtctgtctgagactgacgaatggccttcgtgtgacagctctgaccgatacaagtgatgtgcgcctcaactcgcttctccgtcactacacaacgagctgataagctacgactgtcttgccaatcgatccacatttgttcaggatgtggccagatgtgcacatagagctctagcggctcgaataggacttgttgcttctccagaccaaggaaagcagaaactctctggcaggcaatggctgaagtaacgtcaccgcacctctttttaaaactccagatatcccaatctgggcattgtggacaatcaaaagcgatgagaggtctcttgagtgggcccggcggtggaatgttcgattttttcaagccggaacagttcaatactatatatgaatgttctataagcagggaacttcttcccgttgtggggaggttataaataggtatgcccatgaaagatgagaaagagtcgctatgccgaagtccagtagtatcgatccagacatttgagtcgttaaatggttctatgcgaggaatctttacgttgccccagatgtcgacgggtgcatcgtgtgattcttgccaataaatttggtttaggctactgagcaatgttacaccgggagatgtagcatagtggttatacactatagggtctgaagtgacccatttgaacgttttactttgcttcagtggtcccgtatctgtgtatatagctgttcctgtgacatatctggtagaattcctcgtcgataggattcttagagaggcctgcccgccgatgggagacaatgtccagatcagaatcgacgggataatcaagggcgaaacgctgcgaaagtattttattgattggaacgcatccgaagtattctttatagtcataaatactcttagatcctacagtatatattagtgatgttttttcaatcaaggcgacggtactcgtaccctaagc

SEQ ID NO: 38668 - DNA, 1788 bp, Muscodor strobelii
  misc_feature: SGI cDNA ID NO. 573440
  misc_feature: Encodes the peptide sequence at SEQ ID NO 38669
atgtctctctatcacgagacagctgacattctgtcggctccgacatcgactggcggtaacctgaagaccaggatcttcagcaacaagagcctcaagtcgccttcacagcagatatacgctttggcaatagagacctgtaaatggagttctgtgcttaaagaagtcattgacgcatccgagcttctccgccacgagcgcaagctaactccactactctcacttctcctcactcatgatttcctgttagcgaagaagggaatcgcattacctgcgactcacggtctcaggcagtctatagaacgtcacaaaggacgtctcacctcagaattcacccgagctcgattgcggaggaaagctgggtccatcgacgcattacgagatatcatctcgcttgagtttctaggcggggccggacgatctccgcgatgggttcgcatcaacaccatcaagacgacccttcaggaacagcttgatacgacgttcaaggattttacaaaggtctcggatgtgaaagatgtagttggttcggcttctaagtgcctctatgtcgatgaacatgtgccgaacttactgggtttgtcgcccggttttgagatcgtcaagacactagcgtatagctccggtgctattattttacaggataaggcatcatgttttccggcgtacctactagatccacaacccgaagatggagatgttatcgactcttgtgccgctccaggaaacaagactacgcatgtggctgcaatagtcaggtcgaaggcacccgctggtcagacatgtccgcgaagagtccacgcgtgtgaaaaggacttgagaagagcacaaattctacagaagatggtgaacctggccggggcaaatgaaataacggaactcagccttggtcaagattttcttaagctggacccaacattggatttctatagcaatgttggtgctctccttttggatccgagctgttccggcagcggcatcgtaggcagagacagcatgcctactattcatttgccagatctgcctaccacaggcaacaaaggaccagcgattgacaagaaccgcaaacggaagcgagaagacacgtcgaacgcagcggaggagaagccagagcaagtccttattgacgacgatggacaagagaccgttctctcgtcgaagaaagagcttaggactcgacttgatgccttagcatcattccaactcacgttactgcttcacgcattcacgtttcccgcagcgcgccgcgtcacttactcaacgtgctctatacacgctgaggagaacgagcaagtggtcttgaaagctctacagtcacctgtaggtaaagccaggggatggaaaatcatgaagcgtgagcagcaggttgagggaatgcggaagtggccagttcgcggtgatttagaagctagtaacgggaatgcagaggtctctgaggcgtgtattaggagttatcaggatgatggacttggtgtcatggggttcttcgttgcggggtttgtgcgtgatgggactgttgacgagacagtgccatcgtctgaggcggctagcacagactcagaggcggatgatagaaagcattcatcgaaaaagaagaagccggtaccggagcgtagttatagaatgcaacagaagtggggatatgcatcgtcagattcggatgaccttcctaccggattgcaacaaaagaagggctcaacgaactggcagaagtatcgagaggaatatgttgaacccgctaaggatagcgacgaggcatttggagatgaatggggtggattcgacgactag

SEQ ID NO: 38669 - protein, 595 aa, Muscodor strobelii
  misc_feature: SGI Peptide ID NO. 573440
  misc_feature (133)..(472): Pfam Id: PF01189 Pfam Desc: NOL1/NOP2/sun family
  misc_feature (208)..(250): Pfam Id: PF01189 Pfam Desc: NOL1/NOP2/sun family
  misc_feature (1)..(507): NCBI GI: 46124797 Blast Desc: FG06776.1 [Gibberella zeae PH-1]
  misc_feature (18)..(501): NCBI GI: 256733184 Blast Desc: NECHADRAFT_2583 [Nectria haematococca mpVI 77-13-4]
  misc_feature (1)..(504): NCBI GI: 156051912 Blast Desc: SS1G_07363 [Sclerotinia sclerotiorum 1980] gi|154705141|gb|EDO04880.1| SS1G_07363 [Sclerotinia sclerotiorum 1980]
  misc_feature (1)..(506): NCBI GI: 171685978 Blast Desc: protein product [Podospora anserina] gi|170942950|emb|CAP68603.1| protein product [Podospora anserina]
  misc_feature (1)..(504): NCBI GI: 154289963 Blast Desc: BC1G_15882 [Botryotinia fuckeliana B05.10] gi|150848515|gb|EDN23708.1| BC1G_15882 [Botryotinia fuckeliana B05.10]
  misc_feature (1)..(505): NCBI GI: 261354256 Blast Desc: conserved [Verticillium albo-atrum VaMs.102]
  misc_feature (1)..(509): NCBI GI: 85086895 Blast Desc: NCU00308 [Neurospora crassa OR74A] gi|28918874|gb|EAA28543.1| conserved [Neurospora crassa OR74A]
  misc_feature (1)..(502): NCBI GI: 145615605 Blast Desc: MGG_05721 [Magnaporthe grisea 70-15] gi|145022415|gb|EDK06435.1| MGG_05721 [Magnaporthe grisea 70-15]
  misc_feature (1)..(523): NCBI GI: 70996644 Blast Desc: NOL1/NOP2/sun domain protein [Aspergillus fumigatus Af293] gi|66850712|gb|EAL91039.1| NOL1/NOP2/sun domain protein, [Aspergillus fumigatus Af293]
  misc_feature (1)..(523): NCBI GI: 159131813 Blast Desc: NOL1/NOP2/sun domain protein, [Aspergillus fumigatus A1163]
MSLYHETADILSAPTSTGGNLKTRIFSNKSLKSPSQQIYALAIETCKWSSVLKEVIDASELLRHERKLTPLLSLLLTHDFLLAKKGIALPATHGLRQSIERHKGRLTSEFTRARLRRKAGSIDALRDIISLEFLGGAGRSPRWVRINTIKTTLQEQLDTTFKDFTKVSDVKDVVGSASKCLYVDEHVPNLLGLSPGFEIVKTLAYSSGAIILQDKASCFPAYLLDPQPEDGDVIDSCAAPGNKTTHVAAIVRSKAPAGQTCPRRVHACEKDLRRAQILQKMVNLAGANEITELSLGQDFLKLDPTLDFYSNVGALLLDPSCSGSGIVGRDSMPTIHLPDLPTTGNKGPAIDKNRKRKREDTSNAAEEKPEQVLIDDDGQETVLSSKKELRTRLDALASFQLTLLLHAFTFPAARRVTYSTCSIHAEENEQVVLKALQSPVGKARGWKIMKREQQVEGMRKWPVRGDLEASNGNAEVSEACIRSYQDDGLGVMGFFVAGFVRDGTVDETVPSSEAASTDSEADDRKHSSKKKKPVPERSYRMQQKWGYASSDSDDLPTGLQQKKGSTNWQKYREEYVEPAKDSDEAFGDEWGGFDD

SEQ ID NO: 38670 - DNA, 2125 bp, Muscodor strobelii
  misc_feature: SGI EST ID NO. CUFF.92995.0
  misc_feature: Variant of the nucleotide sequence at SEQ ID NO 38668
cgccacgtgcattccagggtccaattggaccaccgtacaagtcacctggcggccagcactgtacctacagcctgtgatggcatgtatctgttgtaaatcttatcgcaacatttactcttatcggaaatttccaagtttcgttccgctcgccagttgcacattgcgcgtcgtctactgggattgattcgaatgactgagagagagagagagcactgcatgagtgtaaatttagttatgcactcgcagaaatctgctgcacatgtctctctatcacgagacagctgacattctgtcggctccgacatcgactggcggtaacctgaagaccaggatcttcagcaacaagagcctcaagtcgccttcacagcagatatacgctttggcaatagagacctgtaaatggagttctgtgcttaaagaagtcattgacgcatccgagcttctccgccacgagcgcaagctaactccactactctcacttctcctcactcatgatttcctgttagcgaagaagggaatcgcattacctgcgactcacggtctcaggcagtctatagaacgtcacaaaggacgtctcacctcagaattcacccgagctcgattgcggaggaaagctgggtccatcgacgcattacgagatatcatctcgcttgagtttctaggcggggccggacgatctccgcgatgggttcgcatcaacaccatcaagacgacccttcaggaacagcttgatacgacgttcaaggattttacaaaggtctcggatgtgaaagatgtagttggttcggcttctaagtgcctctatgtcgatgaacatgtgccgaacttactgggtttgtcgcccggttttgagatcgtcaagacactagcgtatagctccggtgctattattttacaggataaggcatcatgttttccggcgtacctactagatccacaacccgaagatggagatgttatcgactcttgtgccgctccaggaaacaagactacgcatgtggctgcaatagtcaggtcgaaggcacccgctggtcagacatgtccgcgaagagtccacgcgtgtgaaaaggacttgagaagagcacaaattctacagaagatggtgaacctggccggggcaaatgaaataacggaactcagccttggtcaagattttcttaagctggacccaacattggatttctatagcaatgttggtgctctccttttggatccgagctgttccggcagcggcatcgtaggcagagacagcatgcctactattcatttgccagatctgcctaccacaggcaacaaaggaccagcgattgacaagaaccgcaaacggaagcgagaagacacgtcgaacgcagcggaggagaagccagagcaagtccttattgacgacgatggacaagagaccgttctctcgtcgaagaaagagcttaggactcgacttgatgccttagcatcattccaactcacgttactgcttcacgcattcacgtttcccgcagcgcgccgcgtcacttactcaacgtgctctatacacgctgaggagaacgagcaagtggtcttgaaagctctacagtcacctgtaggtaaagccaggggatggaaaatcatgaagcgtgagcagcaggttgagggaatgcggaagtggccagttcgcggtgatttagaagctagtaacgggaatgcagaggtctctgaggcgtgtattaggagttatcaggatgatggacttggtgtcatggggttcttcgttgcggggtttgtgcgtgatgggactgttgacgagacagtgccatcgtctgaggcggctagcacagactcagaggcggatgatagaaagcattcatcgaaaaagaagaagccggtaccggagcgtagttatagaatgcaacagaagtggggatatgcatcgtcagattcggatgaccttcctaccggattgcaacaaaagaagggctcaacgaactggcagaagtatcgagaggaatatgttgaacccgctaaggatagcgacgaggcatttggagatgaatggggtggattcgacgactagaactctttccaggcctcaagtatcaagtagagacgacaaatatctacctagctataaagacatgtgcgtcaattcaaa

SEQ ID NO: 38671 - DNA, 2979 bp, Muscodor strobelii
  misc_feature: SGI cDNA ID NO. 573441
  misc_feature: Encodes the peptide sequence at SEQ ID NO 38672
atgtcctctccaacaacgaaagacgacgatgacgtcttccacatcgccccgccgccgtaccacgcatacgcgaagtcttcaaaatggccgcgcgtaaatcgccgatatggcgggcttagaaatattgcattagctatcgcgctcacaatccttggattatggacttacctctcaggtagtaacagcccagagtcacgaaatgaagcgctatcggagttcgatactcgtgtgctggaagaaggacttcagcgctgcagagctagagaccgcttcccgccaacgcctgatccgtcatcccggactgagaaccctcgctggaatgctgcaaaagggcagaaaggcacgattatcttaagaaacgcgacgttgttcgatggggagaagtttattaatgggtttgttgatattgtgtttcgggaggggttgatcattgctgtcacgcccataggcgaagataacacgataccgagagaggaggtggagggagaagggagcgaggtaaaagagtatgatctgggaggcaaatgggtcactcctgggttggtcgatatgcactcgcatcatatgctcggaacttggcctgtttggggggaatttgatggcggcggcaatgaaatcaatcctctcttcgggcccctaacgccctttgtgaaggtcaaggaatcactcaaagcctacgacatcgcaacacagcatatcgcagcgggtggtgtcacttcttcgctcctgattcccggatctgcaaacattatgggcggtgagggtacagccgttaaaaatgttatcaagtccggagaaacgggagagtatgttgttgaggaaatgctccttgagcacggtatccccgttgaggatcgtagacgatatatgaagatggcgtgcggcgagaacccaagtggactgtatcagcacacgcgtatgggtcttgcgtggatgttgcgcaaacatcttgctcatgcaaaggatgtcattgaaaagcaggatcaatggtgtgcttccgcacacgaaactgaaagcatgacagcaacggagcgaaagagggttgtgagcgagaatgcaaagtatcctgatgacatcgagctcgagtccacgattggcttgatacgggggcgagttgctatgcataatcattgttacgaacctgaagacttcgagactatgatgggtgttgtgcatgaagctggaatccacgtgaaggctttccatcatgcaattgaggcatggcaggtaccaaagatgctcaaaagttatgaacctaacatcaccgctgctctgtttgcagagacaggattttacaaggtggaggcgtactcaccaaacttatacgcgggtgccatcctcgactcttatggcataccggtagcatacaagtcggaccatggcagtgaagaattaaatgcaagatacattctgtcacaagcatcggtcgggcacgcatttcaattaccggctgaaaaggccctgcaagctgtaacgtctgtcccagccaaagcaatagacttgtcacacagaatcggctatgcgcgccctggctacgatgcagatctcgttgtatgggatgccaaccctctctctgtaggggctacgcctctgcaagtctttattgatggcgtggctacattagacaatgagactgtcaagaagtcaatgggatcttcgctgggagcaaagccgatcacagcgaccactcctgaaccacagccgaggatcaggaaaatggaaaaagagaaaccgattctttgctctcagggaaacgagcaggatttcattatcacgggtatccggaaatcattcctggaagacagtccaatgtccgaagaaacagcgtctgcatcaagcactgtcaatttgacactggtagtttcgaacggcgatgtcatttgtctcggaacatcacaggcgtgcgagacagccatcgcaacaaccaggatagacgctgtaaaaattcatctcaacaacggacatttattgcctggtctcacagcagtgtctcacagcctgggcataatcgagatcgagcttcagccagagaccggcaccggttacacaagaatgaaagatgtgatctccccgttaagcgtcgactacgctaaatatggagtctcccttgacggcaaagcgtttgctcgggcgcgtctaggaggcgtcacaagggcggtaaccgctccgcgtttcccgtatgacaaagcgggcatgctccagggcgtttcggtcgggattagaacgagtggcaagaagggtactctcaacggcggcattttcaaagatgaagtgggcttgcacatggtattcgggcttagtaacagggccgaagggagcgtgagccaggccgttagtaacctgcgcttgatactcaagcagaacaaagggaaaggaaatgcaagcgcgtatggtgcagtcgctgatgggttaatgccactgctcgttaatgcgccgagtgtggctattgcacagcaaatgattgctatcaaaagggacttcccagcggtaaaattggttctcaacggaggacactcagctcccctggttgcggatgacctggcaaagtacgatatacctgtcttacttacggctacgagaccggcgccgacgagttgggattacaaagatgtgttgtcaggcccacctcttactcgcagtcctgcagatattcttactgaggccggggtgaagtttgcgatctctgtcgcaggtggcataccgcaaggtgattcgcgcatccacgatttgctcctcgaagcaagctgggcagcgaaatatgcccgcctcaacgagtcggaaaccgttcgccttgtatctaaaaacgtagaagaaatcctaggtcttgcatcaagtagggatatcgtggtatgggagaactctccatttcaatatggtggtaccgtagttctagcacttgaggatgatgtagagggaaaacttggacttggaacatgctggccggatgagcacttcccttcggaaacacaagtcgaatga

SEQ ID NO: 38672 - protein, 992 aa, Muscodor strobelii
  misc_feature: SGI Peptide ID NO. 573441
  misc_feature (176)..(520): Pfam Id: PF01979 Pfam Desc: Amidohydrolase family
  misc_feature (480)..(520): Pfam Id: PF01979 Pfam Desc: Amidohydrolase family
  misc_feature (482)..(518): Pfam Id: PF07969 Pfam Desc: Amidohydrolase family
  misc_feature (42)..(981): NCBI GI: 156061998 Blast Desc: SS1G_01113 [Sclerotinia sclerotiorum 1980] gi|154696451|gb|EDN96189.1| SS1G_01113 [Sclerotinia sclerotiorum 1980]
  misc_feature (47)..(982): NCBI GI: 212540810 Blast Desc: conserved [Penicillium marneffei ATCC 18224] gi|210067859|gb|EEA21951.1| conserved [Penicillium marneffei ATCC 18224]
  misc_feature (74)..(982): NCBI GI: 238488387 Blast Desc: conserved [Aspergillus flavus NRRL3357] gi|220697819|gb|EED54159.1| conserved [Aspergillus flavus NRRL3357]
  misc_feature (34)..(982): NCBI GI: 242800649 Blast Desc: conserved [Talaromyces stipitatus ATCC 10500] gi|218716976|gb|EED16397.1| conserved [Talaromyces stipitatus ATCC 10500]
  misc_feature (40)..(969): NCBI GI: 145247058 Blast Desc: An12g07250 [Aspergillus niger] gi|134080505|emb|CAK46353.1| protein product [Aspergillus niger]
  misc_feature (134)..(981): NCBI GI: 154295792 Blast Desc: BC1G_12899 [Botryotinia fuckeliana B05.10] gi|150843932|gb|EDN19125.1| BC1G_12899 [Botryotinia fuckeliana B05.10]
  misc_feature (82)..(963): NCBI GI: 71022529 Blast Desc: UM05347.1 [Ustilago maydis 521] gi|46101363|gb|EAK86596.1| UM05347.1 [Ustilago maydis 521]
  misc_feature (35)..(962): NCBI GI: 190348598 Blast Desc: PGUG_05176 [Pichia guilliermondii ATCC 6260]
  misc_feature (35)..(962): NCBI GI: 146412370 Blast Desc: PGUG_05176 [Pichia guilliermondii ATCC 6260]
  misc_feature (82)..(941): NCBI GI: 170097768 Blast Desc: carbohydrate esterase family 9 protein [Laccaria bicolor S238N-H82] gi|164644541|gb|EDR08790.1| carbohydrate esterase family 9 protein [Laccaria bicolor S238N-H82]
MSSPTTKDDDDVFHIAPPPYHAYAKSSKWPRVNRRYGGLRNIALAIALTILGLWTYLSGSNSPESRNEALSEFDTRVLEEGLQRCRARDRFPPTPDPSSRTENPRWNAAKGQKGTIILRNATLFDGEKFINGFVDIVFREGLIIAVTPIGEDNTIPREEVEGEGSEVKEYDLGGKWVTPGLVDMHSHHMLGTWPVWGEFDGGGNEINPLFGPLTPFVKVKESLKAYDIATQHIAAGGVTSSLLIPGSANIMGGEGTAVKNVIKSGETGEYVVEEMLLEHGIPVEDRRRYMKMACGENPSGLYQHTRMGLAWMLRKHLAHAKDVIEKQDQWCASAHETESMTATERKRVVSENAKYPDDIELESTIGLIRGRVAMHNHCYEPEDFETMMGVVHEAGIHVKAFHHAIEAWQVPKMLKSYEPNITAALFAETGFYKVEAYSPNLYAGAILDSYGIPVAYKSDHGSEELNARYILSQASVGHAFQLPAEKALQAVTSVPAKAIDLSHRIGYARPGYDADLVVWDANPLSVGATPLQVFIDGVATLDNETVKKSMGSSLGAKPITATTPEPQPRIRKMEKEKPILCSQGNEQDFIITGIRKSFLEDSPMSEETASASSTVNLTLVVSNGDVICLGTSQACETAIATTRIDAVKIHLNNGHLLPGLTAVSHSLGIIEIELQPETGTGYTRMKDVISPLSVDYAKYGVSLDGKAFARARLGGVTRAVTAPRFPYDKAGMLQGVSVGIRTSGKKGTLNGGIFKDEVGLHMVFGLSNRAEGSVSQAVSNLRLILKQNKGKGNASAYGAVADGLMPLLVNAPSVAIAQQMIAIKRDFPAVKLVLNGGHSAPLVADDLAKYDIPVLLTATRPAPTSWDYKDVLSGPPLTRSPADILTEAGVKFAISVAGGIPQGDSRIHDLLLEASWAAKYARLNESETVRLVSKNVEEILGLASSRDIVVWENSPFQYGGTVVLALEDDVEGKLGLGTCWPDEHFPSETQVE

SEQ ID NO: 38673 - DNA, 2772 bp, Muscodor strobelii
  misc_feature: SGI EST ID NO. CUFF.92992.0
  misc_feature: Variant of the nucleotide sequence at SEQ ID NO 38671
tcaaggaatcactcaaagcctacgacatcgcaacacagcatatcgcagcgggtggtgtcacttcttcgctcctgattcccggatctgcaaacattatgggcggtgagggtacagccgttaaaaatgttatcaagtccggagaaacgggagagtatgttgttgaggaaatgctccttgagcacggtatccccgttgaggatcgtagacgatatatgaagatggcgtgcggcgagaacccaagtggactgtatcagcacacgcgtatgggtcttgcgtggatgttgcgcaaacatcttgctcatgcaaaggatgtcattgaaaagcaggatcaatggtgtgcttccgcacacgaaactgaaagcatgacagcaacggagcgaaagagggttgtgagcgagaatgcaaagtatcctgatgacatcgagctcgagtccacgattggcttgatacgggggcgagttgctatgcataatcattgttacgaacctgaagacttcgagactatgatgggtgttgtgcatgaagctggaatccacgtgaaggctttccatcatgcaattgaggcatggcaggtaccaaagatgctcaaaagttatgaaccgtgagtattcaactccgtcaattgcaattactgttctgaaaacgatgcagtaacatcaccgctgctctgtttgcagagacaggattttacaaggtggaggcgtactcaccaaacttatacgcgggtgccatcctcgactcttatggcataccggtagcatacaagtcggaccatggcagtgaagaattaaatgcaagatacattctgtcacaagcatcggtcgggcacgcatttcaattaccggctgaaaaggccctgcaagctgtaacgtctgtcccagccaaagcaatagacttgtcacacagaatcggctatgcgcgccctggctacgatgcagatctcgttgtatgggatgccaaccctctctctgtaggggctacgcctctgcaagtctttattgatggcgtggctacattagacaatgagactgtcaagaagtcaatgggatcttcgctgggagcaaagccgatcacagcgaccactcctgaaccacagccgaggatcaggaaaatggaaaaagagaaaccgattctttgctctcagggaaacgagcaggatttcattatcacgggtatccggaaatcattcctggaagacagtccaatgtccgaagaaacagcgtctgcatcaagcactgtcaatttgacactggtagtttcgaacggcgatgtcatttgtctcggaacatcacaggcgtgcgagacagccatcgcaacaaccaggatagacgctgtaaaaattcatctcaacaacggacatttattgcctggtctcacagcagtgtctcacagcctgggcataatcgagatcgagcttcagccagagaccggcaccggttacacaagaatgaaagatgtgatctccccgttaagcgtcgactacgctaaatatggagtctcccttgacggcaaagcgtttgctcgggcgcgtctaggaggcgtcacaagggcggtaaccgctccgcgtttcccgtatgacaaagcgggcatgctccagggcgtttcggtcgggattagaacgagtggcaagaagggtactctcaacggcggcattttcaaagatgaagtgggcttgcacatggtattcgggcttagtaacagggccgaagggagcgtgagccaggccgttagtaacctgcgcttgatactcaagcagaacaaagggaaaggaaatgcaagcgcgtatggtgcagtcgctgatgggttaatgccactgctcgttaatgcgccgagtgtggctattgcacagcaaatgattgctatcaaaagggacttcccagcggtaaaattggttctcaacggaggacactcagctcccctggtacgtgtcattcggtctctagtatgagccagtactctgcgttgtccttgatttctgaccagtgagaaaggttgcggatgacctggcaaagtacgatatacctgtcttacttacggctacgagaccggcgccgacgagttgggattacaaagatgtgttgtcaggcccacctcttactcgcagtcctgcagatattcttactgaggccggggtgaagtttgcgatctctgtcgcaggtggcataccgcaaggtgattcgcgcatccacgatttgctcctcgaagcaagctgggcagcgaaatatgcccgcctcaacgagtcggaaaccgttcgccttgtatctaaaaacgtagaagaaatcctaggtcttgcatcaagtagggatatcgtggtatgggagaactctccatttcaatatggtggtaccgtagttctagcacttgaggatgatgtagagggaaaacttggacttggaacatgctggccggatgagcacttcccttcggaaacacaagtcgaatgacgtgcgaccagtcagactgcagaacattcctactgactggatgtgctgcaggaaagcgacacaatggttcggatattgatgcatggcttgcagcacacaaaggggaaacaagttttcaacgtggagaagacttggaatggtttgttgtcactgccctgatgtcttacatggccacagcttgttgtaaataccccttgatgtgtttgctgtcccggggctgaaaactaattggttggcggccgggatcttccagccaggcgcgcgcgcaaaagaggtgggtggattccgcgtcaacaagataatctaccttagcagcacaacttactca

SEQ ID NO: 38674 - DNA, 1563 bp, Muscodor strobelii
  misc_feature: SGI cDNA ID NO. 573442
  misc_feature: Reduced expression when VOC is produced
  misc_feature: Encodes the peptide sequence at SEQ ID NO 38675
atgaaattcactatttctacaacattagccactctggccgccgtggccttagctgcaaaagatggtcggactttcgccgtccttcgtttcaatggcgacgggttcttgactgagggccccatggaccccatcgtcaaccccggcgagcaatccacccattaccacggaattatgggtggaagcgcgttctctaccacaacttccggcgacgacctgttgagctcaaagtgcaccacggctaagattgccaacgatcatagcaactactggataccatctctcttcttccaagatcccaacaacgggacgatgcagaaagtaccattgttctacatgaacgtttattatttcttcgaggctacggacgacgaaatcaagcccttccctgttggcctgaagatgttgactggagactcaaagtcaaggaccgttcctgaatctgggggtaatctcaacctcgaccctgacagtggagttgctatcaacgcagtccagtggacatgccctcgttcgagctataacccaccttcgtacccggtggattccgatggatcatctgccggcatcgtcgacaccaacaaccaaggatccggttcaggcttcccccttcagaagtgcgatggatacgcctcgcctcttcgccaggatatgcacttcccctcgtgctacaatcctaaggctggtcttgacgactataagaacaacatgaagttcccgtcgaacgttggattcaagcaaaactgccctgaaggctggattcatgtgccacacatcttctacgaagtttattggaacacgcctcttttcgatgactactggaccgcaaatggagagactcaacctttcgttcttgccacaggtgatgccactggttatagctcacatggtgacttcatctccggctgggatcaaaacaccctgcagaccatcattgacacttgtgatgctggtgattcgggtatggacaagtgcactaacatcccaggcggtcttagcacagacaatgactgcaagatcgagcctgctttcggaagtgtgctcaagaatggtcagatccttcagggtctccctgttgtcggcgatgatattaccggatggggtcgggcaggtacagggtcgtcgagcggatccggatcttccggttcatcaagctcggagtcgagccctgccaccacttccgccgctgcacctagctcttcgttcgagcctacctccaccaaggctgccgcaaccacaactaccgcttctactgtagatgttgaggctgtaccttcttcaacagagtctgagccaactaccaagcccacctcaaccggtggtgctttcattcagactggctctgatgcccctgcgccaactgagactccttcctctcaccacgagcacggtcacggcaaccctaatgtccagacagtttgggattacgtgaccgtgaccaagaccacgaccgtgatggaggcccagcccacagcaaaggctatgcaccgtcgtgttccgcaccacactcacggctatgccaagcgacacctgggcaaagctggcagcttcgctgctcgtcgataa

SEQ ID NO: 38675 - protein, 520 aa, Muscodor strobelii
  misc_feature: SGI Peptide ID NO. 573442
  misc_feature (42)..(302): Pfam Id: PF09362 Pfam Desc: Domain of function (DUF1996)
  misc_feature (1)..(512): NCBI GI: 256733185 Blast Desc: NECHADRAFT_39031 [Nectria haematococca mpVI 77-13-4]
  misc_feature (1)..(512): NCBI GI: 46124795 Blast Desc: FG06775.1 [Gibberella zeae PH-1]
  misc_feature (1)..(487): NCBI GI: 171685980 Blast Desc: protein product [Podospora anserina] gi|170942951|emb|CAP68604.1| protein product [Podospora anserina]
  misc_feature (20)..(340): NCBI GI: 85086899 Blast Desc: NCU00309 [Neurospora crassa OR74A] gi|28918875|gb|EAA28544.1| [Neurospora crassa OR74A]
  misc_feature (20)..(370): NCBI GI: 116207386 Blast Desc: CHGG_02986 [Chaetomium globosum CBS 148.51] gi|88183583|gb|EAQ91051.1| CHGG_02986 [Chaetomium globosum CBS 148.51]
  misc_feature (23)..(346): NCBI GI: 156042880 Blast Desc: SS1G_11239 [Sclerotinia sclerotiorum 1980] gi|154695624|gb|EDN95362.1| SS1G_11239 [Sclerotinia sclerotiorum 1980]
  misc_feature (66)..(347): NCBI GI: 154313464 Blast Desc: BC1G_05429 [Botryotinia fuckeliana B05.10] gi|150849498|gb|EDN24691.1| BC1G_05429 [Botryotinia fuckeliana B05.10]
  misc_feature (14)..(493): NCBI GI: 39941558 Blast Desc: MGG_05690 [Magnaporthe grisea 70-15] gi|145022383|gb|EDK06403.1| MGG_05690 [Magnaporthe grisea 70-15]
  misc_feature (1)..(343): NCBI GI: 212543843 Blast Desc: WSC domain protein, [Penicillium marneffei ATCC 18224] gi|210066983|gb|EEA21076.1| WSC domain protein, [Penicillium marneffei ATCC 18224]
  misc_feature (26)..(357): NCBI GI: 169865890 Blast Desc: CC1G_08921 [Coprinopsis cinerea okayama7#130] gi|116499414|gb|EAU82309.1| CC1G_08921 [Coprinopsis cinerea okayama7#130]
  misc_feature: Useful for introducing or modulating the production of volatile compounds
MKFTISTTLATLAAVALAAKDGRTFAVLRFNGDGFLTEGPMDPIVNPGEQSTHYHGIMGGSAFSTTTSGDDLLSSKCTTAKIANDHSNYWIPSLFFQDPNNGTMQKVPLFYMNVYYFFEATDDEIKPFPVGLKMLTGDSKSRTVPESGGNLNLDPDSGVAINAVQWTCPRSSYNPPSYPVDSDGSSAGIVDTNNQGSGSGFPLQKCDGYASPLRQDMHFPSCYNPKAGLDDYKNNMKFPSNVGFKQNCPEGWIHVPHIFYEVYWNTPLFDDYWTANGETQPFVLATGDATGYSSHGDFISGWDQNTLQTIIDTCDAGDSGMDKCTNIPGGLSTDNDCKIEPAFGSVLKNGQILQGLPVVGDDITGWGRAGTGSSSGSGSSGSSSSESSPATTSAAAPSSSFEPTSTKAAATTTTASTVDVEAVPSSTESEPTTKPTSTGGAFIQTGSDAPAPTETPSSHHEHGHGNPNVQTVWDYVTVTKTTTVMEAQPTAKAMHRRVPHHTHGYAKRHLGKAGSFAARR

SEQ ID NO: 38676 - DNA, 915 bp, Muscodor strobelii
  misc_feature: SGI cDNA ID NO. 573443
  misc_feature: Encodes the peptide sequence at SEQ ID NO 38677
atgcacttcccctcgtgctacaatcctaaggctggtcttgacgactataagaacaacatgaagttcccgtcgaacgttggattcaagcaaaactgccctgaaggctggattcatgtgccacacatcttctacgaagtttattggaacacgcctcttttcgatgactactggaccgcaaatggagagactcaacctttcgttcttgccacaggtgatgccactggttatagctcacatggtgacttcatctccggctgggatcaaaacaccctgcagaccatcattgacacttgtgatgctggtgattcgggtatggacaagtgcactaacatcccaggcggtcttagcacagacaatgactgcaagatcgagcctgctttcggaagtgtgctcaagaatggtcagatccttcagggtctccctgttgtcggcgatgatattaccggatggggtcgggcaggtacagggtcgtcgagcggatccggatcttccggttcatcaagctcggagtcgagccctgccaccacttccgccgctgcacctagctcttcgttcgagcctacctccaccaaggctgccgcaaccacaactaccgcttctactgtagatgttgaggctgtaccttcttcaacagagtctgagccaactaccaagcccacctcaaccggtggtgctttcattcagactggctctgatgcccctgcgccaactgagactccttcctctcaccacgagcacggtcacggcaaccctaatgtccagacagtttgggattacgtgaccgtgaccaagaccacgaccgtgatggaggcccagcccacagcaaaggctatgcaccgtcgtgttccgcaccacactcacggctatgccaagcgacacctgggcaaagctggcagcttcgctgctcgtcgataa

SEQ ID NO: 38677 - protein, 304 aa, Muscodor strobelii
  misc_feature: SGI Peptide ID NO. 573443
  misc_feature (2)..(86): Pfam Id: PF09362 Pfam Desc: Domain of function (DUF1996)
  misc_feature (1)..(296): NCBI GI: 256733185 Blast Desc: NECHADRAFT_39031 [Nectria haematococca mpVI 77-13-4]
  misc_feature (1)..(296): NCBI GI: 46124795 Blast Desc: FG06775.1 [Gibberella zeae PH-1]
  misc_feature (2)..(131): NCBI GI: 154313464 Blast Desc: BC1G_05429 [Botryotinia fuckeliana B05.10] gi|150849498|gb|EDN24691.1| BC1G_05429 [Botryotinia fuckeliana B05.10]
  misc_feature (1)..(271): NCBI GI: 171685980 Blast Desc: protein product [Podospora anserina] gi|170942951|emb|CAP68604.1| protein product [Podospora anserina]
  misc_feature (1)..(151): NCBI GI: 156042880 Blast Desc: SS1G_11239 [Sclerotinia sclerotiorum 1980] gi|154695624|gb|EDN95362.1| SS1G_11239 [Sclerotinia sclerotiorum 1980]
  misc_feature (1)..(124): NCBI GI: 85086899 Blast Desc: NCU00309 [Neurospora crassa OR74A] gi|28918875|gb|EAA28544.1| [Neurospora crassa OR74A]
  misc_feature (1)..(154): NCBI GI: 116207386 Blast Desc: CHGG_02986 [Chaetomium globosum CBS 148.51] gi|88183583|gb|EAQ91051.1| CHGG_02986 [Chaetomium globosum CBS 148.51]
  misc_feature (1)..(277): NCBI GI: 39941558 Blast Desc: MGG_05690 [Magnaporthe grisea 70-15] gi|145022383|gb|EDK06403.1| MGG_05690 [Magnaporthe grisea 70-15]
  misc_feature (30)..(294): NCBI GI: 261354257 Blast Desc: WSC domain-containing protein [Verticillium albo-atrum VaMs.102]
  misc_feature (1)..(108): NCBI GI: 169615072 Blast Desc: SNOG_10690 [Phaeosphaeria nodorum SN15] gi|160702879|gb|EAT82084.2| SNOG_10690 [Phaeosphaeria nodorum SN15]
MHFPSCYNPKAGLDDYKNNMKFPSNVGFKQNCPEGWIHVPHIFYEVYWNTPLFDDYWTANGETQPFVLATGDATGYSSHGDFISGWDQNTLQTIIDTCDAGDSGMDKCTNIPGGLSTDNDCKIEPAFGSVLKNGQILQGLPVVGDDITGWGRAGTGSSSGSGSSGSSSSESSPATTSAAAPSSSFEPTSTKAAATTTTASTVDVEAVPSSTESEPTTKPTSTGGAFIQTGSDAPAPTETPSSHHEHGHGNPNVQTVWDYVTVTKTTTVMEAQPTAKAMHRRVPHHTHGYAKRHLGKAGSFAARR

SEQ ID NO: 38678 - DNA, 1497 bp, Muscodor strobelii
  misc_feature: SGI cDNA ID NO. 573444
  misc_feature: Elevated expression when VOC is produced
  misc_feature: Encodes the peptide sequence at SEQ ID NO 38679
atgaagcacgtcatcttatacctgagctgcgcatcgcacttagcactgagtgtgggagcagccgcaagttacccgcccattccaacggacttgactactcctgttcaacaacgtattgccatcgttggccccgatgctatctctatcggctggaacacataccaaaagactacgcaaccgtgtgtccagtatggtacatcgagcgatagtctcaccttactcgcgtgctcaaccgaatcagtcacatatcccacttcgcgcacatacgcaaactcggtaatattatccgacttgaaaccagcaacgacatattattacaagattacatcaacgaactcaactgttggtcactttctcagtccccgaccagcaggcgatacaggatcattctcactcaatgccgtcattgatctcggtgtatacggcgcagacggatatacaattgcccaagataaagcaaaacgagacacaatcccctcaatcgatccttcgcttaatcatacaacgattggtcgcttagctaatacgatcaacgactatgagttcatagtgcatccaggagacttagcgtatgctgacgattggattgaaaggtcgaagaatctgttagacagtacgaatgcatatgctgccatcctggagcaattctacggccaactcgctccaattgccgggcgaaagccgtatatggtcggacctggaaaccatgaagcgaactgttgggaagtcccgcatttatctgctgtatgcgcgaagggacagaagaatttcacggattacatgaatcgcttcgcagatctcatgcctaccacattcccctcaacatcgacggatgatgatgcacgagtatccgccaatgcggcgaatcttcttgctaacccgcccttttggtactcttttgaatacggcatgttgcacttcgtcatgattgatactgagacggactttcaggatgctcctgacggaccggatggctctgcaggtctgaacagcggtccatttgggggcgctaatcagcagcttgagttccttgaggcggacctcaagtcggttgaccgctctatcacgccgtgggtagttgtcggcggccatcgcccttggtacacgacaggcggaagtggttgcgggccttgtcaggaggcattcgaacctctgttgtacaaatacggagtcgatcttgcgatcttcgggcatgtccataattcgcagcgatttgcgccatcattcaacggaactgcggaccctgcgggcctacaaaatccaatagcaccgatgtacatcgttgctggtggcgctggaaatattgagggcatgagcgcagtaggaacgaaacctgctaacaatgctttcgcgtatgcggacgatttcagttatgcgagagtgacgttcttggatcctaatgagttgagagttcagtttattcgctcgatttcgggcgagatcctggacgagagtgtgctgtataaggagcatgccgagagatttgtcgcgcagtga

SEQ ID NO: 38679 - protein, 498 aa, Muscodor strobelii
  misc_feature: SGI Peptide ID NO. 573444
  misc_feature (130)..(402): Pfam Id: PF00149 Pfam Desc: Calcineurin-like phosphoesterase
  misc_feature (179)..(402): Pfam Id: PF00149 Pfam Desc: Calcineurin-like phosphoesterase
  misc_feature (9)..(498): NCBI GI: 256721766 Blast Desc: NECHADRAFT_87328 [Nectria haematococca mpVI 77-13-4]
  misc_feature (1)..(498): NCBI GI: 46117324 Blast Desc: FG04504.1 [Gibberella zeae PH-1]
  misc_feature (8)..(498): NCBI GI: 119488524 Blast Desc: acid phosphatase, [Neosartorya fischeri NRRL 181] gi|119410870|gb|EAW20815.1| acid phosphatase, [Neosartorya fischeri NRRL 181]
  misc_feature (14)..(498): NCBI GI: 85104495 Blast Desc: NCU08643 [Neurospora crassa OR74A] gi|28923312|gb|EAA32510.1| NCU08643 [Neurospora crassa OR74A]
  misc_feature (3)..(498): NCBI GI: 67523809 Blast Desc: AN2360.2 [Aspergillus nidulans FGSC A4] gi|40745315|gb|EAA64471.1| AN2360.2 [Aspergillus nidulans FGSC A4] gi|259487762|tpe|CBF86687.1| TPA: acid phosphatase, nidulans
  misc_feature (12)..(498): NCBI GI: 121709667 Blast Desc: acid phosphatase, [Aspergillus clavatus NRRL 1] gi|119400633|gb|EAW11058.1| acid phosphatase, [Aspergillus clavatus NRRL 1]
  misc_feature (4)..(498): NCBI GI: 146324566 Blast Desc: acid phosphatase [Aspergillus fumigatus Af293] gi|129555408|gb|EBA27207.1| acid phosphatase, [Aspergillus fumigatus Af293]
  misc_feature (14)..(498): NCBI GI: 238490222 Blast Desc: acid phosphatase, [Aspergillus flavus NRRL3357] gi|220696761|gb|EED53102.1| acid phosphatase, [Aspergillus flavus NRRL3357]
  misc_feature (20)..(498): NCBI GI: 115491493 Blast Desc: conserved [Aspergillus terreus NIH2624] gi|114197234|gb|EAU38934.1| conserved [Aspergillus terreus NIH2624]
  misc_feature (14)..(498): NCBI GI: 169772319 Blast Desc: [Aspergillus oryzae RIB40] gi|83768489|dbj|BAE58626.1| protein product [Aspergillus oryzae]
  misc_feature (89)..(489): SWISSPROT Homolog: EC 3.1.3.2 Acid phosphatase
  misc_feature: Useful for introducing or modulating the production of volatile compounds
MKHVILYLSCASHLALSVGAAASYPPIPTDLTTPVQQRIAIVGPDAISIGWNTYQKTTQPCVQYGTSSDSLTLLACSTESVTYPTSRTYANSVILSDLKPATTYYYKITSTNSTVGHFLSPRPAGDTGSFSLNAVIDLGVYGADGYTIAQDKAKRDTIPSIDPSLNHTTIGRLANTINDYEFIVHPGDLAYADDWIERSKNLLDSTNAYAAILEQFYGQLAPIAGRKPYMVGPGNHEANCWEVPHLSAVCAKGQKNFTDYMNRFADLMPTTFPSTSTDDDARVSANAANLLANPPFWYSFEYGMLHFVMIDTETDFQDAPDGPDGSAGLNSGPFGGANQQLEFLEADLKSVDRSITPWVVVGGHRPWYTTGGSGCGPCQEAFEPLLYKYGVDLAIFGHVHNSQRFAPSFNGTADPAGLQNPIAPMYIVAGGAGNIEGMSAVGTKPANNAFAYADDFSYARVTFLDPNELRVQFIRSISGEILDESVLYKEHAERFVAQ

SEQ ID NO: 38680 - DNA, 1701 bp, Muscodor strobelii
  misc_feature: SGI EST ID NO. CUFF.93070.0
  misc_feature: Variant of the nucleotide sequence at SEQ ID NO 38678
tgggcattggaaatgaacggctctcgattggaagctcacctgctgtaatatgaaattcgaagtatttaattattttacacaatgaagcacgtcatcttatacctgagctgcgcatcgcacttagcactgagtgtgggagcagccgcaagttacccgcccattccaacggacttgactactcctgttcaacaacgtattgccatcgttggccccgatgctatctctatcggctggaacacataccaaaagactacgcaaccgtgtgtccagtatggtacatcgagcgatagtctcaccttactcgcgtgctcaaccgaatcagtcacatatcccacttcgcgcacatacgcaaactcggtaatattatccgacttgaaaccagcaacgacatattattacaagattacatcaacgaactcaactgttggtcactttctcagtccccgaccagcaggcgatacaggatcattctcactcaatgccgtcattgatctcggtgtatacggcgcagacggatatacaattgcccaagataaagcaaaacgagacacaatcccctcaatcgatccttcgcttaatcatacaacgattggtcgcttagctaatacgatcaacgactatgagttcatagtgcatccaggagacttagcgtatgctgacgattggattgaaaggtcgaagaatctgttagacagtacgaatgcatatgctgccatcctggagcaattctacggccaactcgctccaattgccgggcgaaagccgtatatggtcggacctggaaaccatgaagcgaactgttgggaagtcccgcatttatctgctgtatgcgcgaagggacagaagaatttcacggattacatgaatcgcttcgcagatctcatgcctaccacattcccctcaacatcgacggatgatgatgcacgagtatccgccaatgcggcgaatcttcttgctaacccgcccttttggtactcttttgaatacggcatgttgcacttcgtcatgattgatactgagacggactttcaggatgctcctgacggaccggatggctctgcaggtctgaacagcggtccatttgggggcgctaatcagcagcttgagttccttgaggcggacctcaagtcggttgaccgctctatcacgccgtgggtagttgtcggcggccatcgcccttggtacacgacaggcggaagtggttgcgggccttgtcaggaggcattcgaacctctgttgtacaaatacggagtcgatcttgcgatcttcgggcatgtccataattcgcagcgatttgcgccatcattcaacggaactgcggaccctgcgggcctacaaaatccaatagcaccgatgtacatcgttgctggtggcgctggaaatattgagggcatgagcgcagtaggaacgaaacctgctaacaatgctttcgcgtatgcggacgatttcagttatgcgagagtgacgttcttggatcctaatgagttgagagttcagtttattcgctcgatttcgggcgagatcctggacgagagtgtgctgtataaggagcatgccgagagatttgtcgcgcagtgagtgacaatgatgacatgggtgatttggtggacgtacttagttactagactttgggtagttggttatgcttattaatcataacaatattttgcattggtctaatccatcgtatctgcacggaag

SEQ ID NO: 38681 - DNA, 915 bp, Muscodor strobelii
  misc_feature: SGI cDNA ID NO. 573445
  misc_feature: Encodes the peptide sequence at SEQ ID NO 38682
atgcgcgtcgttgtattcggaggctctggtgtccagggtgctgctcaggtcgctgcacttagtcgcgctggccatcatccagtttccgtgagccgatcacccaaaccaatcgaggtggacggcaagcaaatcgaaactgcagcggcagactttggagatgttgcagctacagaaaaggcattgaaagacgcggatgtcttgttcttgaatctaccttcaacgtcatttcagccttcagaaccggtcatcaatggcgcaaaggtaattggagaggccgtgctgaagaccccaagcgtaaaaatggtcgtcttcaacacgagcatgccagttccggacgagggacctgagattcattctcaggacgacaggcgacacattcgaggcctacttcgcgacatgggagtaccgctgatcagcattgaacctgttgtgttcttagacaatctacttgaaggctgggcgttaccacctgttcgcgatcgcgataccgttgtatactgccacaagccaactctagacgtttcctggatctgtcacgatgatatagcggcattgatgatagctgcgatggaaagaccccagcttattggccgcaattttgccgtcggaggacctgagactgtgcgactacctgttctcgcagaaaaggtctccaagggttgggggaagcccttgaagcacgagttccagacggttgacgatttctgcgataagattcagcaggcgatggagtcaagatcgaatatcgatgcaacgccgctgataaaacaaatgcatcgtgcttacacgttctacaacgaatcaccagcagagcctttcaagattgacatggggccggtattgaaggagcttccgtgcaagctcactacaatagaggaatgggcaagaacgcacccattgcccacaaaggtatga

SEQ ID NO: 38682 - protein, 304 aa, Muscodor strobelii
  misc_feature: SGI Peptide ID NO. 573445
  misc_feature (3)..(229): Pfam Id: PF05368 Pfam Desc: NmrA-like family
  misc_feature (2)..(301): NCBI GI: 261361086 Blast Desc: conserved [Verticillium albo-atrum VaMs.102]
  misc_feature (1)..(296): NCBI GI: 189197991 Blast Desc: conserved [Pyrenophora tritici-repentis Pt-1C-BFP] gi|187981281|gb|EDU47907.1| conserved [Pyrenophora tritici-repentis Pt-1C-BFP]
  misc_feature (1)..(303): NCBI GI: 84687151 Blast Desc: RB2654_23618 [Rhodobacterales bacterium HTCC2654] gi|84664922|gb|EAQ11404.1| RB2654_23618 [Rhodobacterales bacterium HTCC2654]
  misc_feature (2)..(300): NCBI GI: 254282839 Blast Desc: NmrA-like family protein [gamma proteobacterium NOR51-B] gi|219679042|gb|EED35391.1| NmrA-like family protein [gamma proteobacterium NOR51-B]
  misc_feature (1)..(298): NCBI GI: 284035016 Blast Desc: NmrA family protein [Spirosoma linguale DSM 74] gi|283814309|gb|ADB36147.1| NmrA family protein [Spirosoma linguale DSM 74]
  misc_feature (1)..(123): NCBI GI: 169620325 Blast Desc: SNOG_13364 [Phaeosphaeria nodorum SN15] gi|160704011|gb|EAT79248.2| SNOG_13364 [Phaeosphaeria nodorum SN15]
  misc_feature (92)..(299): NCBI GI: 158317129 Blast Desc: NmrA family protein [Frankia sp. EAN1pec] gi|158112534|gb|ABW14731.1| NmrA family protein [Frankia sp. EAN1pec]
  misc_feature (1)..(235): NCBI GI: 269794554 Blast Desc: nucleoside-diphosphate sugar epimerase [Sanguibacter keddieii DSM 10542] gi|269096739|gb|ACZ21175.1| nucleoside-diphosphate sugar epimerase [Sanguibacter keddieii DSM
  misc_feature (3)..(245): NCBI GI: 87121100 Blast Desc: hydroxylase [Marinomonas sp. MED121] gi|86163592|gb|EAQ64866.1| hydroxylase [Marinomonas sp. MED121]
  misc_feature (3)..(228): NCBI GI: 209549779 Blast Desc: NmrA family protein [Rhizobium leguminosarum bv. trifolii WSM2304] gi|209535535|gb|ACI55470.1| NmrA family protein [Rhizobium leguminosarum bv. trifolii WSM2304]
MRVVVFGGSGVQGAAQVAALSRAGHHPVSVSRSPKPIEVDGKQIETAAADFGDVAATEKALKDADVLFLNLPSTSFQPSEPVINGAKVIGEAVLKTPSVKMVVFNTSMPVPDEGPEIHSQDDRRHIRGLLRDMGVPLISIEPVVFLDNLLEGWALPPVRDRDTVVYCHKPTLDVSWICHDDIAALMIAAMERPQLIGRNFAVGGPETVRLPVLAEKVSKGWGKPLKHEFQTVDDFCDKIQQAMESRSNIDATPLIKQMHRAYTFYNESPAEPFKIDMGPVLKELPCKLTTIEEWARTHPLPTKV

SEQ ID NO: 38683 - DNA, 1797 bp, Muscodor strobelii
  misc_feature: SGI cDNA ID NO. 573446
  misc_feature: Encodes the peptide sequence at SEQ ID NO 38684
atggctctccacgaggacgttgagccttcgccaggcgcgtcagatcactcggatgctgagaagatgggccaaacgactcaccacgagcacaccgagattaacaccgaagttatgacacctctgggagtagaagatggaaaacttacgaaaaagactattttagcatttattgcgttatgtggtcaaatcaatgcctacatcatgactctcttgatcccctcgacaacactaccatatatcatcgctgacttgggtcctgaccctaactatccgtggatcactattacctggactctcggggctgcgatcatcgtatcgattggcggccgcctgtcagacatcttcggccggcgctatttcatgatcacaggtgccttaatatcaattgtcggcaccatcgtaggtgcaacaggacagagcatcaatcagatgatcgcctcaggtgtgttattcggtctcggaagtggatttcaagaactgtgttatgcctgcgtccaagaagtcgtacccaatcactggcgtgtgcgtgcagttggactccttgatctatcgaatcttatcgcttttagttcgcccgtcatctcatatgtcttcatcgcatttcagcctattggctggcgaggtgcatattggtttatgttctcgttccacgttttcgcctttgtgcttctattcttcttctacaaaccaccagactttgagatgaagcatcgcaatgaagggatatcgcgcctccgcctacttgcacaaatcgattggtttggcgtcttcttgttcgccgctgcggccgtcctgttccttctcgggctgaactttggtggtcgaacttatccgtggaagcatcccggaactctagtgccactaattgttggcttgctcctcttcgttgcttccggattctgggctgcttacaacaacctcagatatcctctgtttccccgaaagctgtttaagagagttagagaattcgacatggtgattgtagtgacctttgtcggaggcacgttatactatagcatgaacgttttgtggcctaagcaatcgcaagtcctctttattgggcccaatgatgtgatcttgcgcggcgtctacgccgttattttctcgaccggcacatggctcgctgctctgatcactgtcttcatttgctcccgactgcatcatgaaaagtggcagttgattggtttcaccattgtccaaaccgcgttgatcgcttcgatggcctctgtcggcatcgatgacaaggcgcaagctatcgccgtagtggttctcgccgctacatcaatcaccccaccgcaactactatcattcaccatgttatctttcggtattcaggatcaggaggatatgggaattgcatgtggtctcggtagtacgttccgtctcttaggcgggtctattgcaacggcactctacactgcgatctacaccaacaagttcaatgaagcacttccaggggagatgcgcaaagctatcgcagagtccagcgtggcttactcagacagtttgctcgccagcttaatcaaggccggcacaatcaacacggttgcagcctacaacgctgtgcaaggagcaactccggagctcattacacttgccgagaaagcgacaaaattggcatatgtgaaggggttcaacttagtctacttgatcagtattgcattcggcattgcagctataggtgcagctgcgtgcacagtgagtgtcgataggtcgaagaagaacaacgctcgcgctgttgttttgaagaacgagattcatgacaataagaatctagattcgacgaagattatttag

SEQ ID NO: 38684 - protein, 598 aa, Muscodor strobelii
  misc_feature: SGI Peptide ID NO. 573446
  misc_feature (58)..(469): Pfam Id: PF07690 Pfam Desc: Major Facilitator Superfamily
  misc_feature (22)..(594): Pfam Id: PF06609 Pfam Desc: Fungal trichothecene efflux pump (TRI12)
  misc_feature (77)..(571): Pfam Id: PF06609 Pfam Desc: Fungal trichothecene efflux pump (TRI12)
  misc_feature (10)..(598): NCBI GI: 261361085 Blast Desc: conserved [Verticillium albo-atrum VaMs.102]
  misc_feature (57)..(596): NCBI GI: 189192566 Blast Desc: conserved [Pyrenophora tritici-repentis Pt-1C-BFP] gi|187974228|gb|EDU41727.1| conserved [Pyrenophora tritici-repentis Pt-1C-BFP]
  misc_feature (2)..(597): NCBI GI: 169600817 Blast Desc: SNOG_03261 [Phaeosphaeria nodorum SN15] gi|111068872|gb|EAT89992.1| SNOG_03261 [Phaeosphaeria nodorum SN15]
  misc_feature (4)..(594): NCBI GI: 189208644 Blast Desc: trichothecene efflux pump [Pyrenophora tritici-repentis Pt-1C-BFP] gi|187976748|gb|EDU43374.1| trichothecene efflux pump [Pyrenophora tritici-repentis
  misc_feature (83)..(530): NCBI GI: 169614029 Blast Desc: SNOG_10149 [Phaeosphaeria nodorum SN15] gi|160707263|gb|EAT82484.2| SNOG_10149 [Phaeosphaeria nodorum SN15]
  misc_feature (77)..(590): NCBI GI: 261361349 Blast Desc: conserved [Verticillium albo-atrum VaMs.102]
  misc_feature (20)..(559): NCBI GI: 261359939 Blast Desc: transmembrane efflux protein [Verticillium albo-atrum VaMs.102]
  misc_feature (15)..(590): NCBI GI: 255944063 Blast Desc: Pc20g02450 [Penicillium chrysogenum Wisconsin 54-1255] gi|211587534|emb|CAP85574.1| Pc20g02450 [Penicillium chrysogenum Wisconsin 54-1255]
  misc_feature (84)..(585): NCBI GI: 256720160 Blast Desc: NECHADRAFT_14093 [Nectria haematococca mpVI 77-13-4]
  misc_feature (49)..(596): NCBI GI: 242771562 Blast Desc: siderophore iron transporter, [Talaromyces stipitatus ATCC 10500] gi|218721486|gb|EED20904.1| siderophore iron transporter, [Talaromyces stipitatus ATCC 10500]
MALHEDVEPSPGASDHSDAEKMGQTTHHEHTEINTEVMTPLGVEDGKLTKKTILAFIALCGQINAYIMTLLIPSTTLPYIIADLGPDPNYPWITITWTLGAAIIVSIGGRLSDIFGRRYFMITGALISIVGTIVGATGQSINQMIASGVLFGLGSGFQELCYACVQEVVPNHWRVRAVGLLDLSNLIAFSSPVISYVFIAFQPIGWRGAYWFMFSFHVFAFVLLFFFYKPPDFEMKHRNEGISRLRLLAQIDWFGVFLFAAAAVLFLLGLNFGGRTYPWKHPGTLVPLIVGLLLFVASGFWAAYNNLRYPLFPRKLFKRVREFDMVIVVTFVGGTLYYSMNVLWPKQSQVLFIGPNDVILRGVYAVIFSTGTWLAALITVFICSRLHHEKWQLIGFTIVQTALIASMASVGIDDKAQAIAVVVLAATSITPPQLLSFTMLSFGIQDQEDMGIACGLGSTFRLLGGSIATALYTAIYTNKFNEALPGEMRKAIAESSVAYSDSLLASLIKAGTINTVAAYNAVQGATPELITLAEKATKLAYVKGFNLVYLISIAFGIAAIGAAACTVSVDRSKKNNARAVVLKNEIHDNKNLDSTKII

SEQ ID NO: 38685 - DNA, 1195 bp, Muscodor strobelii
  misc_feature: SGI EST ID NO. CUFF.93013.0
  misc_feature: Variant of the nucleotide sequence at SEQ ID NO 38683
gtcggcaccatcgtaggtgcaacaggacagagcatcaatcagatgatcgcctcaggtgtgttattcggtctcggaagtggatttcaagaactgtgttatgcctgcgtccaagaagtcgtacccaatcactggcgtgtgcgtgcagttggactccttgatctatcgaatcttatcgcttttagttcgcccgtcatctcatatgtcttcatcgcatttcagcctattggctggcgaggtgcatattggtttatgttctcgttccacgttttcgcctttgtgcttctattcttcttctacaaaccaccagactttgagatgaagcatcgcaatgaagggatatcgcgcctccgcctacttgcacaaatcgattggtttggcgtcttcttgttcgccgctgcggccgtcctgttccttctcgggctgaactttggtggtcgaacttatccgtggaagcatcccggaactctagtgccactaattgttggcttgctcctcttcgttgcttccggattctgggctgcttacaacaacctcagatatcctctgtttccccgaaagctgtttaagagagttagagaattcgacatggtgattgtagtgacctttgtcggaggcacgttatactatagcatgaacgttttgtggcctaagcaatcgcaagtcctctttattgggcccaatgatgtgatcttgcgcggcgtctacgccgttattttctcgaccggcacatggctcgctgctctgatcactgtcttcatttgctcccgactgcatcatgaaaagtggcagttgattggtttcaccattgtccaaaccgcgttgatcgcttcgatggcctctgtcggcatcgatgacaaggcgcaagctatcgccgtagtggttctcgccgctacatcaatcaccccaccgcaactactatcattcaccatgttatctttcggtattcaggatcaggaggatatgggaattgcatgtggtctcggtagtacgttccgtctcttaggcgggtctattgcaacggcactctacactgcgatctacaccaacaagttcaatgaagcacttccaggggagatgcgcaaagctatcgcagagtccagcgtggcttactcagacagtttgctcgccagcttaatcaaggccggcacaatcaacacggttgcagcctacaacgctgtgcaaggagcaactccgg

SEQ ID NO: 38686 - DNA, 327 bp, Muscodor strobelii
  misc_feature: SGI cDNA ID NO. 573447
  misc_feature: Encodes the peptide sequence at SEQ ID NO 38687
atgcgcttctccactgcaggtcttgccgttctcggcgccaccggtgcttccgcgactgcgcaatggggtctctttgctgcgtataattatgaattttacgtcagtggtggcgacgatgtcgttgagggccttcccgccttcctagcacactgcattaccaacttcggcaatctctgctacaaccttgacgattcctctgatatcacgctgagtttatctggccaggacttgaccatcacacagacggcaaatgggaaatctgcttcggcaaccgtccatggttggactggggcaggaggagtgcaggtctggttgactccggcgtga

SEQ ID NO: 38687 - protein, 108 aa, Muscodor strobelii
  misc_feature: SGI Peptide ID NO. 573447
MRFSTAGLAVLGATGASATAQWGLFAAYNYEFYVSGGDDVVEGLPAFLAHCITNFGNLCYNLDDSSDITLSLSGQDLTITQTANGKSASATVHGWTGAGGVQVWLTPA

SEQ ID NO: 38688 - DNA, 183 bp, Muscodor strobelii
  misc_feature: SGI EST ID NO. CUFF.93011.0
  misc_feature: Variant of the nucleotide sequence at SEQ ID NO 38686
ctcatagatagatatatgtgaactgccttcacactattccgtcacaaaatgcgcttctccactgcaggtcttgccgttctcggcgccaccggtgcttccgcgactgcgcaatggggtctctttgctgcgtataattatgaattttacgtcagtggtggcgacgatgtcgttgagggccttccc

SEQ ID NO: 38689 - DNA, 693 bp, Muscodor strobelii
  misc_feature: SGI cDNA ID NO. 573448
  misc_feature: Encodes the peptide sequence at SEQ ID NO 38690
atggctgcaactttcgacttatcaaagccggatcgccagatccgagtcggtgtaatactcatgggaggcgaaaccgagatcctcgatctcgctccagttgacttgatcaatggaatgagcaagcactttctccagtccctcggatccttgaaccctaaagtcacagctcaaggattggacatcgattttcgctgggtctccgaggctggccagtccaagccgagtctttgtaccgcaggaatccggatactgccaacggactctttcgaaacatgtccaccgcttgacatcgtgctcatgggcgcacacaatatggactatgtgcccaatgccgcggagctggcatatgtgcgcaaagcctatgagcagtgttcggctttcatcactgtctgtggcggctttattccgcctatgatggcgggtatctttgatggcaagactggaactgccccgcgtatgatgctagaacagttgcgcaaagaccagcccaacacgaactgggttgagaagcgttgggtcagagacggcaagctctggagcagcggggcgctgacgaatggtcttgatctggtgcatcaatttgccaaacactattggggcagtggcgatgacactgttcctgggttcttttcgaagctcggagcttggcccgagagagagattgactacaaggacgtcccatgggctatttag

SEQ ID NO: 38690 - protein, 230 aa, Muscodor strobelii
  misc_feature: SGI Peptide ID NO. 573448
  misc_feature (1)..(230): NCBI GI: 145603388 Blast Desc: MGG_13216 [Magnaporthe grisea 70-15] gi|145011630|gb|EDJ96286.1| MGG_13216 [Magnaporthe grisea 70-15]
  misc_feature (2)..(230): NCBI GI: 171682094 Blast Desc: protein product [Podospora anserina] gi|170941006|emb|CAP66656.1| protein product [Podospora anserina]
  misc_feature (1)..(203): NCBI GI: 256734966 Blast Desc: NECHADRAFT_75755 [Nectria haematococca mpVI 77-13-4]
  misc_feature (50)..(226): NCBI GI: 261357229 Blast Desc: DJ-1/PfpI family protein [Verticillium albo-atrum VaMs.102]
  misc_feature (1)..(225): NCBI GI: 145240853 Blast Desc: An08g09630 [Aspergillus niger] gi|134077597|emb|CAK96741.1| protein product [Aspergillus niger]
  misc_feature (90)..(219): NCBI GI: 256719934 Blast Desc: NECHADRAFT_56664 [Nectria haematococca mpVI 77-13-4]
  misc_feature (14)..(226): NCBI GI: 255955471 Blast Desc: Pc21g14740 [Penicillium chrysogenum Wisconsin 54-1255] gi|211590199|emb|CAP96371.1| Pc21g14740 [Penicillium chrysogenum Wisconsin 54-1255]
  misc_feature (14)..(190): NCBI GI: 119482495 Blast Desc: DJ-1/PfpI family protein [Neosartorya fischeri NRRL 181] gi|119409430|gb|EAW19379.1| DJ-1/PfpI family protein [Neosartorya fischeri NRRL 181]
  misc_feature (14)..(226): NCBI GI: 238501042 Blast Desc: ThiJ/PfpI family transcriptional regulator, [Aspergillus flavus NRRL3357] gi|220691992|gb|EED48339.1| ThiJ/PfpI family transcriptional regulator, [Aspergillus flavus
  misc_feature (14)..(224): NCBI GI: 121704858 Blast Desc: ThiJ/PfpI family protein [Aspergillus clavatus NRRL 1] gi|119398838|gb|EAW09266.1| ThiJ/PfpI family protein [Aspergillus clavatus NRRL 1]
MAATFDLSKPDRQIRVGVILMGGETEILDLAPVDLINGMSKHFLQSLGSLNPKVTAQGLDIDFRWVSEAGQSKPSLCTAGIRILPTDSFETCPPLDIVLMGAHNMDYVPNAAELAYVRKAYEQCSAFITVCGGFIPPMMAGIFDGKTGTAPRMMLEQLRKDQPNTNWVEKRWVRDGKLWSSGALTNGLDLVHQFAKHYWGSGDDTVPGFFSKLGAWPEREIDYKDVPWAI

SEQ ID NO: 38691 - DNA, 226 bp, Muscodor strobelii
  misc_feature: SGI EST ID NO. CUFF.93016.0
  misc_feature: Variant of the nucleotide sequence at SEQ ID NO 38689
gagtcggtgtaatactcatgggaggggatcattgatcgttatctaagctaacaggagaccacagcgaaaccgagatcctcgatctcgctccagttgacttgatcaatggaatgagcaagcactttctccagtccctcggatccttgaaccctaaagtcacagctcaaggattggacatcgattttcgctgggtctccgaggctggccagtccaagccgagtcttgt

SEQ ID NO: 38692 - DNA, 1269 bp, Muscodor strobelii
  misc_feature: SGI cDNA ID NO. 573449
  misc_feature: Elevated expression when VOC is produced
  misc_feature: Encodes the peptide sequence at SEQ ID NO 38693
atgccattaaacgttggaattattggcgcgggaattggcggattgagcgcggccatcgggcttaggcgagtgggcgcagaagttgaggtgtttgaatcatccagtttcaaaaatgagattggtgccgcaattacgatcactccaaatggttcacgcattctggactcctggggattcgatggtcaaaaggcgggaatggtagaggccaagaaccttcgcatggtcgatgcaaaaactcttgagacggtattccaagaagactttggtgagattccgacgagatttggagcgaagatcgcatactatcatcgggtagacttacacaacatgctcaaggatatggcggaaggttcaaacgcgcaaccgggagtgccggcatcaatcaaacttggaaacggcgccatcgcagttgattgtgaagcgggaaatatcactctagctgatggcactacggcccagaaagacttaatcgtcatcgccaatgggatcaagtcgcaattcgtcggtcaaataacggaacaagatgaaccgatcaaggagatgccttggtccgcctacaggtgtttgatacccatggaagatattcttgccgacgagaagcttcaaaccattttcgaggccgacaaaccaggctactggacgccgtttcatctgccaactgcattctatctggttgcttacccttgtcgcgataataagacattgaacattgccctccgacacacgacccaacccaaggacaagaacaaagaggattggaactcgccagcgtcggtcgaagatgtattggggatccttaaagaccacaatcccctgctcagcgagatcattaagaaagcaacggatatcaagatatacaaactgttgaggagggaaccacttggacgctactcaaacggccgagccgtagtcatcggtgatgctgcacacaccatcttacccactcatgctcaaggagcggtcatggcaattgaagaagctgctgcgcttgagttgctgttcacagatgtttccgattcaattcaagttccttcgagattacagctttttagccagctattgaagtcccatattcacatcaaccagcatctcagcgattccattcctggcactagagatgaatatcggcagaaggcagaggagctctgtagcaaagaactgttcccccatacagcgatgaacttcacggcgcctgtacaagactttttctttagctacgatgtgcgcgatgaaatcgcaaagggcatgaaagaagcaggcttatcctga

SEQ ID NO: 38693 - protein, 422 aa, Muscodor strobelii
  misc_feature: SGI Peptide ID NO. 573449
  misc_feature (2)..(351): Pfam Id: PF01494 Pfam Desc: FAD binding domain
  misc_feature (1)..(411): NCBI GI: 46126501 Blast Desc: FG07628.1 [Gibberella zeae PH-1]
  misc_feature (7)..(421): NCBI GI: 121712252 Blast Desc: salicylate hydroxylase, [Aspergillus clavatus NRRL 1] gi|119401893|gb|EAW12315.1| salicylate hydroxylase, [Aspergillus clavatus NRRL 1]
  misc_feature (22)..(353): NCBI GI: 146323165 Blast Desc: salicylate hydroxylase [Aspergillus fumigatus Af293] gi|129556497|gb|EAL86443.2| salicylate hydroxylase, [Aspergillus fumigatus Af293]
  misc_feature (22)..(353): NCBI GI: 159128386 Blast Desc: salicylate hydroxylase, [Aspergillus fumigatus A1163]
  misc_feature (22)..(353): NCBI GI: 119473855 Blast Desc: salicylate hydroxylase, [Neosartorya fischeri NRRL 181] gi|119406956|gb|EAW16906.1| salicylate hydroxylase, [Neosartorya fischeri NRRL 181]
  misc_feature (15)..(353): NCBI GI: 238481889 Blast Desc: salicylate hydroxylase, [Aspergillus flavus NRRL3357] gi|220700233|gb|EED56571.1| salicylate hydroxylase, [Aspergillus flavus NRRL3357]
  misc_feature (15)..(353): NCBI GI: 169765358 Blast Desc: [Aspergillus oryzae RIB40] gi|83765005|dbj|BAE55148.1| protein product [Aspergillus oryzae]
  misc_feature (3)..(408): NCBI GI: 156061775 Blast Desc: SS1G_03033 [Sclerotinia sclerotiorum 1980] gi|154700434|gb|EDO00173.1| SS1G_03033 [Sclerotinia sclerotiorum 1980]
  misc_feature (1)..(412): NCBI GI: 242800456 Blast Desc: salicylate hydroxylase, [Talaromyces stipitatus ATCC 10500] gi|218716937|gb|EED16358.1| salicylate hydroxylase, [Talaromyces stipitatus ATCC 10500]
  misc_feature (1)..(382): NCBI GI: 212544358 Blast Desc: salicylate hydroxylase, [Penicillium marneffei ATCC 18224] gi|210065302|gb|EEA19396.1| salicylate hydroxylase, [Penicillium marneffei ATCC 18224]
  misc_feature (23)..(324): SWISSPROT Homolog: EC 1.14.13.24 3-hydroxybenzoate 6-monooxygenase
  misc_feature: Useful for introducing or modulating the production of volatile compounds
MPLNVGIIGAGIGGLSAAIGLRRVGAEVEVFESSSFKNEIGAAITITPNGSRILDSWGFDGQKAGMVEAKNLRMVDAKTLETVFQEDFGEIPTRFGAKIAYYHRVDLHNMLKDMAEGSNAQPGVPASIKLGNGAIAVDCEAGNITLADGTTAQKDLIVIANGIKSQFVGQITEQDEPIKEMPWSAYRCLIPMEDILADEKLQTIFEADKPGYWTPFHLPTAFYLVAYPCRDNKTLNIALRHTTQPKDKNKEDWNSPASVEDVLGILKDHNPLLSEIIKKATDIKIYKLLRREPLGRYSNGRAVVIGDAAHTILPTHAQGAVMAIEEAAALELLFTDVSDSIQVPSRLQLFSQLLKSHIHINQHLSDSIPGTRDEYRQKAEELCSKELFPHTAMNFTAPVQDFFFSYDVRDEIAKGMKEAGLS

SEQ ID NO: 38694 - DNA, 1634 bp, Muscodor strobelii
  misc_feature: SGI EST ID NO. CUFF.93031.0
  misc_feature: Variant of the nucleotide sequence at SEQ ID NO 38692
aaaacacaagacttctacaaatactagctgaagtacatatcgcccaagacgattcaaatccagcatgccattaaacgttggaattattggcgcgggaattggcggattgagcgcggccatcgggcttaggcgagtgggcgcagaagttgaggtgtttgaatcatccagtttcaaaaatgagattggtgccgcaattacgatcactccaaatggttcacgcattctggactcctggggattcgatggtcaaaaggcgggaatggtagaggccaagaaccttcgcatggtcgatgcaaaaactcttgagacggtattccaagaagactttggtgagattccgacgagatttggagcgaagatcgcatactatcatcgggtagacttacacaacatgctcaaggatatggcggaaggttcaaacgcgcaaccgggagtgccggcatcaatcaaacttggaaacggcgccatcgcagttgattgtgaagcgggaaatatcactctagctgatggcactacggcccagaaagacttaatcgtcatcgccaatgggatcaagtcgcaattcgtcggtcaaataacggaacaagatgaaccgatcaaggagatgccttggtccgcctacaggtgtttgatacccatggaagatattcttgccgacgagaagcttcaaaccattttcgaggccgacaaaccaggctactggacgccgtttcatctgccaactgcattctatctggttgcttacccttgtcgcgataataagacattgaacattgccctccgacacacgacccaacccaaggacaagaacaaagaggattggaactcgccagcgtcggtcgaagatgtattggggatccttaaagaccacaatcccctgctcagcgagatcattaagaaagcaacggatatcaagatatacaaactgttgaggagggaaccacttggacgctactcaaacggccgagccgtagtcatcggtgatgctgcacacaccatcttacccactcatgctcaaggagcggtcatggcaattgaagaagctgctgcgcttgagttgctgttcacagatgtttccgattcaattcaagttccttcgagattacagctttttagccagctattgaagtcccatattcacatcaaccagcatctcagcgattccattcctggcactagagatgaatatcggcagaaggcagaggagctctgtagcaaagaactgttcccccatacagcgatgaacttcacggcgcctgtacaagactttttctttagctacgatgtgcgcgatgaaatcgcaaagggcatgaaagaagcaggcttatcctgaaagttggcataatgccacactcgctttggattgtctacgtgactaggctagattcaatgtttactgtataagagctttatggaaggtctttatgcagaatttgtgcgccgctaatctcggcagactgtcgtgccttgcttcactcagagaagcagcagattggagcatgttatgagcataggatatatgaatgagggcatccacgtgacgttcgacagatggctgtggggatagcttatcatctgaggaccgcgatgagtaactgcatttcgggttctaatacagcatgctagtaccggga

SEQ ID NO: 38695 - DNA, 1812 bp, Muscodor strobelii
  misc_feature: SGI cDNA ID NO. 573450
  misc_feature: Encodes the peptide sequence at SEQ ID NO 38696
atgcattcaagctccatcttcgacgcggttcccggagctgcctccagtatcaactacgacccgggactcgtcatcaacttagtgtttcgggtcttcttcgctttcgtcggcatcgtcctctgctgggtgccgtttcgattgttgctgcgcaatggagagttcgcggcagtggtgctaatcgtcgatgtcgctatcatgaatttgatcaccgtcgtcaattccctcgtctggcgcaacgacgactacaattcttggttcaacgggtttggcctctgcgatatcgaggtatatatcttctcgcccttgcagaccatatatgctacgtccatcttcgcagttatggttcgtcttgcgcagtccgtcaagggatctatcatgcacgtcaatcgccaagatcgcgtcaagcgcaaattgtaccaagcagcaatcatcttcccggtacctatcatacagtttgtcttcacgtatttcgaccttgcgcaacgcttcatcatcggaactctggtcggctgctcggcagtctacgatgatagttggcctaaggtggtgttctacgacattcttccagctctctacgctattctgtctgttcctttcatcgtcttgctcttcagaagattctacaagttcacaaagaaaactcgaggcatcattcaatcgcacagccaggcttcaatcaataccaataacactcgacgccgcctatacaatctgtcgtttgcgattcttttagcctacgttcccctcatgacttacttggcggttgtcaatgttcagagcacaatacattcgtacaaaccttacgactttcatagaattcgatactctgcctccccatacccttgggattccgtcttgttcgtcccttcgtggatgatccctgaggttatactgaaccaagcctggctcactattgcaactgcacttgccattttcctggtattcggtacaacgcacgacgcgctggagatctatcgcagatatgcagaagcaactaagcttgattatctatgggaaaagatactgctatggacaacgctcggtcgtcgtcgcccatttctattcggtatagaagaagaccttgatcgcaagcgaaaaaaggccaaccgacacgtcacaatccaagaacatcctccacgacacgtgcgctcacgctccaccgtgcagtccgaaggatctcagtcatcttacgcggcgacggacatgagcacccagcccttagattcacgccacccacccgtaattccgccgcgtcgctcttcacttcgctccggtctgcctactttaccatgtcgcgctcatcttccgtctctcccgagtatcaccgaaagcctctccagggctttcagaaacttcagcgataccagcagtgtcatactcagaggcactaacaataccaatgacatacccatgctgcctctgtaccatcagccccaacgcaacgcgtacaatcagctagatgatgcatctccacgcttgcccgcccttaatgatgattcgttcttctcttcttctgtcatcagagatttctctgcctctcacacgccaaatcccaatcggcttacccttggatccgacttttacgacaatagttacgattttgcaggaagaggagccaccgtcactcctggtccccgcgtaggagaggtcactgtccgcgttcccatcgttcgcagcccttcgttcatccatgagtctacccatctctcccagctggctggtcaatcttcaggaatccggggctcttcaacctgggctagcatgtcgtccactcttagcgacatcctcagtcgcattggaatctcccgttag

SEQ ID NO: 38696 - protein, 603 aa, Muscodor strobelii
  misc_feature: SGI Peptide ID NO. 573450
  misc_feature (10)..(341): NCBI GI: 256733227 Blast Desc: NECHADRAFT_37539 [Nectria haematococca mpVI 77-13-4]
  misc_feature (11)..(341): NCBI GI: 46125785 Blast Desc: FG07270.1 [Gibberella zeae PH-1]
  misc_feature (52)..(334): NCBI GI: 261360139 Blast Desc: pheromone receptor [Verticillium albo-atrum VaMs.102]
  misc_feature (11)..(341): NCBI GI: 116192203 Blast Desc: CHGG_05819 [Chaetomium globosum CBS 148.51] gi|88181732|gb|EAQ89200.1| CHGG_05819 [Chaetomium globosum CBS 148.51]
  misc_feature (21)..(341): NCBI GI: 171686664 Blast Desc: protein product [Podospora anserina] gi|170943293|emb|CAP68946.1| protein product [Podospora anserina]
  misc_feature (20)..(341): NCBI GI: 283468661 Blast Desc: pheromone receptor 1 [Neurospora sitophila]
  misc_feature (20)..(341): NCBI GI: 283468671 Blast Desc: pheromone receptor 1 [Neurospora crassa] gi|283468675|emb|CAO78590.1| pheromone receptor 1 [Neurospora crassa]
  misc_feature (20)..(341): NCBI GI: 283468659 Blast Desc: pheromone receptor 1 [Neurospora sitophila]
  misc_feature (20)..(341): NCBI GI: 283468663 Blast Desc: pheromone receptor 1 [Neurospora sitophila]
  misc_feature (20)..(341): NCBI GI: 283468657 Blast Desc: pheromone receptor 1 [Neurospora intermedia]
MHSSSIFDAVPGAASSINYDPGLVINLVFRVFFAFVGIVLCWVPFRLLLRNGEFAAVVLIVDVAIMNLITVVNSLVWRNDDYNSWFNGFGLCDIEVYIFSPLQTIYATSIFAVMVRLAQSVKGSIMHVNRQDRVKRKLYQAAIIFPVPIIQFVFTYFDLAQRFIIGTLVGCSAVYDDSWPKVVFYDILPALYAILSVPFIVLLFRRFYKFTKKTRGIIQSHSQASINTNNTRRRLYNLSFAILLAYVPLMTYLAVVNVQSTIHSYKPYDFHRIRYSASPYPWDSVLFVPSWMIPEVILNQAWLTIATALAIFLVFGTTHDALEIYRRYAEATKLDYLWEKILLWTTLGRRRPFLFGIEEDLDRKRKKANRHVTIQEHPPRHVRSRSTVQSEGSQSSYAATDMSTQPLDSRHPPVIPPRRSSLRSGLPTLPCRAHLPSLPSITESLSRAFRNFSDTSSVILRGTNNTNDIPMLPLYHQPQRNAYNQLDDASPRLPALNDDSFFSSSVIRDFSASHTPNPNRLTLGSDFYDNSYDFAGRGATVTPGPRVGEVTVRVPIVRSPSFIHESTHLSQLAGQSSGIRGSSTWASMSSTLSDILSRIGISR

SEQ ID NO: 38697 - DNA, 1029 bp, Muscodor strobelii
  misc_feature: SGI cDNA ID NO. 573451
  misc_feature: Encodes the peptide sequence at SEQ ID NO 38698
atgtctcaaccgactgaggattcttttgacccgaatggatccctcgtacctgggcctgaagactgcacttttttggatgagcagtggagaattcagactgctaattgtcaacgtctctgttctcgctcaaaagatggcacactgagaccaacgttcatcgcgcctttcgctgttatgggtcggcctgttgatggtcctcgtacggtctttgaaagggctcttcaagaagacactgtactatggggcaatagtgaaagtgctgatcagtatgagcatcggaagaaatcattgtggcagaaaagacgagcgtaccgtaatgattggctagagaagcagcccacatttcatcgcttctcgtccttacctccagagctccgtcgatgtgtatggacactggctacgcacgagccaacggaagtaaacatctcaatctcgaaatacacttatggctctggtcgatgcggtccatggtcaagacctgctgactataccgccacggcttttttgccacctcttatgctcgtgaacaaagaggctcacgatattgccgctcaacaatacaaaagggcattcaaaggggtcgaaggggatggtggtgtcctcgcaacttatcccacatccattcagatgaacggtcgttctcttgagctgtttcagttcgatgatattgacctcattggcgaattcactttggtcgaagaggggcatcatttcgtcgattgtgacgaagattctcagtggtgtcttcaagatgatgacaagctccgaactgttctcaaggctccgaacctaaagcttcttgtggctagcatttcgacgtgttattcatcagaaaacgggtggcctcctatctgtcaggctattcgcaaggcttttgaagatggaacttcgtcaaggcggaatagaaacactccagaaatcaagttgaatataaaagttcaaggctacggtagatgtccagaggtcaaacaacagtacaagtttcacggtagcatccttgacatccaggaccctgagtttgaaggttga

SEQ ID NO: 38698 - protein, 342 aa, Muscodor strobelii
  misc_feature: SGI Peptide ID NO. 573451
MSQPTEDSFDPNGSLVPGPEDCTFLDEQWRIQTANCQRLCSRSKDGTLRPTFIAPFAVMGRPVDGPRTVFERALQEDTVLWGNSESADQYEHRKKSLWQKRRAYRNDWLEKQPTFHRFSSLPPELRRCVWTLATHEPTEVNISISKYTYGSGRCGPWSRPADYTATAFLPPLMLVNKEAHDIAAQQYKRAFKGVEGDGGVLATYPTSIQMNGRSLELFQFDDIDLIGEFTLVEEGHHFVDCDEDSQWCLQDDDKLRTVLKAPNLKLLVASISTCYSSENGWPPICQAIRKAFEDGTSSRRNRNTPEIKLNIKVQGYGRCPEVKQQYKFHGSILDIQDPEFEG

SEQ ID NO: 38699 - DNA, 280 bp, Muscodor strobelii
  misc_feature: SGI EST ID NO. CUFF.93028.0
  misc_feature: Variant of the nucleotide sequence at SEQ ID NO 38697
ctttgagtctcaacgtcactcacaacccctccctattacggaaaatgtctcaaccgactgaggattcttttgacccgaatggatccctcgtacctgggcctgaagactgcacttttttggatgagcagtggagaattcagactgctaattgtcaacgtctctgttctcgctcaaaagatggcacactgagaccaacgttcatcgcgcctttcgctgttatgggtcggcctgttgatggtcctcgtacggtctttgaaagggctcttcaagaagacactgt

SEQ ID NO: 38700 - DNA, 432 bp, Muscodor strobelii
  misc_feature: SGI cDNA ID NO. 573452
  misc_feature: Elevated expression when VOC is produced
  misc_feature: Encodes the peptide sequence at SEQ ID NO 38701
atgccctcaactgaagaaaacacgggaaatcatcgcgctacgcaagccgctgttactcaatggcgccagctgtcggcgttcttgcttcaccccaatcgtagcgatcgcacgcccctcgttccatccgacgatgtttcagcagtccaagagcataagcttactacagctctcaatcgctgtcttgagccgttcatcaaagggggcgaagaaggaatatacgaacaagaaagccacttggaacaggtcattagagaatgtgctatattcggttatctcctgttttcgcagccttctgagtaccgtctacagttcagaagtgatgaaggaaccggagtggtcgtttgcccggggctgtacaagatcgtcaacgacaatggttcgtactacgaagagttggtcttggctcctgtagttgagtcaattcagcattag

SEQ ID NO: 38701 - protein, 143 aa, Muscodor strobelii
  misc_feature: SGI Peptide ID NO. 573452
  misc_feature (4)..(139): NCBI GI: 145613566 Blast Desc: MGG_01533 [Magnaporthe grisea 70-15] gi|145020625|gb|EDK04754.1| MGG_01533 [Magnaporthe grisea 70-15]
  misc_feature (1)..(131): NCBI GI: 256732475 Blast Desc: NECHADRAFT_25359 [Nectria haematococca mpVI 77-13-4]
  misc_feature (5)..(129): NCBI GI: 46123851 Blast Desc: FG06303.1 [Gibberella zeae PH-1]
  misc_feature (10)..(120): NCBI GI: 256729351 Blast Desc: NECHADRAFT_101447 [Nectria haematococca mpVI 77-13-4]
  misc_feature (12)..(126): NCBI GI: 85112012 Blast Desc: NCU03287 [Neurospora crassa OR74A] gi|28925985|gb|EAA34977.1| NCU03287 [Neurospora crassa OR74A]
  misc_feature (17)..(126): NCBI GI: 256730676 Blast Desc: NECHADRAFT_29747 [Nectria haematococca mpVI 77-13-4]
  misc_feature (5)..(105): NCBI GI: 46120394 Blast Desc: FG04844.1 [Gibberella zeae PH-1]
  misc_feature (26)..(130): NCBI GI: 256733429 Blast Desc: NECHADRAFT_77510 [Nectria haematococca mpVI 77-13-4]
  misc_feature (15)..(142): NCBI GI: 46122881 Blast Desc: FG05818.1 [Gibberella zeae PH-1]
  misc_feature (1)..(104): NCBI GI: 85112573 Blast Desc: NCU00826 [Neurospora crassa OR74A] gi|28926148|gb|EAA35133.1| [Neurospora crassa OR74A]
  misc_feature: Useful for introducing or modulating the production of volatile compounds
MPSTEENTGNHRATQAAVTQWRQLSAFLLHPNRSDRTPLVPSDDVSAVQEHKLTTALNRCLEPFIKGGEEGIYEQESHLEQVIRECAIFGYLLFSQPSEYRLQFRSDEGTGVVVCPGLYKIVNDNGSYYEELVLAPVVESIQH

SEQ ID NO: 38702 - DNA, 1347 bp, Muscodor strobelii
  misc_feature: SGI cDNA ID NO. 573453
  misc_feature: Elevated expression when VOC is produced
  misc_feature: Encodes the peptide sequence at SEQ ID NO 38703
atgacagcaagcatcgagcttgcgagcttcaacgacgtgaccatggcggagccgcagttccagctgttcgggaagcttccgcccgagattcgtctttcaatatgggcctactattccctcccggtagcgaccatggtgcacgcaatgtcgtttggcacacccaaagactctttttacatcgaatcacgaaaagtcatcttcaactccttcccggtcaacgagactctcatccgtcccaacttcacgatggtacgggcgctcatgcaggttaatcgagaaagccgatacgaggttcttcaaggacgtcagcttcaaggaacgcagaaacgcaagtcccctgacgcgtgcacggatgtttaccacggcggcgcctggcacaagaacctcgcacattatcccaagtaccgattcttcttcgtggactggcatgtcgacctgttttattttcgatgtgggctacaaatagcaatgcctcttattcttcacgagtcttgtgtgcaaaagatgcagcgcattgcaatagatgttcaaggcccagatcatactatttgtgttccaagatgggcagcattctctggtatgaaccatggctcgtctgatgccccagtagaggaaaatcatgattaccatagagataatcttaaatctctcaagcacctcacacttgtgcttccttatcaggtctttgaacaggccgacgtcgcagactcggaagagtcatcctccgaactaagtgacgccgacgaggacgaatggaaccaagttaaagaagatgtgcattcggaagatagtacaagcaaggtttcgatcagcgaaactagttacatagaggacagtaacatcaacatgcaagccaaagaagacgacgacgatccctgtgtctttaacggttttttcttccctaaatataaagacaagacaacgtatcgttaccagctcttcggtacttatggcgaggcatatttgagacgcgaggcacatttgagatacgacgaaggtctccggcctatgctcgacaaagacaaggataacttcggattccacctagttgggaagaacgccacacacctgttcaaaaggcatgagctgaagtacgactggagacgaatacctggcggcatcagtaccacattcccaaaatgggttcgagacatgacgtcggctgcctcgagagatgtttcccgagtctgtggacgcaagattaaaactaatatggtgatggaccacgctggtgattataatctcaagaaatctgttgggtatgaccgcgtatggggctaccaaggctaccaaggctggcgaccctggacaacaggcgtggtggaccagtctgactctgaggattaa

SEQ ID NO: 38703 - protein, 448 aa, Muscodor strobelii
  misc_feature: SGI Peptide ID NO. 573453
  misc_feature: Useful for introducing or modulating the production of volatile compounds
MTASIELASFNDVTMAEPQFQLFGKLPPEIRLSIWAYYSLPVATMVHAMSFGTPKDSFYIESRKVIFNSFPVNETLIRPNFTMVRALMQVNRESRYEVLQGRQLQGTQKRKSPDACTDVYHGGAWHKNLAHYPKYRFFFVDWHVDLFYFRCGLQIAMPLILHESCVQKMQRIAIDVQGPDHTICVPRWAAFSGMNHGSSDAPVEENHDYHRDNLKSLKHLTLVLPYQVFEQADVADSEESSSELSDADEDEWNQVKEDVHSEDSTSKVSISETSYIEDSNINMQAKEDDDDPCVFNGFFFPKYKDKTTYRYQLFGTYGEAYLRREAHLRYDEGLRPMLDKDKDNFGFHLVGKNATHLFKRHELKYDWRRIPGGISTTFPKWVRDMTSAASRDVSRVCGRKIKTNMVMDHAGDYNLKKSVGYDRVWGYQGYQGWRPWTTGVVDQSDSED

SEQ ID NO: 38704 - DNA, 2740 bp, Muscodor strobelii
  misc_feature: SGI EST ID NO. CUFF.93089.1
  misc_feature: Variant of the nucleotide sequence at SEQ ID NO 38702
gcagtatctagatactcttttatttttgctctttacctatcaacctaagcacacattcactccaatactgtggagagccccttcaagcctctctaacaagcacccgtgattctccctattgttacctgcaaatcaagacccctagacttgactgcccatctcatcagttcgatggatagcaggctacaggccctttatctctccacaaattgtactcgcatccaccgctaggggccactcgcagccactcatctgattatttacgcgcccccccgtcagaagcggggaagcgccaagccggaccactgagcaggtgttcaatgtatccattaaagcttaaaccttattcgtctacttgcctactcctcccaacttcactactaaacaaattgctattctttaaggctcattcatcgcacggcttgtataccactttcaaaatgacagcaagcatcgagcttgcgagcttcaacgacgtgaccatggcggagccgcagttccagctgttcgggaagcttccgcccgagattcgtctttcaatatgggcctactattccctcccggtagcgaccatggtgcacgcaatgtcgtttggcacacccaaagactctttttacatcgaatcacgaaaagtcatcttcaactccttcccggtcaacgagactctcatccgtcccaacttcacgatggtacgggcgctcatgcaggttaatcgagaaagccgatacgaggttcttcaaggacgtcagcttcaaggaacgcagaaacgcaagtcccctgacgcgtgcacggatgtttaccacggcggcgcctggcacaagaacctcgcacattatcccaagtaccgattcttcttcgtggactggcatgtcgacctgttttattttcgatgtgggctacaaatagcaatgcctcttattcttcacgagtcttgtgtgcaaaagatgcagcgcattgcaatagatgttcaaggcccagatcatactatttgtgttccaagatgggcagcattctctggtatgaaccatggctcgtctgatgccccagtagaggaaaatcatgattaccatagagataatcttaaatctctcaagcacctcacacttgtgcttccttatcaggtctttgaacaggccgacgtcgcagactcggaagagtcatcctccgaactaagtgacgccgacgaggacgaatggaaccaagttaaagaagatgtgcattcggaagatagtacaagcaaggtttcgatcagcgaaactagttacatagaggacagtaacatcaacatgcaagccaaagaagacgacgacgatccctgtgtctttaacggttttttcttccctaaatataaagacaagacaacgtatcgttaccagctcttcggtacttatggcgaggcatatttgagacgcgaggcacatttgagatacgacgaaggtctccggcctatgctcgacaaagacaaggataacttcggattccacctagttgggaagaacgccacacacctgttcaaaaggcatgagctgaagtacgactggagacgaatacctggcggcatcagtaccacattcccaaaatgggttcgagacatgacgtcggctgcctcgagagatgtttcccgagtctgtggacgcaagattaaaactaatatggtgatggaccacgctggtgattataatctcaagaaatctgttgggtatgaccgcgtatggggctaccaaggctaccaaggctggcgaccctggacaacaggcgtggtggaccagtctgactctgaggattaattagcgtggctaagaagatacatcgggcacctatttgttgatataggcgcagggaaatgcatcgatcgaccaagtcgccgacatcgtagtgtaatttatccttttacaaaatatgacgtgggtatttcccatagagaatgaaaagtcatgtatgtcaggaacgtagcatgctgggatcggcggaagtgactggcgtgggaagctgttgagcgatagtcatagtgataatagttgcagcaggaggagtaagtggcgcgtcggctgcgtaccaggcttcccactactctcgcagcgctgctagtgcctcgtgaagccataatcgctggtctgcagtgtagagtggtccctgttcataaccttgcagccggagtggcagggtggaaaggggtaagctgcgcccattttgaaacagctacgcctttggctactacctaggttgcctttccgcccgtaaaggaccgagactgattgtttggcgatcgctattttactcaatattttttcattcttatcaaatgtcagaatgtgaaccgtcgggctgaagttgacctgtttgcggagcgtagactttggcgaccgctgagagatctgtttattttgacgttcaatatctaatcgccgtcgaagctcaagttctatgtcatctaggtctgttggcgaatcatagatgacctcaatcagttcatgcactcgtggtgtctcctgttgatttacgagacgggtctgatcgcacacaactagacgccgacgttctggaggcgaccaaattagtctcggcccgcgatgcgtgtacacagacgaatgatactggagtggttggcaggtaggtttgtactcgtaatatatcgttgtggtacgcctatagtagcgtgacgtagacatgatgaaacacgcatatagaggccagcccaaatgaaatatagtcgatcacattatgtactgtaaagtatgcg

SEQ ID NO: 38705 - DNA, 1437 bp, Muscodor strobelii
  misc_feature: SGI cDNA ID NO. 573454
  misc_feature: Encodes the peptide sequence at SEQ ID NO 38706
atgcctcccctcaagaggtcgagctcgtcggtcattcctgacctggacttcacgttgcgtaagcagttcaacaagcagagctttcggccatttcaacgagagatcatacaggctacacttgatcgccatgatgtgtttgtgcaagccgcaacgtcttttggtaaaagtctatgttttcagcttccagcggtcgtagatcatggaatcactattgttgtctcgccgctcctcagtctgatgatgaaccaagtagaagcattgcgggcatctgggattgatgccagctcgttcaatagtaacacgcccatccccgaaagggatcgtatacttggtgatctcaagactggccatccacggacacgattgctttacgtcactcctgagttatgcgcaaccgatcgctttcgagatcgattgcaagttgtgtacgaccaaagggaactcgctcgcatagccattgatgaggcgcattgtatctcggaatgggggcatgattttcgaaaggacttcaagcgcctgtcttggtttcgcgaatccttccccgaggttcccatcatgtgtttgacggcaacagccaatgaccaagtgaagaatgacgttttaaatactctcggtctcgatgcggaccccggccgggttaagtctttcacgatgtcggccttccgcccaaatctacatctcgagattcgcttcacttctgatcaagacgataggcgaatggaaaacttcgtcaaatggcttcgaggtgtatatcaacgcagagcagaggaaccccggaagagcgaaatagctgctatcggacaacggccggacaacgtcccaggtataatctacacgatatctcgtgatgagtgcgacaaccttgcagcccagttgcgtcaagcaggtatcggtgcacagccattccacgcgaagctcaccaaggaactaaaggaaaagacactggctagatgggtagcgaatgagcccggtttcgatatcattgtggccacgacggcttttggtatgggtattgacaaggataatgtgcgctttgtcgtgcactggagacttccaaaatccttcgaaggatactaccaagaagcaggacgagcaggccgtgatggcaacgcttcctattgtttcttatattatagccgcgaggatagggaccgggtctgtcacctgctcatgcgtgaccgagaatcgaagagttcaaactgggacgcgagggcgtcgagtttgaaatctttggccgagtactgcgaaaacatcacgacgtgtcgacacaaattaatttgcgactatttcggtgaaaaggacacaccggcgtgtgattatgcttgcgatcttcacaaagaccccaaagatctccaacgcaggtttctccatggtttggcgagcgaagagtgggtcggcacgcagcaattcgaggcagatgacgattgggatgaatga

SEQ ID NO: 38706 - protein, 478 aa, Muscodor strobelii
  misc_feature: SGI Peptide ID NO. 573454
  misc_feature (29)..(200): Pfam Id: PF00270 Pfam Desc: DEAD/DEAH box helicase
  misc_feature (291)..(369): Pfam Id: PF00271 Pfam Desc: Helicase conserved C-terminal domain
  misc_feature (1)..(468): NCBI GI: 46107486 Blast Desc: FG00626.1 [Gibberella zeae PH-1]
  misc_feature (29)..(472): NCBI GI: 116199865 Blast Desc: conserved [Chaetomium globosum CBS 148.51] gi|88179367|gb|EAQ86835.1| conserved [Chaetomium globosum CBS 148.51]
  misc_feature (3)..(472): NCBI GI: 171688896 Blast Desc: protein product [Podospora anserina] gi|170944410|emb|CAP70520.1| protein product [Podospora anserina]
  misc_feature (14)..(469): NCBI GI: 189196824 Blast Desc: ATP-dependent DNA helicase recQ [Pyrenophora tritici-repentis Pt-1C-BFP] gi|187980629|gb|EDU47255.1| ATP-dependent DNA helicase recQ [Pyrenophora tritici-repentis
  misc_feature (81)..(477): NCBI GI: 145608288 Blast Desc: MGG_03233 [Magnaporthe grisea 70-15] gi|145015776|gb|EDK00266.1| MGG_03233 [Magnaporthe grisea 70-15]
  misc_feature (30)..(324): NCBI GI: 164427342 Blast Desc: NCU03337 [Neurospora crassa OR74A] gi|157071703|gb|EAA27210.2| conserved [Neurospora crassa OR74A]
  misc_feature (82)..(478): NCBI GI: 169603998 Blast Desc: SNOG_05008 [Phaeosphaeria nodorum SN15] gi|160706490|gb|EAT87399.2| SNOG_05008 [Phaeosphaeria nodorum SN15]
  misc_feature (14)..(447): NCBI GI: 145256829 Blast Desc: An04g01630 [Aspergillus niger] gi|134058439|emb|CAK47926.1| protein product [Aspergillus niger]
  misc_feature (30)..(343): NCBI GI: 156043507 Blast Desc: SS1G_10757 [Sclerotinia sclerotiorum 1980] gi|154695144|gb|EDN94882.1| SS1G_10757 [Sclerotinia sclerotiorum 1980]
  misc_feature (14)..(454): NCBI GI: 169773771 Blast Desc: [Aspergillus oryzae RIB40] gi|83769215|dbj|BAE59352.1| protein product [Aspergillus oryzae]
MPPLKRSSSSVIPDLDFTLRKQFNKQSFRPFQREIIQATLDRHDVFVQAATSFGKSLCFQLPAVVDHGITIVVSPLLSLMMNQVEALRASGIDASSFNSNTPIPERDRILGDLKTGHPRTRLLYVTPELCATDRFRDRLQVVYDQRELARIAIDEAHCISEWGHDFRKDFKRLSWFRESFPEVPIMCLTATANDQVKNDVLNTLGLDADPGRVKSFTMSAFRPNLHLEIRFTSDQDDRRMENFVKWLRGVYQRRAEEPRKSEIAAIGQRPDNVPGIIYTISRDECDNLAAQLRQAGIGAQPFHAKLTKELKEKTLARWVANEPGFDIIVATTAFGMGIDKDNVRFVVHWRLPKSFEGYYQEAGRAGRDGNASYCFLYYSREDRDRVCHLLMRDRESKSSNWDARASSLKSLAEYCENITTCRHKLICDYFGEKDTPACDYACDLHKDPKDLQRRFLHGLASEEWVGTQQFEADDDWDE

SEQ ID NO: 38707 - DNA, 1194 bp, Muscodor strobelii
  misc_feature: SGI cDNA ID NO. 573455
  misc_feature: Encodes the peptide sequence at SEQ ID NO 38708
atgtccgacccggctgcctcttcaagttcggccgcccccccaccacctccggcttctaggcccgaggagtcccgggacggcgcgacggacagctcgccgccagatacccaagtcatgttggcgaccacttcgtccataccggacgacgatacccctccgagccatgagcctctttcaacttccatagcatcatcttctcatgcagcgtccgcatcaagttcaaaagccggtctcatgactacaacatcaacaccaagcaatctatctccgccactcccattatcgcccccgtatacatcttccgtcgctcctctacctcagtccatatccatgtccgtatccgcctcagcatcaggctcccaaaccgggacggctaccggaacaatgacagccacctcaccacccagcacaaccagtgccggcatgcccccgaaccttcccacagatctcaaccccacacttcccacccggtcctcacaactccacatcgcggaagcacgcgccgcgctcgtggcaagtatgtccaacatgctagacacggagctacaatcccgcgcctcgctcctccactccaacgccgctgctttatcacggcaggaaaaggacgtgataaaagctaccgaggctctacgcaaggaaaacgacaaactcgctaaagttgcgcaggatgcggggaggaagataaaggagttaggcaatgtgcagaattgggccgaggtgctggagagagatttcttggtccttgaggagactgttaggcttgtgaagaagggaagtgatgatgggagtagtatggggtgtagtgatcctgattgcgatggatgttgttggagtggtagtgagagtggtagcgagggagggagtcgtaggggaagtgtcagtgagggtgagagtgagggggctagggggaaggatgagcttggtgttgatggagatgaggggagtgtgtcgagattagcgggaggtggagatgtgaaagggaaagggaaagaggtcgagctggcgggtgctaggccggataagacctcgtcttcgacggtgcttaagggcgtcaatgtctccctcgatgatgcgattctagagagtctcatggaggctatggagacggatatgcgagttagtgcggacgaggatttaccaaagatgcctacgctcgatgctacgaaccgggagaatgctgtcacgacttcttaa

SEQ ID NO: 38708 - protein, 397 aa, Muscodor strobelii
  misc_feature: SGI Peptide ID NO. 573455
  misc_feature (150)..(254): NCBI GI: 256735382 Blast Desc: NECHADRAFT_98900 [Nectria haematococca mpVI 77-13-4]
  misc_feature (163)..(302): NCBI GI: 171688892 Blast Desc: protein product [Podospora anserina] gi|170944408|emb|CAP70518.1| protein product [Podospora anserina]
  misc_feature (144)..(255): NCBI GI: 116199867 Blast Desc: CHGG_08089 [Chaetomium globosum CBS 148.51] gi|88179368|gb|EAQ86836.1| CHGG_08089 [Chaetomium globosum CBS 148.51]
  misc_feature (164)..(253): NCBI GI: 85079168 Blast Desc: NCU03361 [Neurospora crassa OR74A] gi|28881138|emb|CAD70308.1| [Neurospora crassa] gi|28917354|gb|EAA27060.1| [Neurospora crassa OR74A]
  misc_feature (188)..(257): NCBI GI: 261357041 Blast Desc: conserved [Verticillium albo-atrum VaMs.102]
  misc_feature (114)..(262): NCBI GI: 145608262 Blast Desc: MGG_03249 [Magnaporthe grisea 70-15] gi|145015754|gb|EDK00244.1| MGG_03249 [Magnaporthe grisea 70-15]
  misc_feature (152)..(287): NCBI GI: 156043473 Blast Desc: [Sclerotinia sclerotiorum 1980] gi|154695127|gb|EDN94865.1| [Sclerotinia sclerotiorum 1980]
  misc_feature (135)..(254): NCBI GI: 46107490 Blast Desc: FG00628.1 [Gibberella zeae PH-1]
  misc_feature (165)..(264): NCBI GI: 169624786 Blast Desc: SNOG_15654 [Phaeosphaeria nodorum SN15] gi|160705239|gb|EAT77029.2| SNOG_15654 [Phaeosphaeria nodorum SN15]
  misc_feature (165)..(269): NCBI GI: 212530182 Blast Desc: conserved [Penicillium marneffei ATCC 18224] gi|210074646|gb|EEA28733.1| conserved [Penicillium marneffei ATCC 18224]
MSDPAASSSSAAPPPPPASRPEESRDGATDSSPPDTQVMLATTSSIPDDDTPPSHEPLSTSIASSSHAASASSSKAGLMTTTSTPSNLSPPLPLSPPYTSSVAPLPQSISMSVSASASGSQTGTATGTMTATSPPSTTSAGMPPNLPTDLNPTLPTRSSQLHIAEARAALVASMSNMLDTELQSRASLLHSNAAALSRQEKDVIKATEALRKENDKLAKVAQDAGRKIKELGNVQNWAEVLERDFLVLEETVRLVKKGSDDGSSMGCSDPDCDGCCWSGSESGSEGGSRRGSVSEGESEGARGKDELGVDGDEGSVSRLAGGGDVKGKGKEVELAGARPDKTSSSTVLKGVNVSLDDAILESLMEAMETDMRVSADEDLPKMPTLDATNRENAVTTS

SEQ ID NO: 38709 - DNA, 978 bp, Muscodor strobelii
  misc_feature: SGI cDNA ID NO. 573456
  misc_feature: Reduced expression when VOC is produced
  misc_feature: Encodes the peptide sequence at SEQ ID NO 38710
atgggtctcacactcaaagtgaccagccggtccaaaaagggcatcagaggtcttccacccactatcgagctgccggacgatgcaaccgtagaatacaccaagaaagccatcgccaaggccaccaagacctccgacttcaaccgcataggtatcttcgacccggtctccaacaagaccgtcaaggaccgcaatgccttgattcgggaccaggagcccatcatgaagcagggcgaattcatggtcaaagatctcggtgcacaaatatcctggaagctcgtctacgtatgcgagtacctcggccccctaatcttccacccgctcttcctttccgtccggaatacgctttatcccgccgcatacccctacatcaaagactacgtgccagctcccaacctgtctgtcgtctcctctggagcactatcctcggtccaacaagcagccttcgccatgataatggcgcacttcgtaaagcgcgagctcgaagtcctcttcctccacaaattcagcgcaaacaccatgcccgcccagttcatcatccgcaactccttcttctactgggccttcgccggatttctcggcgcgctagagatctactccccattcggtccctcagcccgcaccaccgatctgttggcctctcctctcgacatcctcgggcttggtctgtacgtcttcggtgaactctgcaacgcgaacgtccactactatctcgctaccctccgcaagcccggcgagactgcccgaaagatccccaatggccttggattcagccttgtcacgtgccctaactacatgttcgagatcatcgcctgggttggcatcattctcgtgacgcgcagcccgactctggtcgttttcatcttcattggttcgtactatatgtacacctggggccggggcaaggagaaggcgtaccggaagcagtttggtgataagtacaagaagaagcgatgcgttatgctgcctggtcttttgtaa

SEQ ID NO: 38710 - protein, 325 aa, Muscodor strobelii
  misc_feature: SGI Peptide ID NO. 573456
  misc_feature (171)..(325): Pfam Id: PF02544 Pfam Desc: 3-oxo-5-alpha-steroid 4-dehydrogenase
  misc_feature (3)..(325): NCBI GI: 171688890 Blast Desc: protein product [Podospora anserina] gi|170944407|emb|CAP70517.1| protein product [Podospora anserina]
  misc_feature (3)..(325): NCBI GI: 116199869 Blast Desc: CHGG_08090 [Chaetomium globosum CBS 148.51] gi|88179369|gb|EAQ86837.1| CHGG_08090 [Chaetomium globosum CBS 148.51]
  misc_feature (4)..(325): NCBI GI: 256734664 Blast Desc: NECHADRAFT_98899 [Nectria haematococca mpVI 77-13-4]
  misc_feature (3)..(325): NCBI GI: 85079172 Blast Desc: NCU03362 [Neurospora crassa OR74A] gi|28881139|emb|CAD70309.1| conserved [Neurospora crassa] gi|28917355|gb|EAA27061.1| conserved [Neurospora crassa OR74A]
  misc_feature (4)..(325): NCBI GI: 46107492 Blast Desc: FG00629.1 [Gibberella zeae PH-1]
  misc_feature (3)..(325): NCBI GI: 145608260 Blast Desc: MGG_03250 [Magnaporthe grisea 70-15] gi|145015753|gb|EDK00243.1| MGG_03250 [Magnaporthe grisea 70-15]
  misc_feature (1)..(322): NCBI GI: 156043405 Blast Desc: SS1G_10706 [Sclerotinia sclerotiorum 1980] gi|154695093|gb|EDN94831.1| SS1G_10706 [Sclerotinia sclerotiorum 1980]
  misc_feature (1)..(322): NCBI GI: 154316648 Blast Desc: BC1G_04255 [Botryotinia fuckeliana B05.10] gi|150846055|gb|EDN21248.1| BC1G_04255 [Botryotinia fuckeliana B05.10]
  misc_feature (3)..(324): NCBI GI: 261357040 Blast Desc: synaptic glycoprotein SC2 [Verticillium albo-atrum VaMs.102]
  misc_feature (3)..(324): NCBI GI: 258567368 Blast Desc: conserved [Uncinocarpus reesii 1704] gi|237905874|gb|EEP80275.1| conserved [Uncinocarpus reesii 1704]
  misc_feature (3)..(325): SWISSPROT Homolog: EC 1.3.1.38 Trans-2-enoyl-CoA reductase (NADPH)
  misc_feature: Useful for introducing or modulating the production of volatile compounds
MGLTLKVTSRSKKGIRGLPPTIELPDDATVEYTKKAIAKATKTSDFNRIGIFDPVSNKTVKDRNALIRDQEPIMKQGEFMVKDLGAQISWKLVYVCEYLGPLIFHPLFLSVRNTLYPAAYPYIKDYVPAPNLSVVSSGALSSVQQAAFAMIMAHFVKRELEVLFLHKFSANTMPAQFIIRNSFFYWAFAGFLGALEIYSPFGPSARTTDLLASPLDILGLGLYVFGELCNANVHYYLATLRKPGETARKIPNGLGFSLVTCPNYMFEIIAWVGIILVTRSPTLVVFIFIGSYYMYTWGRGKEKAYRKQFGDKYKKKRCVMLPGLL

SEQ ID NO: 38711 - DNA, 4351 bp, Muscodor strobelii
  misc_feature: SGI EST ID NO. CUFF.93077.0
  misc_feature: Variant of the nucleotide sequence at SEQ ID NO 38709
gccagctgaatggcggggcccgcgggggacgaagatgtttctcaacaaatttcccaaaacaccaattaattttcccgaaaaagggtggtcctcaaatcccacgtcttcagaccctgacacttctttctcataactgagaatcatcacgacagaagccaagcctctcgcaaactcgtttatttgaaggtcaatcgcaattggtatttggctaggcaatattgcgaatatgggtctcacactcaaagtgaccagccggtccaaaaagggcatcagaggtcttccacccactatcgagctgccggacgatgcaaccgtagaatacaccaagaaagccatcgccaaggccaccaagacctccgacttcaaccgcataggtatcttcgacccggtctccaacaagaccgtcaaggaccgcaatgccttgattcgggaccaggagcccatcatgaagcagggcgaattcatggtcaaagatctcggtgcacaaatatcctggaagctcgtctacgtatgcgagtacctcggccccctaatcttccacccgctcttcctttccgtccggaatacgctttatcccgccgcatacccctacatcaaagactacgtgccagctcccaacctgtctgtcgtctcctctggagcactatcctcggtccaacaagcagccttcgccatgataatggcgcacttcgtaaagcgcgagctcgaagtcctcttcctccacaaattcagcgcaaacaccatgcccgcccagttcatcatccgcaactccttcttctactgggccttcgccggatttctcggcgcgctagagatctactccccattcggtccctcagcccgcaccaccgatctgttggcctctcctctcgacatcctcgggcttggtctgtacgtcttcggtgaactctgcaacgcgaacgtccactactatctcgctaccctccgcaagcccggcgagactgcccgaaagatccccaatggccttggattcagccttgtcacgtgccctaactacatgttcgagatcatcgcctgggttggcatcattctcgtgacgcgcagcccgactctggtcgttttcatcttcattggttcgtactatatgtacacctggggccggggcaaggagaaggcgtaccggaagcagtttggtgataagtacaagaagaagcgatgcgttatgctgcctggtcttttgtaatgtcggggacgtgcagggcataatgaaatgcagtagatgtcgtacatatatatagtggagagagaagctcacaaaaacgctttagatgggctgtctgatatagaatattgactaatatggggatatttgagttgtggagatataaaactcatgatgaatcaatgaagattatatagaataatatagaacgtatactagccattgaaacttaagcaagatcatgttttgcaactctcgtatatagtactcaggagtgaaagttcgttacatcatgggctcattatatatgccggccatcgacaatggataatacactagatcgtccctcgtccaccccgcctcttaagaagtcgtgacagcattctcccggttcgtagcatcgagcgtaggcatctttggtaaatcctcgtccgcactaactcgcatatccgtctccatagcctccatgagactctctagaatcgcatcatcgagggagacattgacgcccttaagcaccgtcgaagacgaggtcttatccggcctagcacccgccagctcgacctctttccctttccctttcacatctccacctcccgctaatctcgacacactcccctcatctccatcaacaccaagctcatccttccccctagccccctcactctcaccctcactgacacttcccctacgactccctccctcgctaccactctcactaccactccaacaacatccatcgcaatcaggatcactacaccccatactactcccatcatcacttcccttcttcacaagcctaacagtctcctcaaggaccaagaaatctctctccagcacctcggcccaattctgcacattgcctaactcctttatcttcctccccgcatcctgcgcaactttagcgagtttgtcgttttccttgcgtagagcctcggtagcttttatcacgtccttttcctgccgtgataaagcagcggcgttggagtggaggagcgaggcgcgggattgtagctccgtgtctagcatgttggacatacttgccacgagcgcggcgcgtgcttccgcgatgtggagttgtgaggaccgggtgggaagtgtggggttgagatctgtgggaaggttcgggggcatgccggcactggttgtgctgggtggtgaggtggctgtcattgttccggtagccgtcccggtttgggagcctgatgctgaggcggatacggacatggatatggactgaggtagaggagcgacggaagatgtatacgggggcgataatgggagtggcggagatagattgcttggtgttgatgttgtagtcatgagaccggcttttgaacttgatgcggacgctgcatgagaagatgatgctatggaagttgaaagaggctcatggctcggaggggtatcgtcgtccggtatggacgaagtggtcgccaacatgacttgggtatctggcggcgagctgtccgtcgcgccgtcccgggactcctcgggcctagaagccggaggtggtgggggggcggccgaacttgaagaggcagccgggtcggacattgcgattatggttatgtcatctgatcatctgccagagggatggttctatatgcagaaagctaattgaggaagcggagaataagttgaaacaactacgcttaacgacgaaacagaagtcaggattcaggagcttcaaggtcccccacgatttgagatgcatgtagtactgctctgcatagcggggtcggctgatgtctgattggaagaggtatcacagtcattggcgtctcgcgctactcaacgactggctacctttcgttgcacatgactttagtcaaatgaagcatactcacgaatgagattagtacggggactgtagcggaacctatgaagataagaagtcgagcttccgatcattacgatcattcatcccaatcgtcatctgcctcgaattgctgcgtgccgacccactcttcgctcgccaaaccatggagaaacctgcgttggagatctttggggtctttgtgaagatcgcaagcataatcacacgccggtgtgtccttttcaccgaaatagtcgcaaattaatttgtgtcgacacgtcgtgatgttttcgcagtactcggccaaagatttcaaactcgacgccctcgcgtcccagtttgaactcttcgattctcggtcacgcatgagcaggtgacagacccggtccctatcctcgcggctataatataagaaacaataggaagcgttgccatcacggcctgctcgtcctgcttcttggtagtatccttcgaaggattttggaagtctccagtgcacgacaaagcgcacattatccttgtcaatacccataccaaaagccgtcgtggccacaatgatatcgaaaccgggctcattcgctacccatctagccagtgtcttttcctttagttccttggtgagcttcgcgtggaatggctgtgcaccgatacctgcttgacgcaactgggctgcaaggttgtcgcactcatcacgagatatcgtgtagattatacctgggacgttgtccggccgttgtccgatagcagctatttcgctcttccggggttcctctgctctgcgttgatatacacctcgaagccatttgacgaagttttccattcgcctatcgtcttgatcagaagtgaagcgaatctcgagatgtagatttgggcggaaggccgacatcgtgaaagacttaacccggccggggtccgcatcgagaccgagagtatttaaaacgtcattcttcacttggtcattggctgttgccgtcaaacacatgatgggaacctcggggaaggattcgcgaaaccaagacaggcgcttgaagtcctttcgaaaatcatgcccccattccgagatacaatgcgcctcatcaatggctatgcgagcgagttccctttggtcgtacacaacttgcaatcgatctcgaaagcgatcggttgcgcataactcaggagtgacgtaaagcaatcgtgtccgtggatggccagtcttgagatcaccaagtatacgatccctttcggggatgggcgtgttactattgaacgagctggcatcaatcccagatgcccgcaatgcttctacttggttcatcatcagactgaggagcggcgagacaacaatagtgactataataggattagct

SEQ ID NO: 38712 - DNA, 1305 bp, Muscodor strobelii
  misc_feature: SGI cDNA ID NO. 573457
  misc_feature: Encodes the peptide sequence at SEQ ID NO 38713
atgccaccgcccaacacccccgaggaagggctggtggtctccaacaacgcgagcaccacgacgctggcccttcgcccggtagcccgaagcgagccgtcgtcgtcggtcgtcgatctgcgtgctctcgaatacgacggcgaggtcgacgagaacctcatctgccctatctgccgcctgcctttcgtagccccgaccatcacccactgtgaccatgtcttctgccaccgctgcatcatccaggcccacagcctgaaccccgtctgtcccgtcgaccgcctccccctgaagctcgccaccgagacccgctccgcccccaagatagtccacaaccagctcgagaatctcctcgtccggtgcccaaatagctcgcggggctgcgatcttgtcgtcgccagatctctcgtcgagaaccacgtcactcgctactgcgaccagactctcgtcctctgcccgcacccctcctgtgacaagctagtagcccgcaaagactccaccaagggatgtctacattacgatgccaagtgtgagtactgtgaccacatgtacgagaaggccgatctagaggaacaccaagatacgagatgccccaatagaaagaagaagtgtgagctctgtgacgtcgaatatgtgcgccataagcaagatgaacatgccaaggagtgtcccgaggcagagacgccctgcaggttcgccccttttggctgtacccgcttgatacagcggaagaggctcgcagagcatgcactacgctgcgagtatagggtcgtgggccccgttggagaacagctggcagagctacgggcggaactcggggccctgcgagagaaagaccagttgaaagagcgacggatcaaattcctcgaaaacaagggcttcccggtacctgtggccagtaacaccgaggccatcgctgatatcagcttgcccgagaccacggcaactacagatttagccccttacgaatcccgagaccagtatttcctatcactcttcgagactatggagtcaaaggtagagcgactctcttcggccctgaacgaagtagaaggtcgacattccgttatgctcttcaacgagactctacccatcaaagaccaaatcaccgaaattcgcagtaccctgggagttcttgggatgcatgtgcgctggttgatgaacttccggcttcaagagcgcgggagggttgggactagctcgcccactatgaccggtgcgcttgctggaacgcaagacagtggtgctgattccaacttaccaccacgacgcctgagcgactacacgcgggaacatccacctaggttatga

SEQ ID NO: 38713 - protein, 434 aa, Muscodor strobelii
  misc_feature: SGI Peptide ID NO. 573457
  misc_feature (191)..(247): Pfam Id: PF02176 Pfam Desc: TRAF-type zinc finger
  misc_feature (219)..(247): Pfam Id: PF02176 Pfam Desc: TRAF-type zinc finger
  misc_feature (3)..(394): NCBI GI: 156060233 Blast Desc: SS1G_02255 [Sclerotinia sclerotiorum 1980] gi|154699663|gb|EDN99401.1| SS1G_02255 [Sclerotinia sclerotiorum 1980]
  misc_feature (1)..(392): NCBI GI: 171689004 Blast Desc: protein product [Podospora anserina] gi|170944464|emb|CAP70575.1| protein product [Podospora anserina]
  misc_feature (36)..(429): NCBI GI: 212530404 Blast Desc: TRAF-like signal transducer, [Penicillium marneffei ATCC 18224] gi|210074757|gb|EEA28844.1| TRAF-like signal transducer, [Penicillium marneffei ATCC 18224]
  misc_feature (36)..(429): NCBI GI: 242818817 Blast Desc: TRAF-like signal transducer, [Talaromyces stipitatus ATCC 10500] gi|218713657|gb|EED13081.1| TRAF-like signal transducer, [Talaromyces stipitatus ATCC 10500]
  misc_feature (1)..(414): NCBI GI: 39942352 Blast Desc: MGG_03256 [Magnaporthe grisea 70-15] gi|145015747|gb|EDK00237.1| MGG_03256 [Magnaporthe grisea 70-15]
  misc_feature (36)..(351): NCBI GI: 154315609 Blast Desc: BC1G_04377 [Botryotinia fuckeliana B05.10] gi|150847317|gb|EDN22510.1| BC1G_04377 [Botryotinia fuckeliana B05.10]
  misc_feature (36)..(429): NCBI GI: 145251255 Blast Desc: An15g06120 [Aspergillus niger] gi|134082671|emb|CAK42565.1| protein product [Aspergillus niger]
  misc_feature (35)..(429): NCBI GI: 225558517 Blast Desc: TRAF-type zinc finger protein [Ajellomyces capsulatus G186AR]
  misc_feature (31)..(429): NCBI GI: 119501939 Blast Desc: TRAF-type zinc finger protein [Neosartorya fischeri NRRL 181] gi|119415954|gb|EAW25767.1| TRAF-type zinc finger protein [Neosartorya fischeri NRRL 181]
  misc_feature (3)..(401): NCBI GI: 189189352 Blast Desc: TRAF-type zinc finger protein [Pyrenophora tritici-repentis Pt-1C-BFP] gi|187972621|gb|EDU40120.1| TRAF-type zinc finger protein [Pyrenophora tritici-repentis Pt-1C-BFP]
MPPPNTPEEGLVVSNNASTTTLALRPVARSEPSSSVVDLRALEYDGEVDENLICPICRLPFVAPTITHCDHVFCHRCIIQAHSLNPVCPVDRLPLKLATETRSAPKIVHNQLENLLVRCPNSSRGCDLVVARSLVENHVTRYCDQTLVLCPHPSCDKLVARKDSTKGCLHYDAKCEYCDHMYEKADLEEHQDTRCPNRKKKCELCDVEYVRHKQDEHAKECPEAETPCRFAPFGCTRLIQRKRLAEHALRCEYRVVGPVGEQLAELRAELGALREKDQLKERRIKFLENKGFPVPVASNTEAIADISLPETTATTDLAPYESRDQYFLSLFETMESKVERLSSALNEVEGRHSVMLFNETLPIKDQITEIRSTLGVLGMHVRWLMNFRLQERGRVGTSSPTMTGALAGTQDSGADSNLPPRRLSDYTREHPPRL

SEQ ID NO: 38714 - DNA, 2801 bp, Muscodor strobelii
  misc_feature: SGI EST ID NO. CUFF.93067.0
  misc_feature: Variant of the nucleotide sequence at SEQ ID NO 38712
tttcgatgtgtccgtcccgtcaatgccaaatcacctatgtacacgcaagcaattcctaataccttgatgacttcaaataagaagtgcttgacttcccgaagcagcacgcatctgcaacgatccggccttatggcttctcatttccttgactcgtagtcttcaacacctaaacatcgtggatcatgccaccgcccaacacccccgaggaagggctggtggtctccaacaacgcgagcaccacgacgctggcccttcgcccggtagcccgaagcgagccgtcgtcgtcggtcgtcgatctgcgtgctctcgaatacgacggcgaggtcgacgagaacctcatctgccctatctgccgcctgcctttcgtagccccgaccatcacccactgtgaccatgtcttctgccaccgctgcatcatccaggcccacagcctgaaccccgtctgtcccgtcgaccgcctccccctgaagctcgccaccgagacccgctccgcccccaagatagtccacaaccagctcgagaatctcctcgtccggtgcccaaatagctcgcggggctgcgatcttgtcgtcgccagatctctcgtcgagaaccacgtcactcgctactgcgaccagactctcgtcctctgcccgcacccctcctgtgacaagctagtagcccgcaaagactccaccaagggatgtctacattacgatgccaagtgtgagtactgtgaccacatgtacgagaaggccgatctagaggaacaccaagatacgagatgccccaatagaaagaagaagtgtgagctctgtgacgtcgaatatgtgcgccataagcaagatgaacatgccaaggagtgtcccgaggcagagacgccctgcaggttcgccccttttggctgtacccgcttgatacagcggaagaggctcgcagagcatgcactacgctgcgagtatagggtcgtgggccccgttggagaacagctggcagagctacgggcggaactcggggccctgcgagagaaagaccagttgaaagagcgacggatcaaattcctcgaaaacaagggcttcccggtacctgtggccagtaacaccgaggccatcgctgatatcagcttgcccgagaccacggcaactacagatttagccccttacgaatcccgagaccagtatttcctatcactcttcgagactatggagtcaaaggtagagcgactctcttcggccctgaacgaagtagaaggtcgacattccgttatgctcttcaacgagactctacccatcaaagaccaaatcaccgaaattcgcagtaccctgggagttcttgggatgcatgtgcgctggttgatgaacttccggcttcaagagcgcgggagggttgggactagctcgcccactatgaccggtgcgcttgctggaacgcaagacagtggtgctgattccaacttaccaccacgacgcctgagcgactacacgcgggaacatccacctaggttatgagaagtgaacatcgaaacgcaagtgagattcttgtgcgaacaggttgggagagctcagcaggcaacatttatagcacttcagtgcacctattatcttgctatccggctactggctatgaacgtcaatttgtttaataagacatcctactacacctaactgaatttgcagcctgagaatttccgccaacacagatgcctggctgattatcccagactaagctggtgactcatccagagacacagctcagcagatgcttccagtgttattcgggtgtctatgggagaaaaatatcgtgaagtggcagacagaccaggcgagggttcatatcaggtctgcgttcataacggatactaaagaatttcggttgtcagtacggatgctcgctaccacacgcattggatgcttagtaccatgtacattcggaaaaccattcggacctctattcgggatgcatacttggaggaagtaccggaaaccgagccttcatcaaaatactgcggagtgagggcgaggctcacgttctcattatggtttggaccaacactgcaatgagggccgccacaaccgtgcagtagatgagggcgaaaatgtaccagaaggcattgatgactcttgccaaactagcgaggtacatagcgaaccacgggtcaagaaaacgaaaaaatcagcatacattgcatctccatatatgcggccgagaacttcgagaatcatgatgaacatcatgatgagaattgtcataggatcaggaatgtcatcatcgtcttcctcatcctcgtcatctccatcgtcactctcatcatctccatcttcgtggatagcaaagtcatcgtcgttgaagatcacggccagaagacagataacggtgaggaaccagatgatgtagagtagactctggatcacctcgacgatggccaagatgtgaggcaacatgatcaagaggaacttcgtaaatggcgacatggtttccaagaaggcaatccaccggaacgtctttgagggcttggtggtcggaaagcggcgatctgtgcgagaggcgtagaacatgtgatggagtcttcgaggctggtctcaaagcttgtctcggagaatgggtcgggaggacaaacagagagacagcagggaaacgtcaagactgcggtacggtgctgttcgctccaaacaaagtcatccgacactggcgatcaatgtcactcgttaaggcgagagctacgtgactatcaacgacgacagcatcccttatcttctgttaagcttccgcaagaacaattctcaaaaatctactacacacttcccaatgaaactactttgttg

SEQ ID NO: 38715 - DNA, 480 bp, Muscodor strobelii
  misc_feature: SGI cDNA ID NO. 573458
  misc_feature: Elevated expression when VOC is produced
  misc_feature: Encodes the peptide sequence at SEQ ID NO 38716
atgttctacgcctctcgcacagatcgccgctttccgaccaccaagccctcaaagacgttccggtggattgccttcttggaaaccatgtcgccatttacgaagttcctcttgatcatgttgcctcacatcttggccatcgtcgaggtgatccagagtctactctacatcatctggttcctcaccgttatctgtcttctggccgtgatcttcaacgacgatgactttgctatccacgaagatggagatgatgagagtgacgatggagatgacgaggatgaggaagacgatgatgacattcctgatcctatgacaattctcatcatgatgttcatcatgattctcgaagttctcggccgcatatatggagatgcaattttggcaagagtcatcaatgccttctggtacattttcgccctcatctactgcacggttgtggcggccctcattgcagtgttggtccaaaccataatgagaacgtga

SEQ ID NO: 38716 - protein, 159 aa, Muscodor strobelii
  misc_feature: SGI Peptide ID NO. 573458
  misc_feature: Useful for introducing or modulating the production of volatile compounds
MFYASRTDRRFPTTKPSKTFRWIAFLETMSPFTKFLLIMLPHILAIVEVIQSLLYIIWFLTVICLLAVIFNDDDFAIHEDGDDESDDGDDEDEEDDDDIPDPMTILIMMFIMILEVLGRIYGDAILARVINAFWYIFALIYCTVVAALIAVLVQTIMRT

SEQ ID NO: 38717 - DNA, 1992 bp, Muscodor strobelii
  misc_feature: SGI cDNA ID NO. 573459
  misc_feature: Encodes the peptide sequence at SEQ ID NO 38718
atggacgacaaagccaccgaagaccacaagacagtggtcgaaaccactaatggtgagaagcaagagagaatctcgcctactggattccgtccgattactgaatctacaaaaacagatgaggaagcagaagctcaacaacgccctgatcttagtcctgcagattcgagctcagtgtctagtgtcaatccggatatgcttggtgacgagatcattgtcggtactcactctaacggggacaagcagtcaccactccgagttgtttctgaggatggagaggacgaagatgttgtcccccattacccgaaacgtaaacgctcaaccgtctacaatgatctagccgaagataaaatggatacaagcatgaccgaagaggttcccgagacaaacacaccacgtactcagagcgtagtgccccggccgatgtcagctcgtgagcgcgaccagaagggcgtcatcctaggctattggcgcgattctccggtgcccagtccagccggcaagcacagtgtcattggttttatggacgtcagagaccgactgcgtactcgcattcaacaccttacacgtacatccgaagttattaacgctcgtttgtttcccatcccacccggtcctgggggtagctgggtgacctttgagagaattgtattcagcgatcatttgattggactggatcacaatgagatcaaggagtatgtcaagctccgttacgagacacaggctagcgatacgcctgagaatcgtgcggatatggaccaggcggctgtcgtcgaagctcgtcgtcgagtgcgagaggatccgccccccgaacaggctcaaccacccgccatagcatggggtctggatattcctgagcatgctcaagttggccgacaggaagcaaaacgccgtcgaatgggcagtggagtaggtacgattctggatcgtactcctgtccagatgtctcaacagctaccagttgcccatcctaaccctccgccgaatcaggctgtagctgttcccacacctccgacacaacctccttaccctggtatgctagattctctacctggcactcgaccgacccgcatccttgttgggtgctggtctaagtcggacgttgaggacgatcgtgagcgtcatgcagtatatggaatactgggagctaatgacatgttccgagtaaagcttgtccgtgagacattggatggccgctatgtcgatggaaacttccctgccggtgctggagctttgtggattccatacgaggaagtacttttcctacgccacatcaaccatctgagccgccccgagatgaaggaatacgttcgggtgcgtcaaagtcagatcgatgctggtgagaaagaagacgacaaagttgcaaacgagaccaaggcagtctacgaagcacagactcgtgtagctagcatgactagaggagggcagcccgttactggaggtatgttgtcacgatcagctaccatgatggagagagacgatgtccctgagcaattgcatactcccaccaatgccggtggccatgagctacgacacaaccgtcgtgaggtaatgccccgaaatgagcttccgggctctcgtcatcctcttccagatcccgcgcatgtggctcgccctgcaagcatcgacccggtcgagcgcgttcagactttggctacgagagaagtttcgcgattagaggctgttcagatgcgaaacgatcgacataatcagagccggtatccaatgcctgcccagaactctaatgccgaagccgaaatccagcgacagcggttccaggacgaccgtgagcggatgcagaaggtgtgggcctcccaggagcagaatcgcttccgacctggagttgaggagaccaaggtgcatatgggcgtcaagtacgagcgaaagtcaaacgggccttggaagggaaagctcgtgagccagggctccattcttacgattgatggtgaagattacgtcgagtatcgcgtgcttactaaacctaccttcttctag

SEQ ID NO: 38718 - protein, 663 aa, Muscodor strobelii
  misc_feature: SGI Peptide ID NO. 573459
  misc_feature (68)..(663): NCBI GI: 256730597 Blast Desc: NECHADRAFT_30136 [Nectria haematococca mpVI 77-13-4]
  misc_feature (33)..(663): NCBI GI: 116204583 Blast Desc: CHGG_10175 [Chaetomium globosum CBS 148.51] gi|88176303|gb|EAQ83771.1| CHGG_10175 [Chaetomium globosum CBS 148.51]
  misc_feature (57)..(663): NCBI GI: 46109192 Blast Desc: FG01478.1 [Gibberella zeae PH-1]
  misc_feature (66)..(662): NCBI GI: 171689248 Blast Desc: protein product [Podospora anserina] gi|170944586|emb|CAP70697.1| protein product [Podospora anserina]
  misc_feature (54)..(572): NCBI GI: 85110394 Blast Desc: NCU08509 [Neurospora crassa OR74A] gi|28925118|gb|EAA34202.1| [Neurospora crassa OR74A]
  misc_feature (54)..(572): NCBI GI: 38524214 Blast Desc: [Neurospora crassa]
  misc_feature (67)..(231): NCBI GI: 261356837 Blast Desc: conserved [Verticillium albo-atrum VaMs.102]
  misc_feature (591)..(663): NCBI GI: 85110394 Blast Desc: NCU08509 [Neurospora crassa OR74A] gi|28925118|gb|EAA34202.1| [Neurospora crassa OR74A]
  misc_feature (591)..(663): NCBI GI: 38524214 Blast Desc: [Neurospora crassa]
  misc_feature (357)..(483): NCBI GI: 154315441 Blast Desc: BC1G_04293 [Botryotinia fuckeliana B05.10] gi|150847233|gb|EDN22426.1| BC1G_04293 [Botryotinia fuckeliana B05.10]
MDDKATEDHKTVVETTNGEKQERISPTGFRPITESTKTDEEAEAQQRPDLSPADSSSVSSVNPDMLGDEIIVGTHSNGDKQSPLRVVSEDGEDEDVVPHYPKRKRSTVYNDLAEDKMDTSMTEEVPETNTPRTQSVVPRPMSARERDQKGVILGYWRDSPVPSPAGKHSVIGFMDVRDRLRTRIQHLTRTSEVINARLFPIPPGPGGSWVTFERIVFSDHLIGLDHNEIKEYVKLRYETQASDTPENRADMDQAAVVEARRRVREDPPPEQAQPPAIAWGLDIPEHAQVGRQEAKRRRMGSGVGTILDRTPVQMSQQLPVAHPNPPPNQAVAVPTPPTQPPYPGMLDSLPGTRPTRILVGCWSKSDVEDDRERHAVYGILGANDMFRVKLVRETLDGRYVDGNFPAGAGALWIPYEEVLFLRHINHLSRPEMKEYVRVRQSQIDAGEKEDDKVANETKAVYEAQTRVASMTRGGQPVTGGMLSRSATMMERDDVPEQLHTPTNAGGHELRHNRREVMPRNELPGSRHPLPDPAHVARPASIDPVERVQTLATREVSRLEAVQMRNDRHNQSRYPMPAQNSNAEAEIQRQRFQDDRERMQKVWASQEQNRFRPGVEETKVHMGVKYERKSNGPWKGKLVSQGSILTIDGEDYVEYRVLTKPTFF

SEQ ID NO: 38719 - DNA, 2695 bp, Muscodor strobelii
  misc_feature: SGI EST ID NO. CUFF.93080.0
  misc_feature: Variant of the nucleotide sequence at SEQ ID NO 38717
taacagtgcccactcgatctgtttgtacagattgccttgagcctgttcctttcaactttgccaataccacagtccggcatcaagttgggcacacaaattatatcagtcccctgcatgtgttccgaagtcatctgcaacgtcagttgagctgagttcatgatggacgacaaagccaccgaagaccacaagacagtggtcgaaaccactaatggtgagaagcaagagagaatctcgcctactggattccgtccgattactgaatctacaaaaacagatgaggaagcagaagctcaacaacgccctgatcttagtcctgcagattcgagctcagtgtctagtgtcaatccggatatgcttggtgacgagatcattgtcggtactcactctaacggggacaagcagtcaccactccgagttgtttctgaggatggagaggacgaagatgttgtcccccattacccgaaacgtaaacgctcaaccgtctacaatgatctagccgaagataaaatggatacaagcatgaccgaagaggttcccgagacaaacacaccacgtactcagagcgtagtgccccggccgatgtcagctcgtgagcgcgaccagaagggcgtcatcctaggctattggcgcgattctccggtgcccagtccagccggcaagcacagtgtcattggttttatggacgtcagagaccgactgcgtactcgcattcaacaccttacacgtacatccgaagttattaacgctcgtttgtttcccatcccacccggtcctgggggtagctgggtgacctttgagagaattgtattcagcgatcatttgattggactggatcacaatgagatcaaggagtatgtcaagctccgttacgagacacaggctagcgatacgcctgagaatcgtgcggatatggaccaggcggctgtcgtcgaagctcgtcgtcgagtgcgagaggatccgccccccgaacaggctcaaccacccgccatagcatggggtctggatattcctgagcatgctcaagttggccgacaggaagcaaaacgccgtcgaatgggcagtggagtaggtacgattctggatcgtactcctgtccagatgtctcaacagctaccagttgcccatcctaaccctccgccgaatcaggctgtagctgttcccacacctccgacacaacctccttaccctggtatgctagattctctacctggcactcgaccgacccgcatccttgttgggtgctggtctaagtcggacgttgaggacgatcgtgagcgtcatgcagtatatggaatactgggagctaatgacatgttccgagtaaagcttgtccgtgagacattggatggccgctatgtcgatggaaacttccctgccggtgctggagctttgtggattccatacgaggaagtacttttcctacgccacatcaaccatctgagccgccccgagatgaaggaatacgttcgggtgcgtcaaagtcagatcgatgctggtgagaaagaagacgacaaagttgcaaacgagaccaaggcagtctacgaagcacagactcgtgtagctagcatgactagaggagggcagcccgttactggaggtatgttgtcacgatcagctaccatgatggagagagacgatgtccctgagcaattgcatactcccaccaatgccggtggccatgagctacgacacaaccgtcgtgaggtaatgccccgaaatgagcttccgggctctcgtcatcctcttccagatcccgcgcatgtggctcgccctgcaagcatcgacccggtcgagcgcgttcagactttggctacgagagaagtttcgcgattagaggctgttcagatgcgaaacgatcgacataatcagagccggtatccaatgcctgcccagaactctaatgccgaagccgaaatccagcgacagcggttccaggacgaccgtgagcggatgcagaaggtgtgggcctcccaggagcagaatcgcttccgacctggagttgaggagaccaaggtgcatatgggcgtcaagtacgagcgaaagtcaaacgggccttggaagggaaagctcgtgagccagggctccattcttacgattgatggtgaagattacgtcgagtatcgcgtgcttactaaacctaccttcttctaggaggtgtgatggcacaagctatccgtgagccaatgagcctttcctttcgccttattctatgaaggcgttgcttgggagtttcctcccattttactcaccgcaatctttcgtacgggtgacggcttatatcctgtttaatgtaaattatctcgacgaaactcgtcttttccaccatgagagtggctaaattgtccgtttataattgcactttgctgcaaaaggcagcagaatggggagacacagcaagcaagatggcgatcgtgggcttgctattcaaatttttgcttggtctcggagcactaggagaaccggcgacaaaaaaggagttaagggaaaggaaaataagaccgaaagaacagcatggaagcagtctgtctaataattcatacctcccagtgtaaactaatccaagcccaacaacaaaaataccacaagaaattgttataacacgatgatctaagtcgttgctttgttgctttaggctcgagggcatgaatcagcccccggctctagccgtctcacgaaccttttgattagctaagcg

SEQ ID NO: 38720 - DNA, 1455 bp, Muscodor strobelii
  misc_feature: SGI cDNA ID NO. 573460
  misc_feature: Encodes the peptide sequence at SEQ ID NO 38721
atgctctccgacgatgacgattccactccaccgccgcagaattcagcggcgcgagccaatgattcggacgcattctctgaaaatgatggcgatgaacagatcccggactttcgctttttcacagctctcggtgcctcatcccaaaagtcagcgtccggcaagacagtaagacgcggcgagaaggatttcgagtcccatggcacgcgcgctcaagatggggtcctcgagtccagtcgctctgctatgcatgaggtgctcagttacacgcgacaatcaacgcctaagaatgtaatgcgcggctggtactttcctgacagatgggccgacatgccggatgaaaatcagtccactatcaacaagtcaaaggcaaatgatagaggctctagctactccatgttcgcgcgtgaacgcgtcgttgcaatcgaagtcgaaaagggtcctttgctcacttccatgggtcgcatcgtaactggagttgataagaacacaccaggatggcagaagctttggttgctaccagaggaggcactgttcttgatagaacgcgggtctttggatctatggtggccatcacgagggattgaggatgtgttcccactggaagatgaagaatctgatgacttgtctgagaagcctttatctgattcggaacgcaagtctctcgaggaatatgaacttggtgttccagttggtctccaaggcgcctacgcgcttttgatcggacgcgacggggaacggggaaagatcagccttgagaagttccaagtttacgccagtttaagaagaactggatactcggttttgcgtgcgacaccgctagagcggccatcaccaccatcaccaccatcaccccaacctctgtggcatcgtctgtattcactcttatccaacactcttacctattcgcattcacagcacagccattccaattgtgggccgttgttgagaccaggcctatatcgctcttatacaccaatattcgagcagctggcactcattccgagacacaagcccactgaatatgtaccgcttgattatcctgaacctcaagaacccttcaaggttcattttcatatatggaaagcccaggcagtcttcacgaaagttcgtccgccgccacctgacttccgcatttgcgttgtcgatgcgcgcgaaacgggtgttccaacgctggagcaactcgatgcattactcatgtccacaccattcgatccgcctccggagcgagaccgagacgtcaaaggagcggggtttgtatataagcgtttgaagcacggttggagaaacgtcttagtcgccgttgtcgatcgtggtatgatcagctaccttaattttggggagatggccttcggagaggagaaattgtacgagaacccggacataaagcctaggagcaagcgcggtcgtagtgcaggtagaggcggtgcgaggcgcggaagaggtagagggcgttga

SEQ ID NO: 38721 - protein, 484 aa, Muscodor strobelii
  misc_feature: SGI Peptide ID NO. 573460
  misc_feature (1)..(460): NCBI GI: 46109196 Blast Desc: FG01480.1 [Gibberella zeae PH-1]
  misc_feature (36)..(450): NCBI GI: 171689246 Blast Desc: protein product [Podospora anserina] gi|170944585|emb|CAP70696.1| protein product [Podospora anserina]
  misc_feature (5)..(460): NCBI GI: 156060113 Blast Desc: SS1G_02195 [Sclerotinia sclerotiorum 1980] gi|154699603|gb|EDN99341.1| SS1G_02195 [Sclerotinia sclerotiorum 1980]
  misc_feature (27)..(462): NCBI GI: 85110396 Blast Desc: NCU08510 [Neurospora crassa OR74A] gi|50401505|sp|Q7SC91.1|SEN54_NEUCR RecName: Full= tRNA-splicing endonuclease subunit sen-54; AltName: Full=tRNA-intron sen-54
  misc_feature (27)..(460): NCBI GI: 154315437 Blast Desc: BC1G_04291 [Botryotinia fuckeliana B05.10] gi|150847231|gb|EDN22424.1| BC1G_04291 [Botryotinia fuckeliana B05.10]
  misc_feature (19)..(473): NCBI GI: 169772649 Blast Desc: [Aspergillus oryzae RIB40] gi|83768654|dbj|BAE58791.1| protein product [Aspergillus oryzae]
  misc_feature (19)..(473): NCBI GI: 238490564 Blast Desc: tRNA splicing endonuclease subunit (Sen54), [Aspergillus flavus NRRL3357] gi|220696932|gb|EED53273.1| tRNA splicing endonuclease subunit (Sen54), [Aspergillus flavus
  misc_feature (1)..(470): NCBI GI: 255956553 Blast Desc: Pc21g20420 [Penicillium chrysogenum Wisconsin 54-1255] gi|211590740|emb|CAP96939.1| Pc21g20420 [Penicillium chrysogenum Wisconsin 54-1255]
  misc_feature (12)..(264): NCBI GI: 145608274 Blast Desc: MGG_12745 [Magnaporthe grisea 70-15] gi|145015766|gb|EDK00256.1| MGG_12745 [Magnaporthe grisea 70-15]
  misc_feature (19)..(458): NCBI GI: 159124511 Blast Desc: tRNA splicing endonuclease subunit (Sen54), [Aspergillus fumigatus A1163]
MLSDDDDSTPPPQNSAARANDSDAFSENDGDEQIPDFRFFTALGASSQKSASGKTVRRGEKDFESHGTRAQDGVLESSRSAMHEVLSYTRQSTPKNVMRGWYFPDRWADMPDENQSTINKSKANDRGSSYSMFARERVVAIEVEKGPLLTSMGRIVTGVDKNTPGWQKLWLLPEEALFLIERGSLDLWWPSRGIEDVFPLEDEESDDLSEKPLSDSERKSLEEYELGVPVGLQGAYALLIGRDGERGKISLEKFQVYASLRRTGYSVLRATPLERPSPPSPPSPQPLWHRLYSLLSNTLTYSHSQHSHSNCGPLLRPGLYRSYTPIFEQLALIPRHKPTEYVPLDYPEPQEPFKVHFHIWKAQAVFTKVRPPPPDFRICVVDARETGVPTLEQLDALLMSTPFDPPPERDRDVKGAGFVYKRLKHGWRNVLVAVVDRGMISYLNFGEMAFGEEKLYENPDIKPRSKRGRSAGRGGARRGRGRGR

SEQ ID NO: 38722 - DNA, 2392 bp, Muscodor strobelii
  misc_feature: SGI EST ID NO. CUFF.93110.0
  misc_feature: Variant of the nucleotide sequence at SEQ ID NO 38720
ggaataggcagcaatgcatgatgacctaaacggcttacggtcgtgatcattgaaatgaacatataagttctggacgagtattgacactgctataggatgtctaacctgcacggtttcccattgcggttttcattagaaagacccaaacacaacgccttaaccactcggtcgatacctaaggtcacgcgagcatattatctattgacctatcggggtaacggactgatttcattgctgcacatgtgaatctatataaatactggaatatgaaagcgattcctggactttgctggcgcagtgtaataaacagtttgctactctgataaaggccagaggctcctaatggtgtgtctattaccattcaccattgaccctcctcggatgctgacgtaatctgctataacttgatacggcgcaactcgatcgggagtggggcatccatgaggatatgcacatagtgcgatagactcatcccactcaactcgaaaaaccattacattcattcaagacagctcggcgtgaaagtgttgtcgctcggaatcagcatttggaacaagttccagccactgaagatatctaactagtagcggactcagaagtcaggtcgtccagcagcaaggtcaccgcgccagagcctagcgtggtcgaagctccagtattttacaacgctgcccaaaagcgtcttgaatcttgaaaatccattgcgaccaccctatccaagcatttcgacatagacactgagactgctgtgtcgtcatcaatctaacatccgtctataatgctctccgacgatgacgattccactccaccgccgcagaattcagcggcgcgagccaatgattcggacgcattctctgaaaatgatggcgatgaacagatcccggactttcgctttttcacagctctcggtgcctcatcccaaaagtcagcgtccggcaagacagtaagacgcggcgagaaggatttcgagtcccatggcacgcgcgctcaagatggggtcctcgagtccagtcgctctgctatgcatgaggtgctcagttacacgcgacaatcaacgcctaagaatgtaatgcgcggctggtactttcctgacagatgggccgacatgccggatgaaaatcagtccactatcaacaagtcaaaggcaaatgatagaggctctagctactccatgttcgcgcgtgaacgcgtcgttgcaatcgaagtcgaaaagggtcctttgctcacttccatgggtcgcatcgtaactggagttgataagaacacaccaggatggcagaagctttggttgctaccagaggaggcactgttcttgatagaacgcgggtctttggatctatggtggccatcacgagggattgaggatgtgttcccactggaagatgaagaatctgatgacttgtctgagaagcctttatctgattcggaacgcaagtctctcgaggaatatgaacttggtgttccagttggtctccaaggcgcctacgcgcttttgatcggacgcgacggggaacggggaaagatcagccttgagaagttccaagtttacgccagtttaagaagaactggatactcggttttgcgtgcgacaccgctagagcggccatcaccaccatcaccaccatcaccccaacctctgtggcatcgtctgtattcactcttatccaacactcttacctattcgcattcacagcacagccattccaattgtgggccgttgttgagaccaggcctatatcgctcttatacaccaatattcgagcagctggcactcattccgagacacaagcccactgaatatgtaccgcttgattatcctgaacctcaagaacccttcaaggttcattttcatatatggaaagcccaggcagtcttcacgaaagttcgtccgccgccacctgacttccgcatttgcgttgtcgatgcgcgcgaaacgggtgttccaacgctggagcaactcgatgcattactcatgtccacaccattcgatccgcctccggagcgagaccgagacgtcaaaggagcggggtttgtatataagcgtttgaagcacggttggagaaacgtcttagtcgccgttgtcgatcgtggtatgatcagctaccttaattttggggagatggccttcggagaggagaaattgtacgagaacccggacataaagcctaggagcaagcgcggtcgtagtgcaggtagaggcggtgcgaggcgcggaagaggtagagggcgttgaagaatgttcacgatacctaacgtatccgaagtggcaaacgtgtcaaatcaccaataatccagctgattcaaacagctagagaagcatagtagtaaataggattacgatggatggtcctaccatgaggacaatctctaattgtagtaatcaacatattac

SEQ ID NO: 38723 - DNA, 996 bp, Muscodor strobelii
  misc_feature: SGI cDNA ID NO. 573461
  misc_feature: Encodes the peptide sequence at SEQ ID NO 38724
atgattctgcagttcctctctgtcgcggtgcttcttttcgaagcatgtgcggcagtgcccacgaagctaggccacgcgcactcgactactggctgtgggaaacatccaaggattgaactaggccagcgccataatgtaacattagcaagcgggagaagatacttgctttgggtacctccagattacaatgcgaatgaaaagacaccgttgatcttttcgcatcatggggccaacaagacgccagatcagcacgctaacctggatctcttgacaacgcctcacttcaacaaagaccatattgttgtctatccatcatcagagacgtacccgtggaagaatgccactggcaggtactggcaagggtcgccgcaagttggggattctgtcgacgatgttggtttcgtcctggacatctttgaaaatatcaaggaggaactttgcattgacttgcatcgtgtctacgctacaggaaaatcacaaggtgccatgatggtcaacaatctcgcatgcgacgcacgatcatcctcagtcatagcggcatttgcgcccgtctcaggctcatactacgtcaacgtgacagaggacgaatgcgatcctcttacgctgaagtttgaatgcaggccaaaccgtcacaacgtcccgatactgttctttcatggtggcgatgacatgacgattgcgtacggcggcggtgtacgtagcggagagtgtttgccatatgttccatattttgtgtccagatgggcacatcgcattgggcttggtgacagaccagtgcgagataatcggcttgctggagataactcctctgtctatacatacggcactggcaggtggcaagggctgatttcattggtgtatgacggaaatcatgtccgacatgactggccatcaacgaatgtcaatgctgaccagattgaaaatggctctggacctgctactttcaatgcaagcacgattatcatggagttctttcgcaagtacactcttgtgtaa

SEQ ID NO: 38724 - protein, 331 aa, Muscodor strobelii
  misc_feature: SGI Peptide ID NO. 573461
  misc_feature (28)..(330): NCBI GI: 156046192 Blast Desc: SS1G_09363 [Sclerotinia sclerotiorum 1980] gi|154693758|gb|EDN93496.1| SS1G_09363 [Sclerotinia sclerotiorum 1980]
  misc_feature (45)..(330): NCBI GI: 238483749 Blast Desc: ferulic acid esterase (FaeA), [Aspergillus flavus NRRL3357] gi|220701163|gb|EED57501.1| ferulic acid esterase (FaeA), [Aspergillus flavus NRRL3357]
  misc_feature (38)..(330): NCBI GI: 154319772 Blast Desc: BC1G_02367 [Botryotinia fuckeliana B05.10] gi|150856025|gb|EDN31217.1| BC1G_02367 [Botryotinia fuckeliana B05.10]
  misc_feature (52)..(330): NCBI GI: 121709098 Blast Desc: ferulic acid esterase (FaeA), [Aspergillus clavatus NRRL 1] gi|119400456|gb|EAW10881.1| ferulic acid esterase (FaeA), [Aspergillus clavatus NRRL 1]
  misc_feature (52)..(330): NCBI GI: 119489245 Blast Desc: ferulic acid esterase (FaeA), [Neosartorya fischeri NRRL 181] gi|119411032|gb|EAW20977.1| ferulic acid esterase (FaeA), [Neosartorya fischeri NRRL 181]
  misc_feature (47)..(330): NCBI GI: 39976577 Blast Desc: MGG_05788 [Magnaporthe grisea 70-15] gi|145011978|gb|EDJ96634.1| MGG_05788 [Magnaporthe grisea 70-15]
  misc_feature (28)..(330): NCBI GI: 189189210 Blast Desc: Poly(3-hydroxybutyrate) depolymerase [Pyrenophora tritici-repentis Pt-1C-BFP] gi|187972550|gb|EDU40049.1| Poly(3-hydroxybutyrate) depolymerase [Pyrenophora Pt-1C-BFP]
  misc_feature (28)..(330): NCBI GI: 169612485 Blast Desc: SNOG_09365 [Phaeosphaeria nodorum SN15] gi|111062437|gb|EAT83557.1| SNOG_09365 [Phaeosphaeria nodorum SN15]
  misc_feature (49)..(330): NCBI GI: 242823154 Blast Desc: conserved [Talaromyces stipitatus ATCC 10500] gi|218712953|gb|EED12378.1| conserved [Talaromyces stipitatus ATCC 10500]
  misc_feature (29)..(331): NCBI GI: 256672132 Blast Desc: secreted protein [Streptomyces sp. AA4]
  misc_feature (50)..(295): SWISSPROT Homolog: EC 3.1.1.73 Feruloyl esterase
MILQFLSVAVLLFEACAAVPTKLGHAHSTTGCGKHPRIELGQRHNVTLASGRRYLLWVPPDYNANEKTPLIFSHHGANKTPDQHANLDLLTTPHFNKDHIVVYPSSETYPWKNATGRYWQGSPQVGDSVDDVGFVLDIFENIKEELCIDLHRVYATGKSQGAMMVNNLACDARSSSVIAAFAPVSGSYYVNVTEDECDPLTLKFECRPNRHNVPILFFHGGDDMTIAYGGGVRSGECLPYVPYFVSRWAHRIGLGDRPVRDNRLAGDNSSVYTYGTGRWQGLISLVYDGNHVRHDWPSTNVNADQIENGSGPATFNASTIIMEFFRKYTLV

SEQ ID NO: 38725 - DNA, 2134 bp, Muscodor strobelii
  misc_feature: SGI EST ID NO. CUFF.93113.0
  misc_feature: Variant of the nucleotide sequence at SEQ ID NO 38723
cggctaaggtgcttaagtagcgtaatgagcacttctgaagacgcatataaggatacacaactccggcagtctcactacatacgaaggttatgatgatcaaggcagagcatgaaaataacgcgatttgattggtcaaagctatcggactggggctcggcagcaacttcggctcatttccagcgagacgacaaatcaaaagattcttgagcgatgagtgatttgctggcctcacccgaacctttcctcacgagcatgcaagtccatcaaggactaggacatgaggaaccaactctagtccaacaagagcctagtcatccagaacgtcgggccttccccgcacagttagttatcgcacggggaaacgtcacttgaagaaaacatggggcgaaagggaatagacgagttcagtgacggcatagtcacaagatgacctgcattggtgactggagacagcagtaatccattcaatggcgtatatgggttcatggagcgactggaagcgagagacgaagcggtaatataacgtccctaggtatatagacccttcaacatatttacccgagatattactttctgaaatgccaaagtgtcgacatattctttccgctagcttagtcctactcacttctctctctgacaaagaaacatgattctgcagttcctctctgtcgcggtgcttcttttcgaagcatgtgcggcagtgcccacgaagctaggccacgcgcactcgactactggctgtgggaaacatccaaggattgaactaggccagcgccataatgtaacattagcaagcgggagaagatacttgctttgggtacctccagattacaatgcgaatgaaaagacaccgttgatcttttcgcatcatggggccaacaagacgccagatcagcacgctaacctggatctcttgacaacgcctcacttcaacaaagaccatattgttgtctatccatcatcagagacgtacccgtggaagaatgccactggcaggtactggcaagggtcgccgcaagttggggattctgtcgacgatgttggtttcgtcctggacatctttgaaaatatcaaggaggaactttgcattgacttgcatcgtgtctacgctacaggaaaatcacaaggtgccatgatggtcaacaatctcgcatgcgacgcacgatcatcctcagtcatagcggcatttgcgcccgtctcaggctcatactacgtcaacgtgacagaggacgaatgcgatcctcttacgctgaagtttgaatgcaggccaaaccgtcacaacgtcccgatactgttctttcatggtggcgatgacatgacgattgcgtacggcggcggtgtacgtagcggagagtgtttgccatatgttccatattttgtgtccagatgggcacatcgcattgggcttggtgacagaccagtgcgagataatcggcttgctggagataactcctctgtctatacatacggcactggcaggtggcaagggctgatttcattggtgtatgacggaaatcatgtccgacatgactggccatcaacgaatgtcaatgctgaccagattgaaaatggctctggacctgctactttcaatgcaagcacgattatcatggagttctttcgcaagtacactcttgtgtaagcatgctgaggcacatagtagttcgacatattttagagcaatacacataatcaccaaaattattttaagcagtggcatggatctaagcattacgagatccattagcctttgatagtctcaaggtattgaagtatggctacagaatgcaacctcacggcctctcttcattgcgtacagatctcttgttgtaaagaaaactatttagtttaaccatataagcctatgtatagacatcttactgctctcgtattcagacctaattcatatccatagattagaataaacatgccgtctattccgtgcctgcgagggatgtgtgataggactacgagccatacactttccaacaagggtcactcgatataccaagattaggaagatgcttgctcaagatgcagcatccccttttaaggaagccagcaaggagaattttgatagttgagttctcgtgacaatgagaatttcccttgttgtgagtggatggtcccaagc

SEQ ID NO: 38726 - DNA, 486 bp, Muscodor strobelii
  misc_feature: SGI cDNA ID NO. 573462
  misc_feature: Encodes the peptide sequence at SEQ ID NO 38727
atggcgctaggcgttaagcgcaagcgaggtcccgagcccgactcgaaggcaaccgtcgttcgcaaagtaatcagatcgccgcccgaccgcgacatcgtcactgagatggtcccccttcccgaagacatgggtgaacagctcgagcgcatcgctacttccaatcgcacacctttcgagaagaaagtctggacccttctctgccagattccgcccggtcaagtctccacttacggactcatgtctgcacatctcaactcatcgcccagagctgtcggcaacgcactgcgacgcaatccgttcgcccctcaagtaccctgccatcgtgtcgtagccactggtggagctctcggaggcttcaaaggcttcccgtccaagaacggagagggcatcacaatcggcgagaagaagatgctacttcgcaaggagggtgtgaaaatcgatgagaagggacgcgtgctcggaacaccctggagcgcatttgtctag

SEQ ID NO: 38727 - protein, 161 aa, Muscodor strobelii
  misc_feature: SGI Peptide ID NO. 573462
  misc_feature (55)..(147): Pfam Id: PF01035 Pfam Desc: 6-O-methylguanine DNA methyltransferase, DNA binding domain
  misc_feature (55)..(121): Pfam Id: PF01035 Pfam Desc: 6-O-methylguanine DNA methyltransferase, DNA binding domain
  misc_feature (36)..(160): NCBI GI: 145606258 Blast Desc: MGG_02429 [Magnaporthe grisea 70-15] gi|145013970|gb|EDJ98611.1| MGG_02429 [Magnaporthe grisea 70-15]
  misc_feature (11)..(161): NCBI GI: 110617776 Blast Desc: RING-2 [Gibberella zeae]
  misc_feature (46)..(161): NCBI GI: 256728901 Blast Desc: [Nectria haematococca mpVI 77-13-4]
  misc_feature (43)..(161): NCBI GI: 46138743 Blast Desc: FG10886.1 [Gibberella zeae PH-1]
  misc_feature (41)..(158): NCBI GI: 261356769 Blast Desc: RING-2 [Verticillium albo-atrum VaMs.102]
  misc_feature (56)..(160): NCBI GI: 171690126 Blast Desc: protein product [Podospora anserina] gi|170945011|emb|CAP71122.1| protein product [Podospora anserina]
  misc_feature (29)..(160): NCBI GI: 67536834 Blast Desc: AN4587.2 [Aspergillus nidulans FGSC A4] gi|40741740|gb|EAA60930.1| AN4587.2 [Aspergillus nidulans FGSC A4] gi|259482581|tpe|CBF77199.1| TPA: methyltransferase nidulans
  misc_feature (40)..(161): NCBI GI: 238845844 Blast Desc: methylated-DNA-protein-cysteine methyltransferase [Microsporum canis CBS 113480]
  misc_feature (56)..(152): NCBI GI: 154294711 Blast Desc: BC1G_13482 [Botryotinia fuckeliana B05.10] gi|150844617|gb|EDN19810.1| BC1G_13482 [Botryotinia fuckeliana B05.10]
  misc_feature (56)..(160): NCBI GI: 156048760 Blast Desc: SS1G_09112 [Sclerotinia sclerotiorum 1980] gi|154693508|gb|EDN93246.1| SS1G_09112 [Sclerotinia sclerotiorum 1980]
  misc_feature (42)..(145): SWISSPROT Homolog: EC 2.1.1.63 Methylated-DNA--[protein]-cysteine S-methyltransferase
MALGVKRKRGPEPDSKATVVRKVIRSPPDRDIVTEMVPLPEDMGEQLERIATSNRTPFEKKVWTLLCQIPPGQVSTYGLMSAHLNSSPRAVGNALRRNPFAPQVPCHRVVATGGALGGFKGFPSKNGEGITIGEKKMLLRKEGVKIDEKGRVLGTPWSAFV

SEQ ID NO: 38728 - DNA, 1211 bp, Muscodor strobelii
  misc_feature: SGI EST ID NO. CUFF.93143.0
  misc_feature: Variant of the nucleotide sequence at SEQ ID NO 38726
tttgaattctcgccttcggaagtcccgcggaagtcacggacattggccacattggcagcaatcacgtggtttggcgtcacgcgtcaaagcctcccatttcagcaccttcgcgccctcgattctccaaattcccattgctaccaaacctgaaaactgcgatctttacaaatacaaggctgcttccagacttgccagaatcacacaattctacatcatctgaaaagcacatcgcatcgcctcagcttctgaccttcaacacatcaacaattcacatcgtctcatccaccaaaacgctccgcacacgcttagctcagaatacaatggcgctaggcgttaagcgcaagcgaggtcccgagcccgactcgaaggcaaccgtcgttcgcaaagtaatcagatcgccgcccgaccgcgacatcgtcactgagatggtcccccttcccgaagacatgggtgaacagctcgagcgcatcgctacttccaatcgcacacctttcgagaagaaagtctggacccttctctgccagattccgcccggtcaagtctccacttacggactcatgtctgcacatctcaactcatcgcccagagctgtcggcaacgcactgcgacgcaatccgttcgcccctcaagtaccctgccatcgtgtcgtagccactggtggagctctcggaggcttcaaaggcttcccgtccaagaacggagagggcatcacaatcggcgagaagaagatgctacttcgcaaggagggtgtgaaaatcgatgagaagggacgcgtgctcggaacaccctggagcgcatttgtctaggcgccagtgtgatctgcattgtacgataaaaagttcacgaatgtctatgggtcaatcattgtgttcggcgtaaaggttggagggagtatcggcttgggttcagtggaagttggtctgaatctgctggcgtctttgtgtttacatgcaccagaataggtgccgaacaaaatgctgatgtttgaacatcagcaaaacctgtatgtttgccgcgtctgtactagtctttttatgtgcgagaccggtcttgatcacatctatcacgattgtggcgcataataatcgagaagcaaattggtcttgctcaattatttacgacgtttctcatcagcttatgcgaaaacgtgaatttgtctctactaacactcagctttctccatccccgctacgcgaactcgtcagctgctt

SEQ ID NO: 38729 - DNA, 537 bp, Muscodor strobelii
  misc_feature: SGI cDNA ID NO. 573463
  misc_feature: Elevated expression when VOC is produced
  misc_feature: Encodes the peptide sequence at SEQ ID NO 38730
atgtctcaatcctttggccaccctactccagctcgagcttacgagcttggcgtccagcatgctactcttcttcgtcatctctataaccatccgcagtatgtctttcaggagcctccaacggccgaaataatgaaggtagacccgcaccgaacgccacagggcttgctcttcatcaccgactttgtcgaaaatacgtacgtcaaatatgtgacaccatttctgcctcaaggagccagtcgcaagtgtgaggagcttggcaacccctgggcgtacaaggactctgattacaagtgggagtggagctgggatgccggaaccaacactctgaaagacgccaatggtaacgagatcgcattcccacgattgtccagcgcaatggccaaagaagctagtaccgacgtatttactcgggccctcatgaccaaaaagatcattttagagaatggcagtgacccaatggctgcagctttgctaggtggtcaaagtattgatttcggtgaagaagctaaggcagcagcacgggcactagatggatag

SEQ ID NO: 38730 - protein, 178 aa, Muscodor strobelii
  misc_feature: SGI Peptide ID NO. 573463
  misc_feature: Useful for introducing or modulating the production of volatile compounds
MSQSFGHPTPARAYELGVQHATLLRHLYNHPQYVFQEPPTAEIMKVDPHRTPQGLLFITDFVENTYVKYVTPFLPQGASRKCEELGNPWAYKDSDYKWEWSWDAGTNTLKDANGNEIAFPRLSSAMAKEASTDVFTRALMTKKIILENGSDPMAAALLGGQSIDFGEEAKAAARALDG

SEQ ID NO: 38731 - DNA, 1381 bp, Muscodor strobelii
  misc_feature: SGI EST ID NO. CUFF.93146.0
  misc_feature: Variant of the nucleotide sequence at SEQ ID NO 38729
tttcaaagtactgttaatcatatttaaggcgagcctcagtcgtgggcattgagcggctgcagctaatgacgcaggacttatataatcagatggcggggaacccctcgtgcatcaatatgctttacccctccacggtgcgacgcgtcgcgtacctctccatttaatcttctgtacgtgctaaaacgtccctgtccataaagccattgacgaagcctaccaatatgtctcaatcctttggccaccctactccagctcgagcttacgagcttggcgtccagcatgctactcttcttcgtcatctctataaccatccgcagtatgtctttcaggagcctccaacggccgaaataatgaaggtagacccgcaccgaacgccacagggcttgctcttcatcaccgactttgtcgaaaatacgtacgtcaaatatgtgacaccatttctgcctcaaggagccagtcgcaagtgtgaggagcttggcaacccctgggcgtacaaggactctgattacaagtgggagtggagctgggatgccggaaccaacactctgaaagacgccaatggtaacgagatcgcattcccacgattgtccagcgcaatggccaaagaagctagtaccgacgtatttactcgggccctcatgaccaaaaagatcattttagagaatggcagtgacccaatggctgcagctttgctaggtggtcaaagtattgatttcggtgaagaagctaaggcagcagcacgggcactagatggatagacttgaccggtgtaatttcgtaacttgcacatgtaggtaggaattggcctcggaacaacgaatttttgacgctggatccggctcccatagctctaccaggacgcgaccagtgctgcttagcatatgacaacatcaggagccctatctaaaaagggcagcgcagcgagtatacaaatcatttcgaaaccgacataactattccataacgaaacgagagcgacaggacgctccgaatacttcatatatatgacgcatccttatgagcttagtattggcatgctgtgtgctctaatatactaagcgtacaggcgttcatttgagctagggattacgtagtgtatgcgcacgcgaagcaaaaagccgtcgctcgtaactacgaactagtcgaggaacaagttccgtagctaagcaaccttgtctaagtttgttgcgcttgagcactacctcggtttcatgatgcagctacagcagtcaacattgttatcattgcactagtcatagttccatatggacaagatagccggtcacagtaaacatatcttaggttagaacaccatagcttctcaaaatatctaacgcatttggtgggaactttgagttcctggctatggcttgaaagcgaa

SEQ ID NO: 38732 - DNA, 1761 bp, Muscodor strobelii
  misc_feature: SGI cDNA ID NO. 573464
  misc_feature: Reduced expression when VOC is produced
  misc_feature: Encodes the peptide sequence at SEQ ID NO 38733
atgtcgctcgcccaacatgtcacggctatcgaaggtgtcgaccgtgatgtccctaatgacgaatcggcagattctctgctcaccaccaagggactgtggcgtcccctgagctacgatcccctcgctcccactgagcgtctcgaaaccattgaacccatcgtggaaccttttccacatatacctgcctataaggtttcaacaagacgacgtgttgcccaggtcgccttcggtgctctcctctgttgcattgcctcgggtgtcgtctttgggtttgcctcattgaaacctatcctgatcgccgagggtgtctatggcgagttatgtgacacccaagagagcagtgaagatggtgtacccaacgttccttgccccgagcaagacatgcgtcttaatctcttcttcgttgctgcgtctattgtagccaacatcgcatcgttattcgcgggctatgctcttgatcagtttggtcggcgtacgtgctacattgcagctgcactcttcattgccactggttgtgtgatcatgggatatgcctttgccattccggaatttgatggatatcttgctggcaatgttatgctgtctttcggtggcacctttctatttgtgcccagcttccagctggctaatgcattcccaaaatactcaggcgtgatcgttgcagttattacaggatcatttgatgcatccgcagccgttttactgctctacagtttcgcatgggaggcgactggtggctctttcgcgcccaatcagtttttcttcgcctttttaattgtacctgtgatccttttaataggagaatttgggctcatgccggcagatgcataccagacgacacctgagctggagcacaagatcgagaaagtccaagatgcaacacgcgatatacatgattctgatcaggacatcgacagcgagacagagctatatcgtgtgcgtagcaatcgcgccgagcgccggctcataaagcttgatcagattgaggacattatcggcgatgctgaagagcgtgaagagcgtgcccacaaggaggaagagatccacgtagccagcggtgtctggggtgtgttgcatggtcttcccgttcaccggcaaatgctctcgcctttttttatcctgatcttgctgttgacaattgtcacgatgcaaaagatgaatttcttcattgcatcgatcgaatctcaataccgattcctcttacagtcggacgaacatgccgaagcaattaatagattcttcggcatcgcgttaccacttggagggatcatcaccacgccttttatcgggtggctgttgaacaacatgagtgttacggcgattgtcggactgttgactgggtttagtgctgttattggcatccttaacagtctgccgttcgtttgggctggctatgcgacagtagtcatgttctgcatctttcgacctttatactattcggctatgtccgactatgctaccaaaatttttggctttgctacttttggccggctttacggggctatcacctgcatttctggagtactcagcttctcgcagtcaggcattgacatcttagtccacgggccactgaatggcaatccgacaccgattaacatagcgatggcgatcgccagcaccggtattggtctctatttgacattcttcgtcgcagccaagaccagagattaccaaaacgaaatccaacattgtcagacagctccagaagagaggctgcaattaattcgcgaggagcatgatgcgtatggaacgatggtttaa

SEQ ID NO: 38733 - protein, 586 aa, Muscodor strobelii
  misc_feature: SGI Peptide ID NO. 573464
  misc_feature (77)..(511): Pfam Id: PF07690 Pfam Desc: Major Facilitator Superfamily
  misc_feature (1)..(584): NCBI GI: 256728109 Blast Desc: NECHADRAFT_54183 [Nectria haematococca mpVI 77-13-4]
  misc_feature (1)..(555): NCBI GI: 145248860 Blast Desc: An14g01420 [Aspergillus niger] gi|134081440|emb|CAK41922.1| protein product [Aspergillus niger]
  misc_feature (1)..(555): NCBI GI: 255938532 Blast Desc: Pc14g00410 [Penicillium chrysogenum Wisconsin 54-1255] gi|211584657|emb|CAP74182.1| Pc14g00410 [Penicillium chrysogenum Wisconsin 54-1255]
  misc_feature (1)..(556): NCBI GI: 115387717 Blast Desc: conserved [Aspergillus terreus NIH2624] gi|114195448|gb|EAU37148.1| conserved [Aspergillus terreus NIH2624]
  misc_feature (1)..(581): NCBI GI: 119487154 Blast Desc: MFS transporter, [Neosartorya fischeri NRRL 181] gi|119410589|gb|EAW20535.1| MFS transporter, [Neosartorya fischeri NRRL 181]
  misc_feature (1)..(550): NCBI GI: 70982065 Blast Desc: MFS transporter [Aspergillus fumigatus Af293] gi|66844184|gb|EAL84523.1| MFS transporter, [Aspergillus fumigatus Af293] gi|159122205|gb|EDP47327.1| MFS transporter,
  misc_feature (1)..(584): NCBI GI: 46115818 Blast Desc: FG03751.1 [Gibberella zeae PH-1]
  misc_feature (1)..(561): NCBI GI: 121714477 Blast Desc: MFS transporter, [Aspergillus clavatus NRRL 1] gi|119403003|gb|EAW13423.1| MFS transporter, [Aspergillus clavatus NRRL 1]
  misc_feature (1)..(578): NCBI GI: 67541949 Blast Desc: AN7138.2 [Aspergillus nidulans FGSC A4] gi|40742200|gb|EAA61390.1| AN7138.2 [Aspergillus nidulans FGSC A4] gi|259483531|tpe|CBF78997.1| TPA: amino acid transporter FGSC
  misc_feature (1)..(560): NCBI GI: 242814936 Blast Desc: MFS transporter, [Talaromyces stipitatus ATCC 10500] gi|218714810|gb|EED14233.1| MFS transporter, [Talaromyces stipitatus ATCC 10500]
  misc_feature: Useful for introducing or modulating the production of volatile compounds
MSLAQHVTAIEGVDRDVPNDESADSLLTTKGLWRPLSYDPLAPTERLETIEPIVEPFPHIPAYKVSTRRRVAQVAFGALLCCIASGVVFGFASLKPILIAEGVYGELCDTQESSEDGVPNVPCPEQDMRLNLFFVAASIVANIASLFAGYALDQFGRRTCYIAAALFIATGCVIMGYAFAIPEFDGYLAGNVMLSFGGTFLFVPSFQLANAFPKYSGVIVAVITGSFDASAAVLLLYSFAWEATGGSFAPNQFFFAFLIVPVILLIGEFGLMPADAYQTTPELEHKIEKVQDATRDIHDSDQDIDSETELYRVRSNRAERRLIKLDQIEDIIGDAEEREERAHKEEEIHVASGVWGVLHGLPVHRQMLSPFFILILLLTIVTMQKMNFFIASIESQYRFLLQSDEHAEAINRFFGIALPLGGIITTPFIGWLLNNMSVTAIVGLLTGFSAVIGILNSLPFVWAGYATVVMFCIFRPLYYSAMSDYATKIFGFATFGRLYGAITCISGVLSFSQSGIDILVHGPLNGNPTPINIAMAIASTGIGLYLTFFVAAKTRDYQNEIQHCQTAPEERLQLIREEHDAYGTMV

SEQ ID NO: 38734 - DNA, 2603 bp, Muscodor strobelii
  misc_feature: SGI EST ID NO. CUFF.93152.0
  misc_feature: Variant of the nucleotide sequence at SEQ ID NO 38732
cggtagttcagaaagtaatgcaaacaatgtgcaaagttaccaaagcttggaatcatccatgtggataatacgagagtatccagctgtcaaaagagtcggcaagaaggtcgaaattcaaatcctagttgcctttccctctccaccagatcctacggttccccataatatagactagtctttagactatacccatgcatatacccagtctcggctcactcgcagtagcttgtctgtcttataatactttttcaagtcacgctgtctcgaccaactaggtagacgcccgatcgaccgatcactcgcaggccccattagctagacagaacccttgataattatctcgtctccctcggaggtcgacgagaacatagtctcccttgaagagaccatcgcgacacaacctatctttctgcccgcgaggtttcgatgtcgctcgcccaacatgtcacggctatcgaaggtgtcgaccgtgatgtccctaatgacgaatcggcagattctctgctcaccaccaagggactgtggcgtcccctgagctacgatcccctcgctcccactgagcgtctcgaaaccattgaacccatcgtggaaccttttccacatatacctgcctataaggtttcaacaagacgacgtgttggtgcgtcatatttcgtagtggataatgagaaatgcatgtcgatgagacataactgatattttctgccaacagcccaggtcgccttcggtgctctcctctgttgcattgcctcgggtgtcgtctttgggtttgcctcattgaaacctatcctgatcgccgagggtgtctatggcgagttatgtgacacccaagagagcagtgaagatggtgtacccaacgttccttgccccgagcaagacatgcgtcttaatctcttcttcgttgctgcgtctattgtagccaacatcgcatcgttattcgcgggctatgctcttgatcagtttggtcggcgtacgtgctacattgcagctgcactcttcattgccactggttgtgtgatcatgggatatgcctttgccattccggaatttgatggatatcttgctggcaatgttatgctgtctttcggtggcacctttctatttgtgcccagcttccagctggctaatgcattcccaaaatactcaggcgtgatcgttgcagttattacaggatcatttgatgcatccgcagccgttttactgctctacagtttcgcatgggaggcgactggtggctctttcgcgcccaatcagtttttcttcgcctttttaattgtacctgtgatccttttaataggagaatttgggctcatgccggcagatgcataccagacgacacctgagctggagcacaagatcgagaaagtccaagatgcaacacgcgatatacatgattctgatcaggacatcgacagcgagacagagctatatcgtgtgcgtagcaatcgcgccgagcgccggctcataaagcttgatcagattgaggacattatcggcgatgctgaagagcgtgaagagcgtgcccacaaggaggaagagatccacgtagccagcggtgtctggggtgtgttgcatggtcttcccgttcaccggcaaatgctctcgcctttttttatcctgatcttgctgttgacaattgtcacgatgcaaaagatgaatttcttcattgcatcgatcgaatctcaataccgattcctcttacagtcggacgaacatgccgaagcaattaatagattcttcggcatcgcgttaccacttggagggatcatcaccacgccttttatcgggtggctgttgaacaacatgagtgttacggcgattgtcggactgttgactgggtttagtgctgttattggcatccttaacagtctgccgttcgtttgggctggctatgcgacagtagtcatgttctgcatctttcgacctttatactattcggctatgtccgactatgctaccaaaatttttggctttgctacttttggccggctttacggggctatcacctgcatttctggagtactcagcttctcgcagtcaggcattgacatcttagtccacgggccactgaatggcaatccgacaccgattaacatagcgatggcgatcgccagcaccggtattggtctctatttgacattcttcgtcgcagccaagaccagagattaccaaaacgaaatccaacattgtcagacagctccagaagagaggctgcaattaattcgcgaggagcatgatgcgtatggaacgatggtttaagcgaggagttctacaggcgttgactggattcaaatattgttatgtttagatgacagcgggagttttggcgtatcatgggaaagtcatacgaaaagttcaatcggaatattacgggaaacatgtgtttacgacgacattctgatgacgatttcaagatacagtgctgtatatgtatccgggagctcagctccttgtaaggggctcagtatccttatagttctaataatgattatctactgtgcacttctagttgttgattcacaacatgtgacccaattacatacgcagatgtcagtcttttcatgttgccactggtaatctggttgttcaccttcaaggctgtc

SEQ ID NO: 38735 - DNA, 387 bp, Muscodor strobelii
  misc_feature: SGI cDNA ID NO. 573465
  misc_feature: Encodes the peptide sequence at SEQ ID NO 38736
atgctgcccagcgtgcagctctgcgaggcttgtgatactcaaaacccagcggcagagtatcgcgaacacgggaaactgcttcgctgcgatttggcacgaagggcaattaaaatgtgtcgtcgaggccaaacgatgtgcatcactcgaaacgacatggatgtatacgttcatacaaacgataagggcttagcatgtgtactcatcagtgaaacgaaacatgcgtaccccaaacaagtcgcagaagacacagtcaaatacatcccagacaagttcgagagcgagacatgttatgagctactgaaagtcgagggagatgatcgtttgagatacaacaataccgtttcttaccctgatctcggctatatacgacgacgcgggttatcgtaa

SEQ ID NO: 38736 - protein, 128 aa, Muscodor strobelii
  misc_feature: SGI Peptide ID NO. 573465
MLPSVQLCEACDTQNPAAEYREHGKLLRCDLARRAIKMCRRGQTMCITRNDMDVYVHTNDKGLACVLISETKHAYPKQVAEDTVKYIPDKFESETCYELLKVEGDDRLRYNNTVSYPDLGYIRRRGLS

SEQ ID NO: 38737 - DNA, 735 bp, Muscodor strobelii
  misc_feature: SGI cDNA ID NO. 573466
  misc_feature: Reduced expression when VOC is produced
  misc_feature: Encodes the peptide sequence at SEQ ID NO 38738
atgtctgaccggccggactctccgcctggccgggagaagtctccgcaaccgcccaaaggccccagaggctacgaccgcagccgttcgcctcgtcgcaacagagaccaccgcagtgaagacagcagcagacggcgcgacgactacagaccccgcagcgatgatcgctatcgagactcgcgcgatgatgacgaccgcagagatcgcgaccgcgacagagatcgacctcggcccaagaagaacttcggcggtttcaagtacaaggagaaacgccgtgatgacgacgacgaccgagacgaaagaccccggggcagctcctaccgtggctatcgagaccgctcgccctcgccccgccgcagagaccgtgatcgcgaacgtaaccgcgaccgcgaccaagatcgccatgcttcctcgtcttccaaatccaagaaaaggtcgtctgaaatagatacatcgaagccgcccgctagagcccccgcagcaccttcagcacccagtgaagagatgatcatagtacacgtcaacgatcgactaggaaccaaggcacagattccttgcttcgccagtgatcgcatcaaagaattcaaggtcttggtagccgccaaaattggacgagaaccacacgagattcttctcaagagacaggggcagcgcccgtttaaagacatcctcactctcgccgactacgagatcagcaatggcgtacagctggatctggaggtcgacaccggcgactaa

SEQ ID NO: 38738 - protein, 244 aa, Muscodor strobelii
  misc_feature: SGI Peptide ID NO. 573466
  misc_feature (75)..(244): NCBI GI: 39977563 Blast Desc: MGG_06666 [Magnaporthe grisea 70-15] gi|145013819|gb|EDJ98460.1| MGG_06666 [Magnaporthe grisea 70-15]
  misc_feature (71)..(244): NCBI GI: 212526862 Blast Desc: ubiquitin-like protein (HubA), [Penicillium marneffei ATCC 18224] gi|210072986|gb|EEA27073.1| ubiquitin-like protein (HubA), [Penicillium marneffei ATCC 18224]
  misc_feature (69)..(244): NCBI GI: 169763706 Blast Desc: [Aspergillus oryzae RIB40] gi|83770781|dbj|BAE60914.1| protein product [Aspergillus oryzae]
  misc_feature (69)..(244): NCBI GI: 238489661 Blast Desc: ubiquitin-like protein (HubA), [Aspergillus flavus NRRL3357] gi|220698456|gb|EED54796.1| ubiquitin-like protein (HubA), [Aspergillus flavus NRRL3357]
  misc_feature (82)..(244): NCBI GI: 226288980 Blast Desc: PADG_00781 [Paracoccidioides brasiliensis Pb18]
  misc_feature (82)..(244): NCBI GI: 225681816 Blast Desc: PABG_02359 [Paracoccidioides brasiliensis Pb03]
  misc_feature (82)..(244): NCBI GI: 226284359 Blast Desc: conserved [Paracoccidioides brasiliensis Pb01]
  misc_feature (83)..(244): NCBI GI: 225560230 Blast Desc: HCBG_03801 [Ajellomyces capsulatus G186AR]
  misc_feature (71)..(244): NCBI GI: 159127303 Blast Desc: ubiquitin-like protein (HubA), [Aspergillus fumigatus A1163]
  misc_feature (71)..(244): NCBI GI: 70999127 Blast Desc: ubiquitin-like protein (HubA) [Aspergillus fumigatus Af293] gi|66851922|gb|EAL92247.1| ubiquitin-like protein (HubA), [Aspergillus fumigatus Af293]
  misc_feature: Useful for introducing or modulating the production of volatile compounds
MSDRPDSPPGREKSPQPPKGPRGYDRSRSPRRNRDHRSEDSSRRRDDYRPRSDDRYRDSRDDDDRRDRDRDRDRPRPKKNFGGFKYKEKRRDDDDDRDERPRGSSYRGYRDRSPSPRRRDRDRERNRDRDQDRHASSSSKSKKRSSEIDTSKPPARAPAAPSAPSEEMIIVHVNDRLGTKAQIPCFASDRIKEFKVLVAAKIGREPHEILLKRQGQRPFKDILTLADYEISNGVQLDLEVDTGD

SEQ ID NO: 38739 - DNA, 4960 bp, Muscodor strobelii
  misc_feature: SGI EST ID NO. CUFF.93141.0
  misc_feature: Variant of the nucleotide sequence at SEQ ID NO 38737
cgaacacagacacattgagcagcctgggcactttcctcaccaccaagcagtggtacacggacacatctgaccccttcgggagagcaaattctgtcatgagctacgactatgaggccggagctatcttaacacaggagccgcgtgtgtggatcgccggtctaagcgacgaaggtggtgttggtgccttcctcgcggctatgatgaagcaagcgatacaacccaatgctgccgaggtagccaaactcgaaacattcgttacgagcgtcctctggggcactatccagacgtcagatttcgcagtgaggaagagcgtgttttactatcaaccctctgcactcccctcgtacaaatataacacggcttataactgggggaaactggtggtcttgggataaagccgatgcgtacgctgtcaatcgtgcgtatgattatgtgcacatcgccgcttcatattggtccttgtaccgtgttgcgcgggcgtacccaagtcttgtcacgaaacatacttgggattggtatctcaatcaagcctacaatacgatcatccgcgccaccaagtcagatgtcgggtacaacgccgatggtctcatgggagagaccgtttggggagagattctcaaagacttgacgagagagggaaacacgacccaagcttcaacgctgactgccgcaatgaagacgagggcaaccaactggaatagtcaagccgttccctatgggtctgagatggcatgggattccacggggcaagaaggtgtttattattggtctaagtacttcggctacaccagcacagcaaataaaacagtgaatagtgttcttggttacatgccgacagtccctcactggggatggaatggcaacgcgcgacgctattgggataatatctacggtggaaaattgcagcgtatcgagcggcagattcaccactacggttcaggtttgaatgctcttgtgcttctgtctgccttcaggagtaacccatcggacgcctacctgttgcaggtgggttggggtggaagcagtggacctctgtccagtatcaatcaagatggcttcgcagcggcatcgttccattcctggccagacaccctgaagtgggatgggtattccggtgattacggcccgggattcttgggaatggttcttggttcaggaacatacgtcgtccaacatccgacctttgggctcctcgcatacggcggtaccttaacatcttcgagtggtactgccagcgtaagtgtcacaggaccagtaagccgaagatttttcattgggccattaggtttgttggtcacggtggacgctggtagcatcacttctttctcgtactcgaccgacggaagcagcgtcactctttcgctggcccaaaccgcgggaggaccctcagcttctcaagctgtgctatggaccgagactacatcgggctcagcccaatactcggtgtcaagtccctcggtcagtcagtcgaggcaaggatgggctattcctctgggatcgagtgctgtgactgtcaagctgagcaaagcctgaacgcgaagaaattgaaacatcatctcaagatactgtatcaagcatcgacttagtcatatgaacaggcaaataacagtcaaacaatactcgattgaaccgcactgtgtctaccagtgatcgtagatcgttgctactcaggaaatgagtatactagctcagtagcagtaaaggtgaaactgtctaccacaaaacaatgcaccatttggacctggcaatagaagccctgaatagaatagacggcatggtatgagcagtgcgagaaaagattaagcaaaagagcgaacactgcatcatcagtttctcctcccgcaatcttttgcacctctctctagcccatcactccttcattgacctgcgtgctagcgccaaccaaggcactgcgatttgcgcgagggtggggcaggcacggcgtgacttctgcacgtaccgctaggcagagtgtagcacaaggtgcagcgcgaggacgctcagccgacagccgctgcagcttttgcttggttctgtatgctctgtcgatcatgccgcctgcatattggcactgggcacccatttcgtgacgcgcgatttttgacttgaaatcatatgctcgtggtctccgcgtcataatttgagatttctgacattggatccgagagcgacggagagtcgtaagtcggtcgtgaggaggttgttagactgcttcacgacatggagacctccataggtagagcttgaattagaacgctcgccacagtattgaactggcagacgtatcattcgcggtcatttcacacatgcccaaagccacctcatctatcccggacgccttcatgctgggtagcctagcatcattgtcaatacagggtggatatatcagagctggcatgagttgcttatgtcgagaaagagttctcagacagccatttctcaagccaggcattgaaatcgtcaggcaattccagattgaccatatgtgccgtgtcaaatctcccaacagttgcatttctcgcgtgctgtccgagccattccatggcctcgatagtctccatctcatctttcttgccaatgatgacgcccgtaggcatgtagagctcctcccggagccgctgtgcagttacaggccgagcgtttgtggacggaagggcctgtcctccaatacttttagactccctattagcaatatcaagcaaccagtcgtgcaatctttgcctttgccttggctgcattctgccttcagcctctctggggccatcgccccagtagcgtgtgttcagcagagcctgccgcttcatatctccgtcgtcgatcgctttctggatcatgttgccgagggcttcatcgcgaggatccgcagtgagttcgacgccgctgacaaacccggctgctgcaacgacgcccgacacgagctccgggtggttgagagcaagactcagtgcaaggccagctccaatactgagtccgatcaccactgcccgatcaagtcttaggctctgcaaatgaagcctcactagatctgcagcgtgcgttgtgtgatcgactggagaccgcggatcgctttctaggtacgatttcgaaggggttgacttcccgaagccatataagtcatatactagagtcgtccatcctttctgactgaaatatgcgacctgcgattcccacagcgatgagtcggctacgccagcgtgaatgaagaccaacagaagattcttagacgcaacatcagatccaggattggtaactgtccagctcagcactccctccggaacctcatgtgaaccggatgtagacatcattactgcatgtgctataccgagattctacaacgaaactgaccgttgtctacagaggccaaaggcgcattcgcggagaagctggaaagatctggggtaaaggcccagagcacgacaggctagtgcaggggcaaagctggtcttggcctcagctcgcccgaacatcaacattgcatacgaaatacgaaatgcgacttctctttattactgaagatggtgttagtctcaaagtgcccagagttagttagcatggtatgccaggaagccagccgccgcgcactggtctccttgctgcctgacacagtaaactgcgagtgactatcgacagacctagctggcatactaacctatagaatcttaagagtacatcaagagcatgtcgagttcaaacacgtcgacttttcacttagtttgccgtaaactgtactcataattccacaattcgcaaagtagagacgtagtgtgggtcacacagtgccattttccgtaattgtagctgtttaatcattgtacctgccccagcagtgacgtgcattcttctaccaaacctggaagcttcaatctgcaggtgaacatagttcgacctcgcgtcaagacgtcgaaaaactgtttgtcgcctctgaccactatctgttctcaatacactgtacatccgcgactatgtctgaccggccggactctccgcctggccgggagaagtctccgcaaccgcccaaaggccccagaggctacgaccgcagccgttcgcctcgtcgcaacagagaccaccgcagtgaagacagcagcagacggcgcgacgactacagaccccgcagcgatgatcgctatcgagactcgcgcgatgatgacgaccgcagagatcgcgaccgcgacagagatcgacctcggcccaagaagaacttcggcggtttcaagtacaaggagaaacgccgtgatgacgacgacgaccgagacgaaagaccccggggcagctcctaccgtggctatcgagaccgctcgccctcgccccgccgcagagaccgtgatcgcgaacgtaaccgcgaccgcgaccaagatcgccatgcttcctcgtcttccaaatccaagaaaaggtcgtctgaaatagatacatcgaagccgcccgctagagcccccgcagcaccttcagcacccagtgaagagatgatcatagtacacgtcaacgatcgactaggaaccaaggcacagattccttgcttcgccagtgatcgcatcaaagaattcaaggtcttggtagccgccaaaattggacgagaaccacacgagattcttctcaagagacaggggcagcgcccgtttaaagacatcctcactctcgccgactacgagatcagcaatggcgtacagctggatctggaggtcgacaccggcgactaaggagactaatagtatgggaatcctcaagatatataaatagtggttcaagattgatggcttcggaatgtgctgtagtataatagataccccaagttcgcattcgcaaacaaatcgatgtcactcttgctatatcacttgcaccctctgccttgatcgttctgactttttgttttctactcgagtagaatgttctagacgtaactatttgcaagtgacaagctgcttgcactattcacgactacggcgcgtgattgatgccgtcg

SEQ ID NO: 38740 - DNA, 900 bp, Muscodor strobelii
  misc_feature: SGI cDNA ID NO. 573467
  misc_feature: Encodes the peptide sequence at SEQ ID NO 38741
atgatgtctacatccggttcacatgaggttccggagggagtgctgagctggacagttaccaatcctggatctgatgttgcgtctaagaatcttctgttggtcttcattcacgctggcgtagccgactcatcgctgtgggaatcgcaggtcgcatatttcagtcagaaaggatggacgactctagtatatgacttatatggcttcgggaagtcaaccccttcgaaatcgtacctagaaagcgatccgcggtctccagtcgatcacacaacgcacgctgcagatctagtgaggcttcatttgcagagcctaagacttgatcgggcagtggtgatcggactcagtattggagctggccttgcactgagtcttgctctcaaccacccggagctcgtgtcgggcgtcgttgcagcagccgggtttgtcagcggcgtcgaactcactgcggatcctcgcgatgaagccctcggcaacatgatccagaaagcgatcgacgacggagatatgaagcggcaggctctgctgaacacacgctactggggcgatggccccagagaggctgaaggcagaatgcagccaaggcaaaggcaaagattgcacgactggttgcttgatattgctaatagggagtctaaaagtattggaggacaggcccttccgtccacaaacgctcggcctgtaactgcacagcggctccgggaggagctctacatgcctacgggcgtcatcattggcaagaaagatgagatggagactatcgaggccatggaatggctcggacagcacgcgagaaatgcaactgttgggagatttgacacggcacatatggtcaatctggaattgcctgacgatttcaatgcctggcttgagaaatggctgtctgagaactctttctcgacataa

SEQ ID NO: 38741 - protein, 299 aa, Muscodor strobelii
  misc_feature: SGI Peptide ID NO. 573467
  misc_feature (58)..(290): Pfam Id: PF00561 Pfam Desc: alpha/beta hydrolase fold
  misc_feature (31)..(292): NCBI GI: 159900914 Blast Desc: alpha/beta hydrolase fold [Herpetosiphon aurantiacus ATCC 23779] gi|159893953|gb|ABX07033.1| alpha/beta hydrolase fold [Herpetosiphon aurantiacus ATCC 23779]
  misc_feature (25)..(285): NCBI GI: 21226631 Blast Desc: hydrolase [Methanosarcina mazei Go1] gi|20904911|gb|AAM30225.1| hydrolase [Methanosarcina mazei Go1]
  misc_feature (4)..(293): NCBI GI: 20092435 Blast Desc: hydrolase [Methanosarcina acetivorans C2A] gi|19917693|gb|AAM06990.1| hydrolase [Methanosarcina acetivorans C2A]
  misc_feature (33)..(296): NCBI GI: 158339929 Blast Desc: alpha/beta hydrolase [Acaryochloris marina MBIC11017] gi|158310170|gb|ABW31785.1| alpha/beta hydrolase [Acaryochloris marina MBIC11017]
  misc_feature (25)..(295): NCBI GI: 226314007 Blast Desc: pimeloyl-CoA synthesis protein [Brevibacillus brevis NBRC 100599] gi|226096957|dbj|BAH45399.1| pimeloyl-CoA synthesis protein [Brevibacillus brevis NBRC 100599]
  misc_feature (33)..(292): NCBI GI: 256765050 Blast Desc: alpha/beta hydrolase fold protein [Streptomyces sp. C]
  misc_feature (22)..(297): NCBI GI: 270308477 Blast Desc: hydrolase, alpha/beta fold family [Dehalococcoides sp. VS] gi|270154369|gb|ACZ62207.1| hydrolase, alpha/beta fold family [Dehalococcoides sp. VS]
  misc_feature (22)..(297): NCBI GI: 73748991 Blast Desc: hydrolase [Dehalococcoides sp. CBDB1] gi|73660707|emb|CAI83314.1| hydrolase [Dehalococcoides sp. CBDB1]
  misc_feature (22)..(297): NCBI GI: 57233988 Blast Desc: alpha/beta fold family hydrolase [Dehalococcoides ethenogenes 195] gi|57224436|gb|AAW39493.1| hydrolase, alpha/beta fold family [Dehalococcoides ethenogenes 195]
  misc_feature (22)..(297): NCBI GI: 147669757 Blast Desc: alpha/beta hydrolase fold [Dehalococcoides sp. BAV1] gi|269920775|ref|ZP_06169697.1| alpha/beta hydrolase fold protein [Dehalococcoides sp. GT] gi|146270705|gb|ABQ17697.1| alpha/beta
MMSTSGSHEVPEGVLSWTVTNPGSDVASKNLLLVFIHAGVADSSLWESQVAYFSQKGWTTLVYDLYGFGKSTPSKSYLESDPRSPVDHTTHAADLVRLHLQSLRLDRAVVIGLSIGAGLALSLALNHPELVSGVVAAAGFVSGVELTADPRDEALGNMIQKAIDDGDMKRQALLNTRYWGDGPREAEGRMQPRQRQRLHDWLLDIANRESKSIGGQALPSTNARPVTAQRLREELYMPTGVIIGKKDEMETIEAMEWLGQHARNATVGRFDTAHMVNLELPDDFNAWLEKWLSENSFST

SEQ ID NO: 38742 - DNA, 921 bp, Muscodor strobelii
  misc_feature: SGI cDNA ID NO. 573468
  misc_feature: Encodes the peptide sequence at SEQ ID NO 38743
atgggtgtctcaatcaagagagtcgctgtgtctggtgcgactggcacagtcggaaaggagatcataaagtctctccttgacaacgatttcgaagttacagccctcgtccgtgaatccaaagagtacggcctcccttctcaagtcactgtcaaggttatcgactacgaacaaacaactgtgaactccctcgtcggtatccttaccggtcaggacgctgtcgtatgtgcattgggtcgtccaggatgcgaaggaccgcagcttctcttgatagaagctgcagtcaaagcaggcgtcaagcgtttcatcccagcagactacggcatcgacaccgagaacactcgtgcaacctcacttccattctttaacgtcaaacgaaatatccacgagtctctcaagagatacgtcgacataagctcaatgacatactcgctcatctgcacaggggctttcttggaccatgggttacaaacaggctttctcgtgaacttaagagagaagaaagtcaagttatatgacggcggagatgtcgtcttctcgacaacgaccgtggccgacgtcgcaaaagccgttagtggtgttcttaagcactacgaggagaccatcaatcgtccaatctatgttcaaaccaccgagactacactgaagaaattggctgagatggctatgaaagcgacaggaccggagggctggaaacaagaagtggtgtccgcggaacaattgttgcaagaagggtatgacgaacggaagaaagcagaaccaaatgttttcgtctcggaatacaacttcatattggttgctggcctgtgtgagggatatgggtcccatttcaaacatttagacaatgagttgcttgggatcaagcagctggacgacgcgggtctcgaagcgcttgtaagcaatgctgcgaaatctatcgcttga

SEQ ID NO: 38743 - protein, 306 aa, Muscodor strobelii
  misc_feature: SGI Peptide ID NO. 573468
  misc_feature (8)..(232): Pfam Id: PF05368 Pfam Desc: NmrA-like family
  misc_feature (6)..(36): Pfam Id: PF01113 Pfam Desc: Dihydrodipicolinate reductase, N-terminus
  misc_feature (8)..(41): Pfam Id: PF05368 Pfam Desc: NmrA-like family
  misc_feature (86)..(127): Pfam Id: PF05368 Pfam Desc: NmrA-like family
  misc_feature (5)..(302): NCBI GI: 154320313 Blast Desc: BC1G_02137 [Botryotinia fuckeliana B05.10] gi|150854876|gb|EDN30068.1| BC1G_02137 [Botryotinia fuckeliana B05.10]
  misc_feature (5)..(298): NCBI GI: 171682686 Blast Desc: protein product [Podospora anserina] gi|170941302|emb|CAP66952.1| protein product [Podospora anserina]
  misc_feature (5)..(297): NCBI GI: 154304115 Blast Desc: BC1G_09693 [Botryotinia fuckeliana B05.10] gi|150854328|gb|EDN29520.1| BC1G_09693 [Botryotinia fuckeliana B05.10]
  misc_feature (1)..(302): NCBI GI: 261358218 Blast Desc: conserved [Verticillium albo-atrum VaMs.102]
  misc_feature (5)..(298): NCBI GI: 238488299 Blast Desc: oxidoreductase CipA-like, [Aspergillus flavus NRRL3357] gi|220697775|gb|EED54115.1| oxidoreductase CipA-like, [Aspergillus flavus NRRL3357]
  misc_feature (5)..(303): NCBI GI: 156040832 Blast Desc: SS1G_11394 [Sclerotinia sclerotiorum 1980] gi|154695778|gb|EDN95516.1| SS1G_11394 [Sclerotinia sclerotiorum 1980]
  misc_feature (7)..(297): NCBI GI: 255932939 Blast Desc: Pc12g11220 [Penicillium chrysogenum Wisconsin 54-1255] gi|211582559|emb|CAP80749.1| Pc12g11220 [Penicillium chrysogenum Wisconsin 54-1255]
  misc_feature (13)..(298): NCBI GI: 255954093 Blast Desc: Pc21g07590 [Penicillium chrysogenum Wisconsin 54-1255] gi|211589510|emb|CAP95656.1| Pc21g07590 [Penicillium chrysogenum Wisconsin 54-1255]
  misc_feature (4)..(301): NCBI GI: 256734969 Blast Desc: NECHADRAFT_75760 [Nectria haematococca mpVI 77-13-4]
  misc_feature (7)..(303): NCBI GI: 70995720 Blast Desc: oxidoreductase CipA-like [Aspergillus fumigatus Af293] gi|41581323|emb|CAE47972.1| isoflavone reductase, [Aspergillus fumigatus] gi|66850250|gb|EAL90577.1| oxidoreductase CipA-like,
  misc_feature (7)..(243): SWISSPROT Homolog: EC 1.3.1.45 2'-hydroxyisoflavone reductase
MGVSIKRVAVSGATGTVGKEIIKSLLDNDFEVTALVRESKEYGLPSQVTVKVIDYEQTTVNSLVGILTGQDAVVCALGRPGCEGPQLLLIEAAVKAGVKRFIPADYGIDTENTRATSLPFFNVKRNIHESLKRYVDISSMTYSLICTGAFLDHGLQTGFLVNLREKKVKLYDGGDVVFSTTTVADVAKAVSGVLKHYEETINRPIYVQTTETTLKKLAEMAMKATGPEGWKQEVVSAEQLLQEGYDERKKAEPNVFVSEYNFILVAGLCEGYGSHFKHLDNELLGIKQLDDAGLEALVSNAAKSIA

SEQ ID NO: 38744 - DNA, 1269 bp, Muscodor strobelii
  misc_feature: SGI EST ID NO. CUFF.93135.0
  misc_feature: Variant of the nucleotide sequence at SEQ ID NO 38742
aaaagtgtcattaaatgcctagatcacaatatttgtcagcgtacatggaaattgaaatcctacgagaggggaagcaagacgtgaactactcaatctttgaagacgcctagtcgtaatcgaagacttgctcgacttgaaagagccacattactatcattatcctcaggtatctaatttcaacgggcacataagatcacgatgggtgtctcaatcaagagagtcgctgtgtctggtgcgactggcacagtcggaaaggagatcataaagtctctccttgacaacgatttcgaagttacagccctcgtccgtgaatccaaagagtacggcctcccttctcaagtcactgtcaaggttatcgactacgaacaaacaactgtgaactccctcgtcggtatccttaccggtcaggacgctgtcgtatgtgcattgggtcgtccaggatgcgaaggaccgcagcttctcttgatagaagctgcagtcaaagcaggcgtcaagcgtttcatcccagcagactacggcatcgacaccgagaacactcgtgcaacctcacttccattctttaacgtcaaacgaaatatccacgagtctctcaagagatacgtcgacataagctcaatgacatactcgctcatctgcacaggggctttcttggaccatgggttacaaacaggctttctcgtgaacttaagagagaagaaagtcaagttatatgacggcggagatgtcgtcttctcgacaacgaccgtggccgacgtcgcaaaagccgttagtggtgttcttaagcactacgaggagaccatcaatcgtccaatctatgttcaaaccaccgagactacactgaagaaattggctgagatggctatgaaagcgacaggaccggagggctggaaacaagaagtggtgtccgcggaacaattgttgcaagaagggtatgacgaacggaagaaagcagaaccaaatgttttcgtctcggaatacaacttcatattggttgctggcctgtgtgagggatatgggtcccatttcaaacatttagacaatgagttgcttgggatcaagcagctggacgacgcgggtctcgaagcgcttgtaagcaatgctgcgaaatctatcgcttgacgcgacgtctagacggcgagaatctgttagcaaagagaaatgattctttgcatcttcattcggccgcctataactatataagcgacgtcgggtgatgtacgagaaaccatagtcgatatttagtttccgtcgcttaaaactcattttcgg

SEQ ID NO: 38745 - DNA, 1338 bp, Muscodor strobelii
  misc_feature: SGI cDNA ID NO. 573469
  misc_feature: Encodes the peptide sequence at SEQ ID NO 38746
atgcattctgctacgattattgaaatcctaaatactacttcccaaaggggaacttcaatcgcctccagcactctagagactctaccttctgaaatcaaactgatcatcgtggagttcctggaggacccgaacgcaattgttaatcttgctctttcctgccaggctctctatgcctttgtgactcaattcgagcctgaactcgcagccaagagcttcgttgcaagcttaccacgagaattcattcagctagccgatctcgaacagtacttcgcccgtcgcacaatcggctatgagattaccactgaggagacaaccaaggatcttgtggctacaattggcaaagctttcaacaataaaccccaccactggacatcataccgccacattcagagcctcaaggaatcccagagatgcttcggcatctacaacacgctcgtacaacttggattgaggctagcgcatcgggcgcttagaaatgccccgaagatcatgaccaaagacgcgccgaagataatcgccatgaataacttatcctctaatgagatggaccgcttcacaaaggcggtatacatcctagagctaatttcaaaaggctacaaaacctgcacagcttttcactccagggatccagaacgagatcctgacgaggcttggtttgttttctggaacgagttcgctccttggcatctgcagcatgtgcgaatcgtgcaggatttgttgattgaccacatgaatgaattgattgtcaatgggtattgtcagatgtttgaacagggtgctcttgaccctgaagaagaccacgaaactctacctcgactcagcccggcagtcttcattgtcaaggaaggcccggtctcactcttcagactacaagggcaggctgctggagccactctcatcgcatatgaaaggttcctgaaaagcagagaatatttcatgacacgcgccggagcctatgacaaccgccacgatacactgtggctcaaccgagtggcaaacgaccgcgtcagtctcgacgtgaatttcatcttcgatcgatacaaggaagatgacatgagtgccgctgccgcttggtaccatactctcctcctcggccacttcaatgacgatgtgctccatgccaggatatatcagaaacaatgtgactattgccttgagaaatgggcttggtgtatgtgggatctggaacgactcaatcacggtcagagagaacgtctgccgacttgtgagcagctcacaagaacatactccggcgagtcggtacgcttagcagatttggatcgcttcgaattcgcacgcggccgaagtgagggatgcaatagaaactgtgcacgttaa

SEQ ID NO: 38746 - protein, 445 aa, Muscodor strobelii
  misc_feature: SGI Peptide ID NO. 573469
MHSATIIEILNTTSQRGTSIASSTLETLPSEIKLIIVEFLEDPNAIVNLALSCQALYAFVTQFEPELAAKSFVASLPREFIQLADLEQYFARRTIGYEITTEETTKDLVATIGKAFNNKPHHWTSYRHIQSLKESQRCFGIYNTLVQLGLRLAHRALRNAPKIMTKDAPKIIAMNNLSSNEMDRFTKAVYILELISKGYKTCTAFHSRDPERDPDEAWFVFWNEFAPWHLQHVRIVQDLLIDHMNELIVNGYCQMFEQGALDPEEDHETLPRLSPAVFIVKEGPVSLFRLQGQAAGATLIAYERFLKSREYFMTRAGAYDNRHDTLWLNRVANDRVSLDVNFIFDRYKEDDMSAAAAWYHTLLLGHFNDDVLHARIYQKQCDYCLEKWAWCMWDLERLNHGQRERLPTCEQLTRTYSGESVRLADLDRFEFARGRSEGCNRNCAR

SEQ ID NO: 38747 - DNA, 708 bp, Muscodor strobelii
  misc_feature: SGI cDNA ID NO. 573470
  misc_feature: Elevated expression when VOC is produced
  misc_feature: Encodes the peptide sequence at SEQ ID NO 38748
atgcagcacaagcgggtgaataaagcatgtgaaggatgcagacagagaaagacaaggtgcaatttagagcgtccctgcaagagatgcaaaaacaacggactggtttgtgtcactgcaaccagaaaaaaagggcccaaaggatacgccgaagtactcggaaataaccatcttgcactgatagctaccgtacataaactctatggcatggttagaaatgggcattcatgggatctgggagagccggaactcgatgacagaggtcaaccggttatacatgatatcgcaacgaagttggggtgcctgcgtcccgatagagccggttcggcagagtcggcagtggaattggaagtacagcaaacggatggcaagacagagacgttgaagccagagtcgatttactgcgccgcagaggtaaatgtcacggacatggagcaacccaaatcgttcgaattcgatgaattcgatgattccggcataaaacacgactatagcgatatgtccattcatatgcaacagaataggccggcattgtggccccaaggctttgactccgggtccatacttgcagtcgatgtcacctgcgcgaattcatctgccatggaatcatatgatctgtcaacgtcttatccggtatggcagatgacaggtgaggaaacccctattgattcacatacggcctcattcagccacacaggtgcgttcgagtaa

SEQ ID NO: 38748 - protein, 235 aa, Muscodor strobelii
  misc_feature: SGI Peptide ID NO. 573470
  misc_feature (8)..(46): Pfam Id: PF00172 Pfam Desc: Fungal Zn(2)-Cys(6) binuclear cluster domain
  misc_feature (2)..(119): NCBI GI: 85112195 Blast Desc: NCU02142 [Neurospora crassa OR74A] gi|28926076|gb|EAA35064.1| conserved [Neurospora crassa OR74A]
  misc_feature (2)..(119): NCBI GI: 171684525 Blast Desc: protein product [Podospora anserina] gi|170942223|emb|CAP67875.1| protein product [Podospora anserina]
  misc_feature (2)..(104): NCBI GI: 116193355 Blast Desc: CHGG_06395 [Chaetomium globosum CBS 148.51] gi|88182308|gb|EAQ89776.1| CHGG_06395 [Chaetomium globosum CBS 148.51]
  misc_feature (4)..(119): NCBI GI: 39943262 Blast Desc: MGG_03711 [Magnaporthe grisea 70-15] gi|145009692|gb|EDJ94348.1| MGG_03711 [Magnaporthe grisea 70-15]
  misc_feature (12)..(215): NCBI GI: 256733983 Blast Desc: NECHADRAFT_36008 [Nectria haematococca mpVI 77-13-4]
  misc_feature (12)..(182): NCBI GI: 46128249 Blast Desc: FG08502.1 [Gibberella zeae PH-1]
  misc_feature (2)..(114): NCBI GI: 154319654 Blast Desc: BC1G_02308 [Botryotinia fuckeliana B05.10] gi|150855966|gb|EDN31158.1| BC1G_02308 [Botryotinia fuckeliana B05.10]
  misc_feature (2)..(119): NCBI GI: 240104951 Blast Desc: Fungal Zn binuclear cluster domain containing protein [Coccidioides posadasii C735 delta SOWgp]
  misc_feature (2)..(102): NCBI GI: 156061301 Blast Desc: SS1G_02793 [Sclerotinia sclerotiorum 1980] gi|154700197|gb|EDN99935.1| SS1G_02793 [Sclerotinia sclerotiorum 1980]
  misc_feature (2)..(102): NCBI GI: 119195373 Blast Desc: CIMG_02061 [Coccidioides immitis RS]
  misc_feature: Useful for introducing or modulating the production of volatile compounds
MQHKRVNKACEGCRQRKTRCNLERPCKRCKNNGLVCVTATRKKGPKGYAEVLGNNHLALIATVHKLYGMVRNGHSWDLGEPELDDRGQPVIHDIATKLGCLRPDRAGSAESAVELEVQQTDGKTETLKPESIYCAAEVNVTDMEQPKSFEFDEFDDSGIKHDYSDMSIHMQQNRPALWPQGFDSGSILAVDVTCANSSAMESYDLSTSYPVWQMTGEETPIDSHTASFSHTGAFE

SEQ ID NO: 38749 - DNA, 1370 bp, Muscodor strobelii
  misc_feature: SGI EST ID NO. CUFF.93204.0
  misc_feature: Variant of the nucleotide sequence at SEQ ID NO 38747
aatcaatccagttgagaattccaattctgcacctagacccaacagctctcgaggcaacggctcgagactaccttatgctgacgtcacatcatccagtcgaatgcatgttgagattatttgactagctacaccaataaacaaacaacgtatggcaagatcttgcgacgaaagtataattagacttactttaatcatatccccactgtgtactgtagcagtggatcaacatggattattgataaggtagtcatggggtcgcctttgggctacatcaaagaaattctttcttcgtttgcatatatccagtaacagaccctcactaaaagctgtgcagactttgccgttttctcaacaacattcacttctctgccatgtgctagtcaatttcccaacatggagattgacatgccagtgttgtcaaccatagaagtgaagttggaaacatcagcgaccaaatcaagtacaaaggctatcaagccagtatgccgtcgagcaacacggcttgtaactcattctcgagtccatgaacgcgggctatcatcaccacatagtaccgagatgcagcacaagcgggtgaataaagcatgtgaaggatgcagacagagaaagacaaggtgcaatttagagcgtccctgcaagagatgcaaaaacaacggactggtttgtgtcactgcaaccagaaaaaaagggcccaaaggatacgccgaagtactcggaaataaccatcttgcactgatagctaccgtacataaactctatggcatggttagaaatgggcattcatgggatctgggagagccggaactcgatgacagaggtcaaccggttatacatgatatcgcaacgaagttggggtgcctgcgtcccgatagagccggttcggcagagtcggcagtggaattggaagtacagcaaacggatggcaagacagagacgttgaagccagagtcgatttactgcgccgcagaggtaaatgtcacggacatggagcaacccaaatcgttcgaattcgatgaattcgatgattccggcataaaacacgactatagcgatatgtccattcatatgcaacagaataggccggcattgtggccccaaggctttgactccgggtccatacttgcagtcgatgtcacctgcgcgaattcatctgccatggaatcatatgatctgtcaacgtcttatccggtatggcagatgacaggtgaggaaacccctattgattcacatacggcctcattcagccacacaggtgcgttcgagtaaccgctcgatgcatggtctgattttttccctgctgtctagcataagatatcagaaggagtcaccgatgcaaatttagtcatctaggtaaaccgaagtatgcaaac

SEQ ID NO: 38750 - DNA, 858 bp, Muscodor strobelii
  misc_feature: SGI cDNA ID NO. 573471
  misc_feature: Elevated expression when VOC is produced
  misc_feature: Encodes the peptide sequence at SEQ ID NO 38751
atggacgcgaaaaggacgactgaagaaattcccaaacagactgtatcccagcaagatgagcacgacaatcttgcggcctgggactatatctctagctattgggatcaaacccttggcagcggtaatgatatgtaccgtgaatgcctgttgcctacaataaacgagcttgcggaccctcaacctggggaccgcgcacttgatctaggcactggcagcggcgtgatcgccataacactggcgaagtcgggtgctcaagttactgcagtggacggttcaatgtcgatgctagaaaatgccagagatcgcgcaagagaggctggtttagacatgacttttgaaacggtcaacctcactgataggtcaagcatggaagccttcgttcaagcttttcccagatccttcgatttaataacatgcagcatgacccttaaggagttgcgagatctagaattccttgcccaagctcttccggaactgcttgcgcctagcggcagagttataatggtaaacctacaccctgtgttctcaaaacccgcagggcaccgcgccatggaagtttttgaaaacgtcgcgacgggaaagcaagagtttcacaaccatatcaaagtgaccaggtatctcgatataccgccagtgaaaagcgaagctctaagaggacaaccgcagccattaactttatttcatcgacccttctggtctttactcgaaccttttttcaagcacggccttgtgatggatgcaatgcgagagccaggctttacgggaccaggtgatccgtcccaagttcaatcgtatcacaattttacacaattcccaatgcttcttgcattccgcctacgtcgtttggctttcgattga

SEQ ID NO: 38751 - protein, 285 aa, Muscodor strobelii
  misc_feature: SGI Peptide ID NO. 573471
  misc_feature (66)..(168): Pfam Id: PF08241 Pfam Desc: Methyltransferase domain
  misc_feature (66)..(166): Pfam Id: PF08242 Pfam Desc: Methyltransferase domain
  misc_feature (35)..(205): Pfam Id: PF05175 Pfam Desc: Methyltransferase small domain
  misc_feature (59)..(100): Pfam Id: PF05175 Pfam Desc: Methyltransferase small domain
  misc_feature (23)..(281): NCBI GI: 261358957 Blast Desc: conserved [Verticillium albo-atrum VaMs.102]
  misc_feature (24)..(283): NCBI GI: 239615148 Blast Desc: methyltransferase type 11 [Ajellomyces dermatitidis ER-3]
  misc_feature (24)..(280): NCBI GI: 238837670 Blast Desc: conserved [Microsporum canis CBS 113480]
  misc_feature (24)..(280): NCBI GI: 164423627 Blast Desc: NCU08183 [Neurospora crassa OR74A] gi|157070173|gb|EAA30340.2| conserved [Neurospora crassa OR74A]
  misc_feature (23)..(280): NCBI GI: 119188639 Blast Desc: CIMG_04367 [Coccidioides immitis RS]
  misc_feature (23)..(280): NCBI GI: 240111530 Blast Desc: CPC735_073650 [Coccidioides posadasii C735 delta SOWgp]
  misc_feature (41)..(280): NCBI GI: 226288559 Blast Desc: conserved [Paracoccidioides brasiliensis Pb18]
  misc_feature (15)..(280): NCBI GI: 171677574 Blast Desc: protein product [Podospora anserina] gi|170936855|emb|CAP61513.1| protein product [Podospora anserina]
  misc_feature (24)..(284): NCBI GI: 225556172 Blast Desc: conserved [Ajellomyces capsulatus G186AR]
  misc_feature (20)..(281): NCBI GI: 39968017 Blast Desc: MGG_02101 [Magnaporthe grisea 70-15] gi|145012983|gb|EDJ97624.1| MGG_02101 [Magnaporthe grisea 70-15]
  misc_feature (20)..(225): SWISSPROT Homolog: EC 2.1.1.64 3-demethylubiquinone-9 3-O-methyltransferase
  misc_feature: Useful for introducing or modulating the production of volatile compounds
MDAKRTTEEIPKQTVSQQDEHDNLAAWDYISSYWDQTLGSGNDMYRECLLPTINELADPQPGDRALDLGTGSGVIAITLAKSGAQVTAVDGSMSMLENARDRAREAGLDMTFETVNLTDRSSMEAFVQAFPRSFDLITCSMTLKELRDLEFLAQALPELLAPSGRVIMVNLHPVFSKPAGHRAMEVFENVATGKQEFHNHIKVTRYLDIPPVKSEALRGQPQPLTLFHRPFWSLLEPFFKHGLVMDAMREPGFTGPGDPSQVQSYHNFTQFPMLLAFRLRRLAFD

SEQ ID NO: 38752 - DNA, 1193 bp, Muscodor strobelii
  misc_feature: SGI EST ID NO. CUFF.93183.0
  misc_feature: Variant of the nucleotide sequence at SEQ ID NO 38750
cagttccgttcatcttcatcgttaataatctgtcaaattcatcagccttggagctttgtcgttatggacgcgaaaaggacgactgaagaaattcccaaacagactgtatcccagcaagatgagcacgacaatcttgcggcctgggactatatctctagctattgggatcaaacccttggcagcggtaatgatatgtaccgtgaatgcctgttgcctacaataaacgagcttgcggaccctcaacctggggaccgcgcacttgatctaggcactggcagcggcgtgatcgccataacactggcgaagtcgggtgctcaagttactgcagtggacggttcaatgtcgatgctagaaaatgccagagatcgcgcaagagaggctggtttagacatgacttttgaaacggtcaacctcactgataggtcaagcatggaagccttcgttcaagcttttcccagatccttcgatttaataacatgcagcatgacccttaaggagttgcgagatctagaattccttgcccaagctcttccggaactgcttgcgcctagcggcaggtatgaataggtattgcacgcggatagaatagttcgctaacttttaaagagttataatggtaaacctacaccctgtgttctcaaaacccgcagggcaccgcgccatggaagtttttgaaaacgtcgcgacgggaaagcaagagtttcacaaccatatcaaagtgaccaggtatctcgatataccgccagtgaaaagcgaagctctaagaggacaaccgcagccattaactttatttcatcgacccttctggtctttactcgaaccttttttcaagcacggccttgtgatggatgcaatgcgagagccaggctttacgggaccaggtgatccgtcccaagttcaatcgtatcacaattttacacaattcccaatgcttcttgcattccgcctacgtcgtttggctttcgattgaagccggtcgctttttgttccacgtgagcaatgatgcaccatgcgtatataagctcgtgattacaagcgccgaggctccagtcgctatcagtgactgttttgggatgttgttggcagttgatacatctaatgttttgaatgtatgagagtgtgttaggttagctttagatactgtacggatatctcttagtctagtttaatagatgtttcatagtgtcttgtta

SEQ ID NO: 38753 - DNA, 2619 bp, Muscodor strobelii
  misc_feature: SGI cDNA ID NO. 573472
  misc_feature: Elevated expression when VOC is produced
  misc_feature: Encodes the peptide sequence at SEQ ID NO 38754
atggaacaaggagcttctgctccgccggcagatgcgacaagccgaatcgagttgcagcgagcagtggtgctctggtcctccatcttcgatgttctacagacattgtgtaacagttcttggctgtcgtctgagctcaactccatgaagcgagaaatagaatctcgactcgaagtttcgtccgaaacggtacatagaccttatggtcttgcagaatggattgcacatgcgcaacacatcacccctaacagcgttttggggcatcacttgaatcttgccttagccatagcattcttgcgcgacccagggcgacaaggcattgagctcctgcctagtgagattgactccatttgggagctggtccgtgaggtattgctagaaacatcgatcattaccacagcaaagcgtagtgcgcaggggtttctcgccattcctctctggtgcgttcttaaagataataacatcgaagaactcatccggcttcacgtgtggcttcctgacgggcagcgagggaatcaacacatcgccgttcattcacatcagccattcgctcagagctggatcattctcggtcagggcaaacatgtccagtacgaagtcgaatctgcaacacaagtgacagcgacacatgcaaaatacgagttatcctggagcgacagtaatggcgagaacctcaacaaaaattaccgagtggaccaaaagttcgccaagatcgttaacacaggcgagctggttctagtggccgagacacactccagtatccaccctatcgcgcccgtcctgggtccagtggctggccacgaatattaccaggagcgtgatcctggagttgtaacgcctgccatactcgcaacccagattcaatctttccgaagctggcagcaaaatttccatagaggcctagaccatagtcgaaaagctgaattggaagaggcgctgctcgcccaccgccttgccctgtcgatctgcgatgacgataccaggtttccgcaaggaactcgttgtcgatatatggttcttgccgaattaggatacgtgtacagaatgttgggtcgctacgtgaacgctactcagtgtctcgaagaatccatcagcaatatgccccctagcgagatacgtctcaaggcatgtggcgagctggcagtcgtgtatcgtcacttggaacgattcgaggattctaaacgtgtctgcgaagatcaatatgaggatgcgaaacaaatgggattagaattagagatgagtcgcgctattggcaatctcggcatggtgaactaccaactgtttctcctcaatcgcaagaaagagtatctaacaacagcaatagagcaactagaagagcgagttcgattatgtcatcatttgagagaaaccgctgttgagcgggaagactcgctgacgagaactgcgaaattgcaaagtgcactcgcccgtgaggcaattgctttcgcgcgcttgtccctctgttacacaaccgcagaaaacatcgacagagcgcttgatgcagctttgcaatgtcaagacctatcacaacagtccggtgacccaagtaaagtcgcattctccaggttctacctcggacgagtcctctatatgaagggcaaaaaggaggatgcgttagtccaattcaatcccgtagacggaaattcacctgtcgcggctctcgcgaaagaaccatcagaggagcatcgcggtcatatatgcgagatgatagcggctggggctgacccgaacatgagagacagttcaggatattccgcgttggattacgcagtctacggcggcgatgtaattttacaggagcttctcctagaagcacttaagcagaaccttggccccgaagaaatcgatcagcatcatgcggagtctgtccttcgtaaaggctaccgagaattattccaggatagactgcggccggttttgatgaatgccggtcaacgaacgagaatacagcagctgagagacatatatgccaagactctgcgtgcagaaaaagagaaggcccgtcagttcgacacattcaagtttgttcgctacaccgatttcattcgccacggcaaactgcccaagtccgatgacaacctaactcgtcaagtctcagacgaagatgatgcgaacagtttcataatattcatctcgtatacttgggtaaagaagggcatgaaaagagattggtcacctgacgactcactcaacacaaggtatcatcaaatcctcaacgccgttgatatctttcttcaagggcacccagatgttgaacgagcaactgtttgcatttggattgactgggcttgcattgatcaggtcaacgtcgtccaacaaaagcgcggcgtcgcagcattgcctatgagtatcgcacaatgcaacgtggtaataagcattctcgaccatatctactacgaacgtgcttggtgttgtgtagaggtcaccatgatccaagctctgcggagttcgtacgacgcccaccgatggttcgagtacgaggccggagtattacggaacggcaaacgagagcgagtgccgaatgtcgcagaagcgtatgtcactctagaaagtgatcgaccaaagctcagatttcttgagcggcaagcgaagctgctgatcaccccgagtccgtattcatga

SEQ ID NO: 38754 - protein, 872 aa, Muscodor strobelii
  misc_feature: SGI Peptide ID NO. 573472
  misc_feature (65)..(865): NCBI GI: 238502289 Blast Desc: conserved [Aspergillus flavus NRRL3357] gi|220691188|gb|EED47536.1| conserved [Aspergillus flavus NRRL3357]
  misc_feature (85)..(865): NCBI GI: 261187851 Blast Desc: conserved [Ajellomyces dermatitidis SLH14081] gi|239593460|gb|EEQ76041.1| conserved [Ajellomyces dermatitidis SLH14081]
  misc_feature (85)..(865): NCBI GI: 239608440 Blast Desc: conserved [Ajellomyces dermatitidis ER-3]
  misc_feature (65)..(759): NCBI GI: 169775651 Blast Desc: [Aspergillus oryzae RIB40] gi|83771027|dbj|BAE61159.1| protein product [Aspergillus oryzae]
  misc_feature (386)..(865): NCBI GI: 261352706 Blast Desc: conserved [Verticillium albo-atrum VaMs.102]
  misc_feature (462)..(695): NCBI GI: 145605930 Blast Desc: [Magnaporthe grisea 70-15] gi|145013676|gb|EDJ98317.1| [Magnaporthe grisea 70-15]
  misc_feature (89)..(406): NCBI GI: 85111134 Blast Desc: NCU03067 [Neurospora crassa OR74A] gi|28925522|gb|EAA34553.1| [Neurospora crassa OR74A]
  misc_feature (761)..(870): NCBI GI: 145605930 Blast Desc: [Magnaporthe grisea 70-15] gi|145013676|gb|EDJ98317.1| [Magnaporthe grisea 70-15]
  misc_feature (91)..(185): NCBI GI: 156036270 Blast Desc: SS1G_12824 [Sclerotinia sclerotiorum 1980] gi|154698229|gb|EDN97967.1| SS1G_12824 [Sclerotinia sclerotiorum 1980]
  misc_feature (112)..(254): NCBI GI: 284034997 Blast Desc: Slin_0055 [Spirosoma linguale DSM 74] gi|283814290|gb|ADB36128.1| Slin_0055 [Spirosoma linguale DSM 74]
  misc_feature: Useful for introducing or modulating the production of volatile compounds
MEQGASAPPADATSRIELQRAVVLWSSIFDVLQTLCNSSWLSSELNSMKREIESRLEVSSETVHRPYGLAEWIAHAQHITPNSVLGHHLNLALAIAFLRDPGRQGIELLPSEIDSIWELVREVLLETSIITTAKRSAQGFLAIPLWCVLKDNNIEELIRLHVWLPDGQRGNQHIAVHSHQPFAQSWIILGQGKHVQYEVESATQVTATHAKYELSWSDSNGENLNKNYRVDQKFAKIVNTGELVLVAETHSSIHPIAPVLGPVAGHEYYQERDPGVVTPAILATQIQSFRSWQQNFHRGLDHSRKAELEEALLAHRLALSICDDDTRFPQGTRCRYMVLAELGYVYRMLGRYVNATQCLEESISNMPPSEIRLKACGELAVVYRHLERFEDSKRVCEDQYEDAKQMGLELEMSRAIGNLGMVNYQLFLLNRKKEYLTTAIEQLEERVRLCHHLRETAVEREDSLTRTAKLQSALAREAIAFARLSLCYTTAENIDRALDAALQCQDLSQQSGDPSKVAFSRFYLGRVLYMKGKKEDALVQFNPVDGNSPVAALAKEPSEEHRGHICEMIAAGADPNMRDSSGYSALDYAVYGGDVILQELLLEALKQNLGPEEIDQHHAESVLRKGYRELFQDRLRPVLMNAGQRTRIQQLRDIYAKTLRAEKEKARQFDTFKFVRYTDFIRHGKLPKSDDNLTRQVSDEDDANSFIIFISYTWVKKGMKRDWSPDDSLNTRYHQILNAVDIFLQGHPDVERATVCIWIDWACIDQVNVVQQKRGVAALPMSIAQCNVVISILDHIYYERAWCCVEVTMIQALRSSYDAHRWFEYEAGVLRNGKRERVPNVAEAYVTLESDRPKLRFLERQAKLLITPSPYS

SEQ ID NO: 38755 - DNA, 4139 bp, Muscodor strobelii
  misc_feature: SGI EST ID NO. CUFF.93260.0
  misc_feature: Variant of the nucleotide sequence at SEQ ID NO 38753
gaaacatcattcaattagctcatatgaatagcaagtgatgttaatctagatcagttgtgataccccgcctctccccgccagcgtgaatagtcaagataattaagaaatgtctcgtgccaaaggcaaaccgatcacctattccgtcttatttatccaagtattttgtgtgatccgatgaagagccttagatcgtattttgctaaaagatggaacaaggagcttctgctccgccggcagatgcgacaagccgaatcgagttgcagcgagcagtggtgctctggtcctccatcttcgatgttctacagacattgtgtaacagttcttggctgtcgtctgagctcaactccatgaagcgagaaatagaatctcgactcgaagtttcgtccgaaacggtacatagaccttatggtcttgcagaatggattgcacatgcgcaacacatcacccctaacagcgttttggggcatcacttgaatcttgccttagccatagcattcttgcgcgacccagggcgacaaggcattgagctcctgcctagtgagattgactccatttgggagctggtccgtgaggtattgctagaaacatcgatcattaccacagcaaagcgtagtgcgcaggggtttctcgccattcctctctggtgcgttcttaaagataataacatcgaagaactcatccggcttcacgtgtggcttcctgacgggcagcgagggaatcaacacatcgccgttcattcacatcagccattcgctcagagctggatcattctcggtcagggcaaacatgtccagtacgaagtcgaatctgcaacacaagtgacagcgacacatgcaaaatacgagttatcctggagcgacagtaatggcgagaacctcaacaaaaattaccgagtggaccaaaagttcgccaagatcgttaacacaggcgagctggttctagtggccgagacacactccagtatccacgtacgtcataccacttacagtataggtgcaggagtattccatcaatctatagtcgaaccagacgagatgcacgccacgttctttttttcgactctaagagggggtttcagcctatcgcgcccgtcctgggtccagtggctggccacgaatattaccaggagcgtgatcctggagttgtaacgcctgccatactcgcaacccagattcaatctttccgaagctggcagcaaaatttccatagaggcctagaccatagtcgaaaagctgaattggaagaggcgctgctcgcccaccgccttgccctgtcgatctgcgatgacgataccaggtttccgcaaggaactcgttgtcgatatatggttcttgccgaattaggatacgtgtacagaatgttgggtcgctacgtgaacgctactcagtgtctcgaagaatccatcagcaatatgccccctagcgagatacgtctcaaggcatgtggcgagctggcagtcgtgtatcgtcacttggaacgattcgaggattctaaacgtgtctgcgaagatcaatatgaggatgcgaaacaaatgggattagaattagagatgagtcgcgctattggcaatctcggcatgagcaactagaagagcgagttcgattatgtcatcatttgagagaaaccgctgttgagcgggaagactcgctgacgagaactgcgaaattgcaaagtgcactcgcccgtgaggcaattgctttcgcgcgcttgtccctctgttacacaaccgcagaaaacatcgacagagcgcttgatgcagctttgcaatgtcaagacctatcacaacagtccggtgacccaagtaaagtcgcattctccaggttctacctcggacgagtcctctatatgaagggcaaaaaggaggatgcgttagtccaattcaatcccgtagacggaaattcacctgtcgcggctctcgcgaaagaaccatcagaggagcatcgcggtcatatatgcgagatgatagcggctggggctgacccgaacatgagagacagttcaggatattccgcgttggattacgcagtctacggcggcgatgtaattttacaggagcttctcctagaagcacttaagcagaaccttggccccgaagaaatcgatcagcatcatgcggagtctgtccttcgtaaaggctaccgagaattattccaggatagactgcggccggttttgatgaatgccggtcaacgaacgagaatacagcagctgagagacatatatgccaagactctgcgtgcagaaaaagagaaggcccgtcagttcgacacattcaagtttgttcgctacaccgatttcattcgccacggcaaactgcccaagtccgatgacaacctaactcgtcaagtctcagacgaagatgatgcgaacagtttcataatattcatctcgtatacttgggtaaagaagggcatgaaaagagattggtcacctgacgactcactcaacacaaggtatcatcaaatcctcaacgccgttgatatctttcttcaagggcacccagatgttgaacgagcaactgtttgcatttggattgactgggcttgcattgatcaggtcaacgtcgtccaacaaaagcgcggcgtcgcagcattgcctatgagtatcgcacaatgcaacgtggtaataagcattctcgaccatatctactacgaacgtgcttggtgttgtgtagaggtcaccatgatccaagctctgcggagttcgtacgacgcccaccgatggttcgagtacgaggccggagtattacggaacggcaaacgagagcgagtgccgaatgtcgcagaagcgtatgtcactctagaaagtgatcgaccaaagctcagatttcttgagcggcaagcgaagctgctgatcaccccgagtccgtattcatgaaaacattatcagcagaaataagtaagccgaggcgctgaatccagtcgcctacaatagcctatgatgcaggctttgtgccattctgtcaaagacgtgttctgactttagccatcaaatattacgcgatatcgcctagatacgcctgacatgcactcttaactcacaacaacggtggaaatttatatttcccaatctgcttcatgaatggcctgactgagtattttaggcttcgacgtattgggtagccgaatagatatggatgtggctaaatcgattacccttcgagggtcttttgaattgaggctatgcctccaggtccgactatgttccgaaagtcgaacactaccaaagagcttgtcaatcaaacagcctatctatattgcgtggcaatattccgtcctgatttcatttcggctattagagagcagattggcctgggtagaagaggaagcgccacgtattctgttgtgctgcatgcagactggacccttgactcaagtatgtccgccaattacgtctactagctttctatccctcacggcgggcctgtattcggatgggaacttcctgtcgatggagtctgcgacagctggtagggcacgagcgaagatatcgaccaaatgtataccacatacgtgtccatgataaccgacatcatcccttttctatccgatacgttgcattgcaaacaatgattatacgatgctcacgccttttgtgttaaaatagagcaatgggttgaagcacacaccttggcaaagcaactgaaattaccaacactaactcccagttttctccagcacgattctataatgacaccgtcaccttagacattgagttggagcatagagtttctgagggtccatgctgaatcttcatacgagttgcagcgaagaggccacgcgagggtaggatggatcttgaaatttccatatgcaatgataacatggagttcatttgcactgtgtggcagttgattttagtactcgaagctggacgaacgttcaaagagctaagttcgacgccttcgcttggatctaccaatttctcaaatgtgacaattatctgggcaagctacgtcgctgggaatgcggagacggggacaacatcagctcaagtagagaataacagggactattctacatataaccaggtagagacttcgctgacccgagtactgaggatgtgagatcacccccatcgatagcgatacgacccgtggcacctgtcactttccttgtattttccgaagccggttcatg

SEQ ID NO: 38756 - DNA, 621 bp, Muscodor strobelii
  misc_feature: SGI cDNA ID NO. 573473
  misc_feature: Encodes the peptide sequence at SEQ ID NO 38757
atggcccgaattcactttgtagctccaacgaccatggtcgctgcgttcatcgtcgctgtaactcttgccattggtcatcatctcttctacagcaacttgaatggggccgcagtatctacgaactctgtcgcttttggacccgttgacgcttctccccagaagatcaatattgccgttggaaacatcttcgcttccctcgctggtgcctcattgtcaatcagtatttcaacctcttacacgcaggtcgtctggcgggcgatcaaggcccaacgtggggagctattttggattgacactgtttattttggggtccgtaacttaactagcttagtccatgttactgcctggcggcgatacccagtacttgccctcttggcttgggcattttggctgtcagcgattcctctggtcattacccccgcaactctcagcgtccgcctgactgcgctgtcaaccagcccaaccgcccaaatagtgccatacgtagatttcaaaagcttgaacttcgctgatgttccttttgatcttgataggaaaggcttcttatacgtgcaaccgcaggctactgttttgaaggtggtccagggaaccgccgctcagcaactcgacttggagccttga

SEQ ID NO: 38757 - protein, 206 aa, Muscodor strobelii
  misc_feature: SGI Peptide ID NO. 573473
  misc_feature (12)..(206): NCBI GI: 121706606 Blast Desc: ACLA_046040 [Aspergillus clavatus NRRL 1] gi|119399713|gb|EAW10139.1| ACLA_046040 [Aspergillus clavatus NRRL 1]
  misc_feature (3)..(200): NCBI GI: 256720670 Blast Desc: NECHADRAFT_85610 [Nectria haematococca mpVI 77-13-4]
  misc_feature (4)..(197): NCBI GI: 67522186 Blast Desc: AN1550.2 [Aspergillus nidulans FGSC A4] gi|40745101|gb|EAA64257.1| AN1550.2 [Aspergillus nidulans FGSC A4] gi|259486876|tpe|CBF85091.1| TPA: conserved [Aspergillus FGSC
  misc_feature (8)..(164): NCBI GI: 255954279 Blast Desc: Pc21g08530 [Penicillium chrysogenum Wisconsin 54-1255] gi|211589603|emb|CAP95750.1| Pc21g08530 [Penicillium chrysogenum Wisconsin 54-1255]
  misc_feature (9)..(171): NCBI GI: 55823919 Blast Desc: Eqi8 [Fusarium heterosporum]
  misc_feature (11)..(145): NCBI GI: 46139753 Blast Desc: FG11391.1 [Gibberella zeae PH-1]
  misc_feature (9)..(158): NCBI GI: 145603035 Blast Desc: MGG_04554 [Magnaporthe grisea 70-15] gi|145011366|gb|EDJ96022.1| MGG_04554 [Magnaporthe grisea 70-15]
  misc_feature (11)..(179): NCBI GI: 46138271 Blast Desc: FG10650.1 [Gibberella zeae PH-1]
  misc_feature (8)..(179): NCBI GI: 171676924 Blast Desc: protein product [Podospora anserina] gi|170936529|emb|CAP61189.1| protein product [Podospora anserina]
  misc_feature (11)..(169): NCBI GI: 256722021 Blast Desc: NECHADRAFT_51205 [Nectria haematococca mpVI 77-13-4]
MARIHFVAPTTMVAAFIVAVTLAIGHHLFYSNLNGAAVSTNSVAFGPVDASPQKINIAVGNIFASLAGASLSISISTSYTQVVWRAIKAQRGELFWIDTVYFGVRNLTSLVHVTAWRRYPVLALLAWAFWLSAIPLVITPATLSVRLTALSTSPTAQIVPYVDFKSLNFADVPFDLDRKGFLYVQPQATVLKVVQGTAAQQLDLEP

SEQ ID NO: 38758 - DNA, 570 bp, Muscodor strobelii
  misc_feature: SGI cDNA ID NO. 573474
  misc_feature: Encodes the peptide sequence at SEQ ID NO 38759
atgtgcaagactattcttcatctcagctacactaaatgttctcacaaaagagagatcgaaggagacgaagcacgtttctgcctattttacactgagagcaaggataaatttcacattacttcacctttgtaccgcacagaggacagaatatgcccacgatgtgtaaccaaagaggagattctcgaagaggtgaggaagctggaagggaaagcgcttccggaagcggagctgaacagaagaaccaacttcaagtatcgagacactgaggactaccgtctggaacaagacgcccacactgtcaaagcacaatcagaaagcgacgtccgaaggctgggtcacagcgagaaagttatgttgaataagaggctcctcgagaatgtcatttattatatggaccagcataaaaattcggcccctctcaaatgtgttttactcacagctatttccaatttgcctaggaccttcgataggagtcgggcaacgcgcatcttcggtatggggtacggaaaattcaaggaagactgggaagaaaagcagcttgagaaattgcgaagagaactggtctcctag

SEQ ID NO: 38759 - protein, 189 aa, Muscodor strobelii
  misc_feature: SGI Peptide ID NO. 573474
MCKTILHLSYTKCSHKREIEGDEARFCLFYTESKDKFHITSPLYRTEDRICPRCVTKEEILEEVRKLEGKALPEAELNRRTNFKYRDTEDYRLEQDAHTVKAQSESDVRRLGHSEKVMLNKRLLENVIYYMDQHKNSAPLKCVLLTAISNLPRTFDRSRATRIFGMGYGKFKEDWEEKQLEKLRRELVS

SEQ ID NO: 38760 - DNA, 645 bp, Muscodor strobelii
  misc_feature: SGI cDNA ID NO. 573475
  misc_feature: Encodes the peptide sequence at SEQ ID NO 38761
atgaagtggtccgacctgaaagagtctcagctcatctgggcagtcatccaccatggcaatcatggcgcagcgacgcttgaccgcccgctaggcaccgtcagaggttggccaactatacatgcagcactggttccactcggatttacctgttcaagcgacgccgctcagtcccgatgggtccaagttcaccgcgcccttgagaacaaactccctaccatgcacatacctcttctagcaacgacccagcagaagctagccattgtatcgggcatcaacatcggatctgacccccctgtggcagacgatgacaactacgatggccacgatgactacaatgaagacgacggaggctacgatggagaggatggtggcaatggagaagacgacaacaacgccaatctcattccgtgggttcccattccgtgggttccgtgggtccatccaaatggcttcagccaggaggacagagaggatattgagagacaagtcgacaccctcctacgcaccaatgacgacgacttcgactattcagtccgaatgtttaatgtcgccactttggctatgaccaataagttgcgggagtacaacatcctctatacagctatggcgagggcctatactatcagaaatatgggcgagcagtag

SEQ ID NO: 38761 - protein, 214 aa, Muscodor strobelii
  misc_feature: SGI Peptide ID NO. 573475
MKWSDLKESQLIWAVIHHGNHGAATLDRPLGTVRGWPTIHAALVPLGFTCSSDAAQSRWVQVHRALENKLPTMHIPLLATTQQKLAIVSGINIGSDPPVADDDNYDGHDDYNEDDGGYDGEDGGNGEDDNNANLIPWVPIPWVPWVHPNGFSQEDREDIERQVDTLLRTNDDDFDYSVRMFNVATLAMTNKLREYNILYTAMARAYTIRNMGEQ

SEQ ID NO: 38762 - DNA, 375 bp, Muscodor strobelii
  misc_feature: SGI cDNA ID NO. 573476
  misc_feature: Encodes the peptide sequence at SEQ ID NO 38763
atgcagtcacaatgggtagaacttcgtcgcgaactcgaggacgacctcgccaccaccaatatccccctgaacgccaccctgcagcagaaactgtccatcgtcgccgggattccgattgagggcactcaacaggcacaagatgctaaccctcctgcaacggtcaatggcgttccgcgcctggaggaagacgacggctgggcaaccctggtgctcgattcgagccaactgagtgctgagcagcaagaacgtgtgaaagagatgcagagagaactcatgagtctggatgatcaggacttcaaggatgcatatttggatgttgtcatgcgaggtgctgctttgactggtgctattgctgaggccaatgccgatgcctag

SEQ ID NO: 38763 - protein, 124 aa, Muscodor strobelii
  misc_feature: SGI Peptide ID NO. 573476
MQSQWVELRRELEDDLATTNIPLNATLQQKLSIVAGIPIEGTQQAQDANPPATVNGVPRLEEDDGWATLVLDSSQLSAEQQERVKEMQRELMSLDDQDFKDAYLDVVMRGAALTGAIAEANADA

SEQ ID NO: 38764 - DNA, 1308 bp, Muscodor strobelii
  misc_feature: SGI cDNA ID NO. 573477
  misc_feature: Encodes the peptide sequence at SEQ ID NO 38765
atggaagaatttgctcaattgtctcgcgatatattcgagacgcatcaacaatttcgggacccggaagccagccgccactaccgccatgaaacaataatgattgacacgctcctggacggaactcgcgactacagaaccgactacgtaaaatgcaatcgtctagtagattgtttcagacaagagtatccggtattacggcatgacgaaaagctgtccgcatcactccggttggtcgcgattgcagacccgctcgatcggggagctgagcctggcgtaccacttctagtgccaaaagacacattcttcgcgcttgtagactctttgcaggcagatcacacagtgctctggctgctcctcaatcgactccatggactgcatcattttgtgtcaggaaatatcgaaacgttttatctcggaatatctgcattcgctgccatctggacatttgatacggtgtcattgcgcacgaacgccgtgttctgcattggcaatgagtcaatgtgggtatggctctctcaaatcctaaaacgataccaaaactacattgagtctccgatgctcttgccatacgcaactgttctcgctcaatgctgtgcatttgataggcagataacgtgctttcagtcatacgacctcgctcgaatcgaacataagattggctacggaaaacatagcctcaagctcgaagagcgtatccgtgtgacggaccttgcttcggcgattcaggatgtcggcagaatcatgaatgacatatctgtcaagcaaaggtcatattctatcttcgaagaaacactcgtggcgatagagcgcatgaaagtttcggaggcgtcagaagacgttaataaaaagattatgcatagcaatggaaacttactcgcgtcgatcccctcgctgcgtgcgaggataaagtcgtcacatgaataccttggttatctctacggaaaggcggatcgtttgtcaagtgtgttatacacactgatgacccacgaagatgcatcggtgaacgcagaactagcacagtcaagccgaatgattgcagaagcatcaaaacgggatagttcgtctatgaaaactgtcgctattttgacaatggcgtttctcccagggacctttgtcgctgcgctttttgctgtgccttcactagactggaatagtgcaaatgtagtaacagagcatttctggatatactgggcactcacgctgccagctactgcgctcattttcttggtatggctactattggataacaggacaaaattgatgaggcgatttgtcgcttacgaagctaccgagaaatctcatcggtga

SEQ ID NO: 38765 - protein, 435 aa, Muscodor strobelii
  misc_feature: SGI Peptide ID NO. 573477
  misc_feature (98)..(411): NCBI GI: 261359623 Blast Desc: conserved [Verticillium albo-atrum VaMs.102]
  misc_feature (122)..(425): NCBI GI: 115443480 Blast Desc: conserved [Aspergillus terreus NIH2624] gi|114188416|gb|EAU30116.1| conserved [Aspergillus terreus NIH2624]
  misc_feature (182)..(424): NCBI GI: 156051792 Blast Desc: SS1G_07303 [Sclerotinia sclerotiorum 1980] gi|154705081|gb|EDO04820.1| SS1G_07303 [Sclerotinia sclerotiorum 1980]
  misc_feature (283)..(411): NCBI GI: 169603461 Blast Desc: SNOG_04740 [Phaeosphaeria nodorum SN15] gi|111067380|gb|EAT88500.1| SNOG_04740 [Phaeosphaeria nodorum SN15]
  misc_feature (94)..(412): NCBI GI: 116195042 Blast Desc: [Chaetomium globosum CBS 148.51] gi|88180032|gb|EAQ87500.1| [Chaetomium globosum CBS 148.51]
  misc_feature (321)..(417): NCBI GI: 261360278 Blast Desc: conserved [Verticillium albo-atrum VaMs.102]
  misc_feature (323)..(412): NCBI GI: 256728825 Blast Desc: NECHADRAFT_79844 [Nectria haematococca mpVI 77-13-4]
  misc_feature (290)..(423): NCBI GI: 39976933 Blast Desc: MGG_06369 [Magnaporthe grisea 70-15] gi|145016224|gb|EDK00714.1| MGG_06369 [Magnaporthe grisea 70-15]
  misc_feature (331)..(417): NCBI GI: 46125749 Blast Desc: FG07252.1 [Gibberella zeae PH-1]
  misc_feature (331)..(419): NCBI GI: 256733236 Blast Desc: [Nectria haematococca mpVI 77-13-4]
MEEFAQLSRDIFETHQQFRDPEASRHYRHETIMIDTLLDGTRDYRTDYVKCNRLVDCFRQEYPVLRHDEKLSASLRLVAIADPLDRGAEPGVPLLVPKDTFFALVDSLQADHTVLWLLLNRLHGLHHFVSGNIETFYLGISAFAAIWTFDTVSLRTNAVFCIGNESMWVWLSQILKRYQNYIESPMLLPYATVLAQCCAFDRQITCFQSYDLARIEHKIGYGKHSLKLEERIRVTDLASAIQDVGRIMNDISVKQRSYSIFEETLVAIERMKVSEASEDVNKKIMHSNGNLLASIPSLRARIKSSHEYLGYLYGKADRLSSVLYTLMTHEDASVNAELAQSSRMIAEASKRDSSSMKTVAILTMAFLPGTFVAALFAVPSLDWNSANVVTEHFWIYWALTLPATALIFLVWLLLDNRTKLMRRFVAYEATEKSHR

SEQ ID NO: 38766 - DNA, 2059 bp, Muscodor strobelii
  misc_feature: SGI EST ID NO. CUFF.93222.0
  misc_feature: Variant of the nucleotide sequence at SEQ ID NO 38764
ggccaagaacagaagatccaaaaataggtacttgcaactattgctaaagagtaggcaataaaggggcatcaaatcatgatacttgtttgcatcagcaatggtgccaaactcgcgcaaattcgtccgattatactcaattcggtctatctggtaacatgatgactgccagggattcctcgtacgcgactggtttggtcctgattggtgttctggccagcctttgccaactgattcataagccttgacaactggagcgtatgaccgacacggggagtgccggggtcatgcgcttcttgcctctattcagctaggtacgacctatcagccactgatggggctaggtgatgcttcacctcaagtctcaactgcatggcatcgtgcatcaaccaagtccttcaccgacacacttgaagcttgttgaacttgctcttgccaccttgtgtattccattgagtagcatcagattacccattgcctgcatatcgtgcagctaataacgacgcctagtgtcagcaactcccaagaaatgacatccatcccgaaaaccttacagggactcattcttgatctgagtgtccctacggcactaaagcctttggtcgccattcaatactgctaggaatatggaagaatttgctcaattgtctcgcgatatattcgagacgcatcaacaatttcgggacccggaagccagccgccactaccgccatgaaacaataatgattgacacgctcctggacggaactcgcgactacagaaccgactacgtaaaatgcaatcgtctagtagattgtttcagacaagagtatccggtattacggcatgacgaaaagctgtccgcatcactccggttggtcgcgattgcagacccgctcgatcggggagctgagcctggcgtaccacttctagtgccaaaagacacattcttcgcgcttgtagactctttgcaggcagatcacacagtgctctggctgctcctcaatcgactccatggactgcatcattttgtgtcaggaaatatcgaaacgttttatctcggaatatctgcattcgctgccatctggacatttgatacggtgtcattgcgcacgaacgccgtgttctgcattggcaatgagtcaatgtgggtatggctctctcaaatcctaaaacgataccaaaactacattgagtctccgatgctcttgccatacgcaactgttctcgctcaatgctgtgcatttgataggcagataacgtgctttcagtcatacgacctcgctcgaatcgaacataagattggctacggaaaacatagcctcaagctcgaagagcgtatccgtgtgacggaccttgcttcggcgattcaggatgtcggcagaatcatgaatgacatatctgtcaagcaaaggtcatattctatcttcgaagaaacactcgtggcgatagagcgcatgaaagtttcggaggcgtcagaagacgttaataaaaagattatgcatagcaatggaaacttactcgcgtcgatcccctcgctgcgtgcgaggataaagtcgtcacatgaataccttggttatctctacggaaaggcggatcgtttgtcaagtgtgttatacacactgatgacccacgaagatgcatcggtgaacgcagaactagcacagtcaagccgaatgattgcagaagcatcaaaacgggatagttcgtctatgaaaactgtcgctattttgacaatggcgtttctcccagggacctttgtcgctgcgctttttgctgtgccttcactagactggaatagtgcaaatgtagtaacagagcatttctggatatactgggcactcacgctgccagctactgcgctcattttcttggtatggctactattggataacaggacaaaattgatgaggcgatttgtcgcttacgaagctaccgagaaatctcatcggtgaaagccccgcaagcggcaacgctaagtacatcaacgacctttcgaacctatgaagtgaaacgtcgaacaagtagtaatagagagcatacacatactagatcggaactcagactctgtgatcagaactgc

SEQ ID NO: 38767 - DNA, 1530 bp, Muscodor strobelii
  misc_feature: SGI cDNA ID NO. 573478
  misc_feature: Encodes the peptide sequence at SEQ ID NO 38768
atgggcccttacccgaaattcaggttcaaacttatcaccgatcaagttcttcaagcagtaatatcaatgcatgacaacaagtttacgcatcgggatctgaaacctgctaatattctaattaagactaggccacctatcagcaagtggcatgtcaaagtctgcgatatgggactgagtaaacgaatcggaaaggagataacgtctacaacagtgaagggaacaccaggctttcttgctcctgaacgcatacccggtataggatctagcccttctacggcagatcctttccccggcgacatgtggtgtctgggggaaattacgttcttcctaattaccagtggtacaacgtttgaaactcatatggacctgcataactacttcattgggacccatgaatttcccatggagcgtctgaagggatcaaaggcaacagaaaaggctgtcgactttattaagcaattgatggaagctgcctcaacaagaagactgacagccagtcaagcagactatcatccttggatgactgaaacgaatgcgtttggtgaagaagacacatcgaaggcttttggtcgaagtctagatcaacttgaaacacgtgtccatagccgtcaacaaagcgataacgacatacgcgagcgtatggcttacacatctatacatgatgcggttaacaatttggatcaaaatttcccaccaattccacatattgaagaagcgccaacactgccttcggggacctggaacacagacacacaggctgcaagacagccattatatcatgcactaaatgctggatgctcaacatcaaaattagtcgaagttaaggagacagcaggagatgagaatactgcagatgtaggtgtcgaacgacaacggcgtccttatgcttatacgtctgctactcaaaataatcctggaaactcagatagcgatggcgaaacagacggccgagaaccatcggaaattaaagacccacaatcattctggaaccagtggcaagatcgatatgttgaacccacccagcctagttcctctgataactcgggtagtgatgacgcgaaatacgagccgcgacctaagaccaagcgtgctgcctcgaacgaaccaccaggagaagcaagacatcggaaaatggtccgaatgatgcgatctgcggttagctatgtggaattcggccacacccttcccaggagaacgactacgttctattacgatatagagaaccgagttagccttgacgagccccaagtatcgctcggggattacgagatctcacgcctcttggaacttgaagaggatgatgttctcgctcatcatcacatgccatgggtgaaacaacctccctgcgtaatgtccttactgccaatatatgatgatgatggcgagacgatacaatcatacactccgcgcctgcaccatgatcaagcatctatttcttccgaagatgagaatgcatttctctccgacagccaacaatcagtcaatgccgaagatggccatctatctaagaggccaagatcaagcaattaa

SEQ ID NO: 38768 - protein, 509 aa, Muscodor strobelii
  misc_feature: SGI Peptide ID NO. 573478
  misc_feature (10)..(174): Pfam Id: PF00069 Pfam Desc: Protein kinase domain
  misc_feature (2)..(174): NCBI GI: 256726178 Blast Desc: NECHADRAFT_81826 [Nectria haematococca mpVI 77-13-4]
  misc_feature (12)..(176): NCBI GI: 256735560 Blast Desc: NECHADRAFT_99010 [Nectria haematococca mpVI 77-13-4]
  misc_feature (3)..(175): NCBI GI: 256723317 Blast Desc: NECHADRAFT_86497 [Nectria haematococca mpVI 77-13-4]
  misc_feature (3)..(176): NCBI GI: 255930945 Blast Desc: Pc12g01300 [Penicillium chrysogenum Wisconsin 54-1255] gi|211581648|emb|CAP79757.1| Pc12g01300 [Penicillium chrysogenum Wisconsin 54-1255]
  misc_feature (3)..(174): NCBI GI: 255939480 Blast Desc: Pc16g00910 [Penicillium chrysogenum Wisconsin 54-1255] gi|211585132|emb|CAP92761.1| Pc16g00910 [Penicillium chrysogenum Wisconsin 54-1255]
  misc_feature (3)..(176): NCBI GI: 115386652 Blast Desc: [Aspergillus terreus NIH2624] gi|114190865|gb|EAU32565.1| [Aspergillus terreus NIH2624]
  misc_feature (3)..(178): NCBI GI: 171681016 Blast Desc: protein product [Podospora anserina] gi|170940466|emb|CAP65693.1| protein product [Podospora anserina]
  misc_feature (10)..(178): NCBI GI: 66801211 Blast Desc: DDB_G0292624 [Dictyostelium discoideum AX4] gi|74996479|sp|Q54CY9.1|MYLKD_DICDI RecName: Full= myosin light chain kinase DDB_G0292624 gi|60462918|gb|EAL61115.1| DDB_G0292624
  misc_feature (12)..(174): NCBI GI: 169779591 Blast Desc: [Aspergillus oryzae RIB40] gi|83772999|dbj|BAE63127.1| protein product [Aspergillus oryzae]
  misc_feature (1)..(174): NCBI GI: 239885744 Blast Desc: Calcium-dependent protein kinase, [Perkinsus marinus ATCC 50983]
MGPYPKFRFKLITDQVLQAVISMHDNKFTHRDLKPANILIKTRPPISKWHVKVCDMGLSKRIGKEITSTTVKGTPGFLAPERIPGIGSSPSTADPFPGDMWCLGEITFFLITSGTTFETHMDLHNYFIGTHEFPMERLKGSKATEKAVDFIKQLMEAASTRRLTASQADYHPWMTETNAFGEEDTSKAFGRSLDQLETRVHSRQQSDNDIRERMAYTSIHDAVNNLDQNFPPIPHIEEAPTLPSGTWNTDTQAARQPLYHALNAGCSTSKLVEVKETAGDENTADVGVERQRRPYAYTSATQNNPGNSDSDGETDGREPSEIKDPQSFWNQWQDRYVEPTQPSSSDNSGSDDAKYEPRPKTKRAASNEPPGEARHRKMVRMMRSAVSYVEFGHTLPRRTTTFYYDIENRVSLDEPQVSLGDYEISRLLELEEDDVLAHHHMPWVKQPPCVMSLLPIYDDDGETIQSYTPRLHHDQASISSEDENAFLSDSQQSVNAEDGHLSKRPRSSN

SEQ ID NO: 38769 - DNA, 773 bp, Muscodor strobelii
  misc_feature: SGI EST ID NO. CUFF.93300.1
  misc_feature: Variant of the nucleotide sequence at SEQ ID NO 38767
ttgcgagctataatgctataaaagcacacacctaaagactcacatactcgttccagatgaaatttcggcggaatggcgttcaacggactctaattgtaacctcctactgatcggtagacaaaatggtggcggatgcagacatacctgagtctgtgctcgattcacggtgggaagctgaatttcgcccaaaccagcattatccgagtcaagtcattaatacccagtcttttggtcgtaggaggacacggcaagagatctggatacgtgagaagaggttgggtcatgggggctttggcgtggtgtggctggagagagcccattcagcaaatcaatttgcagcggagttgcgagcggtaaaagaattgagacttggagaggaagatggtcgccggagagagtgcattcgtgagctagaggctctgattaagttctctcatagaaagtttgtgaattcattcgtggagttctttagctggtttgaaagtaaagagtcactttttattgccaccgagtactgtcaatacggagacctgaagcagttcatccgagactatgggcccttacccgaaattcaggttcaaacttatcaccgatcaagttcttcaagcagtaatatcaatgcatgacaacaagtttacgcatcgggatctgaaacctgctaatattctaattaagactaggccacctatcagcaagtggcatgtcaaagtctgcgatatgggactgagtaaacgaatcggaaaggagataacgtctacaacagtgaagggaac

SEQ ID NO: 38770 - DNA, 1029 bp, Muscodor strobelii
  misc_feature: SGI cDNA ID NO. 573479
  misc_feature: Encodes the peptide sequence at SEQ ID NO 38771
atgtcttcaaaggaaacgattcttattacgggcctcaacggctacattgctggtcaaacagccaagtttgtactcaagaaaggctaccgcgttcgaggaactacccgcgaccctacaatgggcgaatcagtcaagactgccttatgcagtgtgggtcactctgaagaagacgttgacattgtccatgtcgctgacctctgcgaaccaaacattcttgaccaggcagcttctggatgcattgcgatccttcatcttgcctcaccaatcacaaacgtgtggtccatgcgcccaacagaggtgctccgtatcgctgtcgatggtactcggaatgtgctgagcgcagctcagaaagcaggatcacagctacgaagtgtagtcctagcatcatctactgctgccctattcaactatccgcttgggagccaaatttacgatgagagaaactggaacactaaatcagagcagattatgagccaaaaaggtgacgaagccgacacaatcaatgcctactttgcgagcaagacagcagcagaaaagttattctgggcatttcgaaaggagcaaaagccatctttctccatgacgtccatacttcctagctatgtgatcggtgcccctctcatcccgtggaaggaccctaacgcaattccgtactctaacagcccttacttgcaagcgatatcaaataagcgtccgcccgatgacctagccgtgtactcagatacaattgatataagagatgtggcaagaatgctagtttggcccgtggagaatactttaaaggccgatggagagcgcttcatctgttcctccgctgcagctaatgggcaagcaatcgcagacattctgagcaagcacttgccatctattgggatgcaaggcgggaatgagggtagggattggtcggctggttatccgtccaagaccttcgactcaagcaaggccgtgacagcaacgggtcagaactggaccccgtacgaagagagtgccgttgatatggcgttgtacctccaacggtacctaaagtag

SEQ ID NO: 38771 - protein, 342 aa, Muscodor strobelii
  misc_feature: SGI Peptide ID NO. 573479
  misc_feature (7)..(270): Pfam Id: PF01370 Pfam Desc: NAD dependent epimerase/dehydratase family
  misc_feature (9)..(252): Pfam Id: PF07993 Pfam Desc: Male sterility protein
  misc_feature (7)..(187): Pfam Id: PF01370 Pfam Desc: NAD dependent epimerase/dehydratase family
  misc_feature (3)..(333): NCBI GI: 171680402 Blast Desc: protein product [Podospora anserina] gi|170939828|emb|CAP65053.1| protein product [Podospora anserina]
  misc_feature (1)..(341): NCBI GI: 116203273 Blast Desc: CHGG_09521 [Chaetomium globosum CBS 148.51] gi|88178039|gb|EAQ85507.1| CHGG_09521 [Chaetomium globosum CBS 148.51]
  misc_feature (7)..(341): NCBI GI: 212540674 Blast Desc: NAD dependent epimerase/dehydratase, [Penicillium marneffei ATCC 18224] gi|210067791|gb|EEA21883.1| NAD dependent epimerase/dehydratase, [Penicillium marneffei ATCC 18224]
  misc_feature (1)..(341): NCBI GI: 46127987 Blast Desc: FG08371.1 [Gibberella zeae PH-1]
  misc_feature (1)..(339): NCBI GI: 58267530 Blast Desc: D-lactaldehyde dehydrogenase [Cryptococcus neoformans var. neoformans JEC21] gi|58267532|ref|XP_570922.1| D-lactaldehyde dehydrogenase [Cryptococcus neoformans var. JEC21]
  misc_feature (1)..(339): NCBI GI: 58267534 Blast Desc: D-lactaldehyde dehydrogenase [Cryptococcus neoformans var. neoformans JEC21] gi|134112213|ref|XP_775082.1| CNBE3560 [Cryptococcus neoformans var. neoformans B-3501A] CNBE3560 var.
  misc_feature (1)..(334): NCBI GI: 116193991 Blast Desc: CHGG_06713 [Chaetomium globosum CBS 148.51] gi|88182626|gb|EAQ90094.1| CHGG_06713 [Chaetomium globosum CBS 148.51]
  misc_feature (7)..(341): NCBI GI: 242801142 Blast Desc: NAD dependent epimerase/dehydratase, [Talaromyces stipitatus ATCC 10500] gi|218717045|gb|EED16466.1| NAD dependent epimerase/dehydratase, [Talaromyces stipitatus ATCC 10500]
  misc_feature (2)..(341): NCBI GI: 154318560 Blast Desc: BC1G_02669 [Botryotinia fuckeliana B05.10] gi|150857799|gb|EDN32991.1| BC1G_02669 [Botryotinia fuckeliana B05.10]
  misc_feature (2)..(309): NCBI GI: 156063694 Blast Desc: SS1G_01965 [Sclerotinia sclerotiorum 1980] gi|154697299|gb|EDN97037.1| SS1G_01965 [Sclerotinia sclerotiorum 1980]
  misc_feature (2)..(300): SWISSPROT Homolog: EC 1.1.1.234 Flavanone 4-reductase
  misc_feature (2)..(300): SWISSPROT Homolog: EC 1.1.1.219 Dihydrokaempferol 4-reductase
MSSKETILITGLNGYIAGQTAKFVLKKGYRVRGTTRDPTMGESVKTALCSVGHSEEDVDIVHVADLCEPNILDQAASGCIAILHLASPITNVWSMRPTEVLRIAVDGTRNVLSAAQKAGSQLRSVVLASSTAALFNYPLGSQIYDERNWNTKSEQIMSQKGDEADTINAYFASKTAAEKLFWAFRKEQKPSFSMTSILPSYVIGAPLIPWKDPNAIPYSNSPYLQAISNKRPPDDLAVYSDTIDIRDVARMLVWPVENTLKADGERFICSSAAANGQAIADILSKHLPSIGMQGGNEGRDWSAGYPSKTFDSSKAVTATGQNWTPYEESAVDMALYLQRYLK

SEQ ID NO: 38772 - DNA, 981 bp, Muscodor strobelii
  misc_feature: SGI cDNA ID NO. 573480
  misc_feature: Encodes the peptide sequence at SEQ ID NO 38773
atgatgtcttcgtcgaactttgttaagaaaattgccatagtaggggccgggggcaacagtggtcgttacatatccgaagccctcctcagaactacgaaacacgcggtgacagcaatcacgcgtattggcagtcagacaaaacttcccgagggtgtcgcaaccaaagagattgactataccaagcccgactcactcgtcgaagctctacggggccaagaagtcttgattatcacgctcagcggttatgctcctaaggatacagaggcccaactgatcaaggcagctgctgaagcacgagtgccatggattctacctggcgaatggagtcctgacagtacgaatgaggcactcgtcagagatgttgctccgtttcagtcgaaggttgctcatcgcaaactcattgaggaacttggggccagctcttatatatcagtaataactggcttctggtatgaatggagtctcgcgatagggcctgcctttgggtttgactttgaaaatcggaaggtcacattattcgacaatggtgaaactagagtgtcgctatctacatggccacagatcggtcgcgcagtggccgctcttctgagtttacccattactcacagccacggccagggtgtgcaaccttgcctcgataactaccgaaacaagcccgtgttcatcaactctttcacattaactcagaaagatatcctggcttccgtgcttcgtgtgactaaaactcaagaaagcgactgggctatagtaaaggagcctacccaagagcgatacgaggagggcctaagacagatcaaggaaggacagcgtatcggattcgcgaagatgatgtatacccgcgtcttcttcccagatgactgtggagactttgaaaagactaaaggaacgcacaatggggcgctcgggttgccccatgaggatatcgatgaggcaaccaagatcgctattgagcgatccaagagcgcaagaatcttaggctga

SEQ ID NO: 38773 - protein, 326 aa, Muscodor strobelii
  misc_feature: SGI Peptide ID NO. 573480
  misc_feature (11)..(254): Pfam Id: PF05368 Pfam Desc: NmrA-like family
  misc_feature (2)..(326): NCBI GI: 212531267 Blast Desc: conserved [Penicillium marneffei ATCC 18224] gi|210071154|gb|EEA25243.1| conserved [Penicillium marneffei ATCC 18224]
  misc_feature (2)..(321): NCBI GI: 242798045 Blast Desc: conserved [Talaromyces stipitatus ATCC 10500] gi|218716433|gb|EED15854.1| conserved [Talaromyces stipitatus ATCC 10500]
  misc_feature (2)..(321): NCBI GI: 242772561 Blast Desc: conserved [Talaromyces stipitatus ATCC 10500] gi|218721678|gb|EED21096.1| conserved [Talaromyces stipitatus ATCC 10500]
  misc_feature (24)..(321): NCBI GI: 242772566 Blast Desc: conserved [Talaromyces stipitatus ATCC 10500] gi|218721679|gb|EED21097.1| conserved [Talaromyces stipitatus ATCC 10500]
  misc_feature (4)..(319): NCBI GI: 242788199 Blast Desc: conserved [Talaromyces stipitatus ATCC 10500] gi|218721317|gb|EED20736.1| conserved [Talaromyces stipitatus ATCC 10500]
  misc_feature (2)..(293): NCBI GI: 212543971 Blast Desc: isoflavone reductase family protein [Penicillium marneffei ATCC 18224] gi|210067047|gb|EEA21140.1| isoflavone reductase family protein [Penicillium marneffei ATCC 18224]
  misc_feature (2)..(320): NCBI GI: 212538727 Blast Desc: conserved [Penicillium marneffei ATCC 18224] gi|210069261|gb|EEA23352.1| conserved [Penicillium marneffei ATCC 18224]
  misc_feature (5)..(317): NCBI GI: 159130395 Blast Desc: oxidoreductase CipA-like, [Aspergillus fumigatus A1163]
  misc_feature (5)..(317): NCBI GI: 70990128 Blast Desc: oxidoreductase CipA-like [Aspergillus fumigatus Af293] gi|66847545|gb|EAL87875.1| oxidoreductase CipA-like, [Aspergillus fumigatus Af293]
  misc_feature (5)..(317): NCBI GI: 119497459 Blast Desc: oxidoreductase CipA, [Neosartorya fischeri NRRL 181] gi|119413650|gb|EAW23591.1| oxidoreductase CipA, [Neosartorya fischeri NRRL 181]
MMSSSNFVKKIAIVGAGGNSGRYISEALLRTTKHAVTAITRIGSQTKLPEGVATKEIDYTKPDSLVEALRGQEVLIITLSGYAPKDTEAQLIKAAAEARVPWILPGEWSPDSTNEALVRDVAPFQSKVAHRKLIEELGASSYISVITGFWYEWSLAIGPAFGFDFENRKVTLFDNGETRVSLSTWPQIGRAVAALLSLPITHSHGQGVQPCLDNYRNKPVFINSFTLTQKDILASVLRVTKTQESDWAIVKEPTQERYEEGLRQIKEGQRIGFAKMMYTRVFFPDDCGDFEKTKGTHNGALGLPHEDIDEATKIAIERSKSARILG

SEQ ID NO: 38774 - DNA, 678 bp, Muscodor strobelii
  misc_feature: SGI EST ID NO. CUFF.93233.0
  misc_feature: Variant of the nucleotide sequence at SEQ ID NO 38772
ccggaacagatgatatgatcttgctcaaaatgaagagcctcggaattggttgaaatgattagtaaggtaactattcatttctaaaagttattcgagtattgcatcaccataaagctagtgtcggggccgctctggagttaggcgcctctcacacccgctatggagcttaacaccgaacaatatcatcgacgacaatatctatcgggtttcagacaacagcgtcaacagtgaaatccgtgcatgtcgagatacaaaattagtttaaagtccgcattccgtcacgatggacaaacagaaaccatttcagatgcttcaaggtcatagtcggaagattttgttgtaaattcagaaatcattagggatcagataattacggtgtcaatttaagaatgatgtcttcgtcgaactttgttaagaaaattgccatagtaggggccgggggcaacagtggtcgttacatatccgaagccctcctcagaactacgaaacacgcggtgacagcaatcacgcgtattggcagtcagacaaaacttcccgagggtgtcgcaaccaaagagattgactataccaagcccgactcactcgtcgaagctctacggggccaagaagtcttgattatcacgctcagcggttatgctcctaaggatacagaggcccaactgatcaaggcagctgctg

SEQ ID NO: 38775 - DNA, 1719 bp, Muscodor strobelii
  misc_feature: SGI cDNA ID NO. 573481
  misc_feature: Encodes the peptide sequence at SEQ ID NO 38776
atggaggccaagagtcatcctcagcctgggggcttcaggatcaagtcgagtgatccagattttgaggattcactcagacagcttatatgtactggaagtaatgggacagaggagtatctgaggttcgatgtcgatgtcttttcttcttccgtcaagagcttctgcgaagagaacatgggcttcaatggaacggataccgataatatcgatgtagttggaaatattcttgtcttggtgggctccgccatagaggcacagaccgcattgtatcacgatttcgttcaaatgatgtggggattcgatgccatggagctatcacatgcttttctgacggcattgattagtcgtgatatgtggaagaacttcgaaagagtctcccttatcgatcttgaggttctactgcttttgaattcctccgacggtacaacccgcatctgtttctggggcaagttacatcgtatcgtcggagctatgcagctgctgtcttttctcgtccgtgtttgtacgactcctcgggcagtcggcttatgggagccagtggcgacagttctgcgtcgaccccgcggaaagccggccttgtacgtgagccagagaccactactaaatctcgaaaagccgacggaaggagtctgttggcattacctctttcccacagccgtcataatctctggatttcgtacacctccccgcaacaagggccgaggattagaaataccattcgaagtcatggtagtcctcgcgcagacgtccagcaccttaaattttgagggcggttgtatcttagtcgggcactctttgctacttttcccttctgaaatgctcgagaccgacgtccaatggcattgtatcaagcttgatgatctcgaaactgctctaggtattgtccggtctgctgaaaagagggttcgggacactccgcttgctaaattattggatcgacgtgctttcctcggacattatcctacagctcgtgtatgcttaggtacaaaggacatgctggaagcaaagaccaagttactacactgtcagcttcctcccgcttcttctcatattgaatttggacgggaagtgaccacatcagcaaatatccagcttgtgccaaaatttctaggtatgacaatcaacgggaaatggctacttccgaaaagtatcgaagtcagcatgagtgataatcgaggttacgaggatagattgaatgcgtcccagaatgcagtcagcatactatatgacaccgagacatcaacagggtggcttgtgtcagagctcagcgttgttttgcaccagatgcttcttaacctgaaaaacgtcgataaactgaatcaactattgcctgaacatttcgccttgcctagtcctgatggtggcctagctgctttgaatgccattcgttcacaaaaagatcttgaacttcatcgtgacgaggaaggcaagccccaaaagttatctaaaattgtcgataacttcatgaaggatctcgcctccatccggaacgccaggcgtatcagatcgaaagaggccggatttaaagtagctacttataaatacaacctgcgtggctgggacttcctgactcttgtggagcggagatcccataccgaggaacgagaacttcgaaacggtctttcggaagtctggtggaacttaggccgttcccctgaagttctggtcttctttgggccagctgaagaaaccttcgaaacgtgtcttgcgttcatctaa

SEQ ID NO: 38776 - protein, 572 aa, Muscodor strobelii
  misc_feature: SGI Peptide ID NO. 573481
  misc_feature (203)..(559): NCBI GI: 212543887 Blast Desc: PMAA_049030 [Penicillium marneffei ATCC 18224] gi|210067005|gb|EEA21098.1| PMAA_049030 [Penicillium marneffei ATCC 18224]
  misc_feature (70)..(559): NCBI GI: 121704357 Blast Desc: Pfs domain protein [Aspergillus clavatus NRRL 1] gi|119398587|gb|EAW09016.1| Pfs domain protein [Aspergillus clavatus NRRL 1]
  misc_feature (203)..(559): NCBI GI: 115390136 Blast Desc: [Aspergillus terreus NIH2624] gi|114194969|gb|EAU36669.1| [Aspergillus terreus NIH2624]
  misc_feature (207)..(558): NCBI GI: 212530322 Blast Desc: Pfs domain protein [Penicillium marneffei ATCC 18224] gi|210074716|gb|EEA28803.1| Pfs domain protein [Penicillium marneffei ATCC 18224]
  misc_feature (209)..(559): NCBI GI: 70985797 Blast Desc: Pfs domain protein [Aspergillus fumigatus Af293] gi|66846033|gb|EAL86366.1| Pfs domain protein [Aspergillus fumigatus Af293]
  misc_feature (12)..(559): NCBI GI: 145228841 Blast Desc: An01g02950 [Aspergillus niger] gi|134054821|emb|CAK43661.1| protein product [Aspergillus niger]
  misc_feature (373)..(433): NCBI GI: 242809269 Blast Desc: TSTA_048240 [Talaromyces stipitatus ATCC 10500] gi|218715959|gb|EED15381.1| TSTA_048240 [Talaromyces stipitatus ATCC 10500]
  misc_feature (210)..(431): NCBI GI: 212544984 Blast Desc: conserved [Penicillium marneffei ATCC 18224] gi|210065615|gb|EEA19709.1| conserved [Penicillium marneffei ATCC 18224]
  misc_feature (243)..(559): NCBI GI: 116193317 Blast Desc: CHGG_06376 [Chaetomium globosum CBS 148.51] gi|88182289|gb|EAQ89757.1| CHGG_06376 [Chaetomium globosum CBS 148.51]
MEAKSHPQPGGFRIKSSDPDFEDSLRQLICTGSNGTEEYLRFDVDVFSSSVKSFCEENMGFNGTDTDNIDVVGNILVLVGSAIEAQTALYHDFVQMMWGFDAMELSHAFLTALISRDMWKNFERVSLIDLEVLLLLNSSDGTTRICFWGKLHRIVGAMQLLSFLVRVCTTPRAVGLWEPVATVLRRPRGKPALYVSQRPLLNLEKPTEGVCWHYLFPTAVIISGFRTPPRNKGRGLEIPFEVMVVLAQTSSTLNFEGGCILVGHSLLLFPSEMLETDVQWHCIKLDDLETALGIVRSAEKRVRDTPLAKLLDRRAFLGHYPTARVCLGTKDMLEAKTKLLHCQLPPASSHIEFGREVTTSANIQLVPKFLGMTINGKWLLPKSIEVSMSDNRGYEDRLNASQNAVSILYDTETSTGWLVSELSVVLHQMLLNLKNVDKLNQLLPEHFALPSPDGGLAALNAIRSQKDLELHRDEEGKPQKLSKIVDNFMKDLASIRNARRIRSKEAGFKVATYKYNLRGWDFLTLVERRSHTEERELRNGLSEVWWNLGRSPEVLVFFGPAEETFETCLAFI

SEQ ID NO: 38777 - DNA, 1629 bp, Muscodor strobelii
  misc_feature: SGI cDNA ID NO. 573482
  misc_feature: Encodes the peptide sequence at SEQ ID NO 38778
atgaaggccctactgatctctgcaacatgtatcctaatacaactaatcactgtaactcgcggtcaagtcctgtctgcgtctttggactacggcacatttcagggtgcttatagttcaaggtacaacatctcatactggcagaagattcccttcgcagcacctcccgtaggtcagaacagattccgagcgccgcagccacctctgaaaattacaaatggcacatacaactcctcccgcaccttcgatatgtgtccccaacgaaccgtgaacggatcagaagactgtctatacctcgggctctacagccgtccatggtctgcgggacagcccctacgtcccgtcgtcttaacattctacggcggagggtacatccaaggatcggcatccttcacgctcccaccttccgcatacccgatcctcaacgtctcaagcgagagtaacatgatcttcgtgtatcctaactaccgaactaatgctttcggattcttacctgggagggaagtgaaagatgatccatactcggatgccaatgcggggctgttggatcagtctatggcgttacattgggttagtaagtatatcgcggaatttggcggtgacccagaacgaattacggtctggggacagagcgcgggaggtgggagtgcgattgcacagagtattggggatcagagtgttagtgctgggtatggtcgagggaacaagaagaaggagggacaactggctcgacaaactcttgcttcgagtcccttttggtctaagacttacgcggttgatgcgccagaagcacaagcactatatgacagacttgcgaatttgacggggtgcgcgggtccggatagtctccaatgtctgaaagggatcgatgttcagactattcgagacgctagcttgactatctcgtcgagtcaacagtacacgacatcctcgttctcttggggcccagtcatcgacggtgcctttttgaaggagcccctttctgttgccagcacacgaggtgccgccattctggacggatacggtatgtataatacgcacgaaggcgagaattttatcccgccaggcctgaagagcagcgtcaatactggaacgccagcattcaactcctctgttgcttcgtttgagaagtggctctcgggatatctccccggcctctcggaaagcgacttggcgacattaaaacaggcatatcccattaatgggagctcggaaaacattgcagtttacaatgattcatatacacgagctggactcatattccgagactcaacgcttgcctgtcctgcgtattggctagctggcagtgcagtgaatggtagttgggtaggagaatacacgatttccccggcaatgcacgcctcagatgtctattggtggaacacggtgaacgtcgctcagcagcaagacccttttcactatgaaggatatgcgggagcaatggcatctttctttatgaccggcgacccgaacgccctgaaattgactgcaagcgatatttctggcctgccagctttgacgagtaatcaggaatgggtcatcgatgccgaggggtttcggacgtcatccattgagcagctagagagaagatgtgcattttggaagtcagttgcatcaaaagtccctatatag

SEQ ID NO: 38778 - protein, 542 aa, Muscodor strobelii
  misc_feature: SGI Peptide ID NO. 573482
  misc_feature (8)..(533): Pfam Id: PF00135 Pfam Desc: Carboxylesterase
  misc_feature (8)..(216): Pfam Id: PF00135 Pfam Desc: Carboxylesterase
  misc_feature (259)..(325): Pfam Id: PF00135 Pfam Desc: Carboxylesterase
  misc_feature (24)..(542): NCBI GI: 261361452 Blast Desc: carboxylesterase [Verticillium albo-atrum VaMs.102]
  misc_feature (6)..(542): NCBI GI: 71001006 Blast Desc: carboxylesterase [Aspergillus fumigatus Af293] gi|66852822|gb|EAL93146.1| carboxylesterase, [Aspergillus fumigatus Af293] gi|159129274|gb|EDP54388.1| carboxylesterase,
  misc_feature (6)..(542): NCBI GI: 119480657 Blast Desc: carboxylesterase [Neosartorya fischeri NRRL 181] gi|119408511|gb|EAW18460.1| carboxylesterase [Neosartorya fischeri NRRL 181]
  misc_feature (1)..(542): NCBI GI: 261358156 Blast Desc: carboxylesterase [Verticillium albo-atrum VaMs.102]
  misc_feature (26)..(542): NCBI GI: 238493751 Blast Desc: carboxylesterase, [Aspergillus flavus NRRL3357] gi|220696606|gb|EED52948.1| carboxylesterase, [Aspergillus flavus NRRL3357]
  misc_feature (26)..(542): NCBI GI: 145246424 Blast Desc: An12g03860 [Aspergillus niger] gi|134080177|emb|CAK46157.1| protein product [Aspergillus niger]
  misc_feature (25)..(542): NCBI GI: 189202478 Blast Desc: acetylcholinesterase precursor [Pyrenophora tritici-repentis Pt-1C-BFP] gi|187984674|gb|EDU50162.1| acetylcholinesterase precursor [Pyrenophora tritici-repentis
  misc_feature (1)..(529): NCBI GI: 115443004 Blast Desc: conserved [Aspergillus terreus NIH2624] gi|114188178|gb|EAU29878.1| conserved [Aspergillus terreus NIH2624]
  misc_feature (26)..(529): NCBI GI: 255935647 Blast Desc: Pc13g04140 [Penicillium chrysogenum Wisconsin 54-1255] gi|211583470|emb|CAP91483.1| Pc13g04140 [Penicillium chrysogenum Wisconsin 54-1255]
  misc_feature (68)..(542): NCBI GI: 169783926 Blast Desc: [Aspergillus oryzae RIB40] gi|83775169|dbj|BAE65292.1| protein product [Aspergillus oryzae]
  misc_feature (49)..(296): SWISSPROT Homolog: EC 3.1.1.3 Triacylglycerol lipase
MKALLISATCILIQLITVTRGQVLSASLDYGTFQGAYSSRYNISYWQKIPFAAPPVGQNRFRAPQPPLKITNGTYNSSRTFDMCPQRTVNGSEDCLYLGLYSRPWSAGQPLRPVVLTFYGGGYIQGSASFTLPPSAYPILNVSSESNMIFVYPNYRTNAFGFLPGREVKDDPYSDANAGLLDQSMALHWVSKYIAEFGGDPERITVWGQSAGGGSAIAQSIGDQSVSAGYGRGNKKKEGQLARQTLASSPFWSKTYAVDAPEAQALYDRLANLTGCAGPDSLQCLKGIDVQTIRDASLTISSSQQYTTSSFSWGPVIDGAFLKEPLSVASTRGAAILDGYGMYNTHEGENFIPPGLKSSVNTGTPAFNSSVASFEKWLSGYLPGLSESDLATLKQAYPINGSSENIAVYNDSYTRAGLIFRDSTLACPAYWLAGSAVNGSWVGEYTISPAMHASDVYWWNTVNVAQQQDPFHYEGYAGAMASFFMTGDPNALKLTASDISGLPALTSNQEWVIDAEGFRTSSIEQLERRCAFWKSVASKVPI

SEQ ID NO: 38779 - DNA, 918 bp, Muscodor strobelii
  misc_feature: SGI cDNA ID NO. 573483
  misc_feature: Encodes the peptide sequence at SEQ ID NO 38780
atggctgaatcaccactgcgcatcggcttcgtgccggagcacttctccacgcccatatacttcgcaaagaaatacttcggtctcacggcagaactgatccccttcccatcagggacaggacacatgatcacagcgatccgcgccggtgagatcgacattggtatcggcctaacagaaggatggatcgctgggctcggcaaagaagacacccctgacgacggaggctatcggctcgtagggactttcgttgagacgccgctctgctgggcaatatcaacaggcgccaagcgtcccgacatatcatccgtcgagacactcaaaggcggcaaagtgggcatatcacgtatcggctcgggaagccaagtaatgagctatgtcctcgcagaccaacaaggttggctctcgtcctcatcgacagcaccatactcggactttgtcatcctccagaatttcgcgaatctgaggaacgccgtaaacgatgggagtgctgatttcttcatgtgggaacacttcacgtcaaagaaatactacgacagcggagaaattcgcagagtcggggagatctacacgccgtggagtagttggaagatcgtcgcctctaccaagttgctcagcaccgatggagggaaagacagggtgatggatgtttgtgggaagttagataagggtgtgaaacactttaatgagaacaacgaggaggctgtcaagtatatcagtacgagtcttgattactcggaagaggatgcaagggaatggcttaagacggtgagattctcgaccaagactgagggtgtggatctgaaggttgtgcaaagttgtatcgggatactgaggaaggcgggtgtgctaaaagaggacaaaggcatgcatgctgaagggatacttgcgaagggatttggggcgcaattccctgagtga

SEQ ID NO: 38780 - protein, 305 aa, Muscodor strobelii
  misc_feature: SGI Peptide ID NO. 573483
  misc_feature (1)..(297): NCBI GI: 171676346 Blast Desc: protein product [Podospora anserina] gi|170936239|emb|CAP60898.1| protein product [Podospora anserina]
  misc_feature (1)..(295): NCBI GI: 46123531 Blast Desc: FG06143.1 [Gibberella zeae PH-1]
  misc_feature (1)..(296): NCBI GI: 39976199 Blast Desc: MGG_05974 [Magnaporthe grisea 70-15] gi|145011752|gb|EDJ96408.1| MGG_05974 [Magnaporthe grisea 70-15]
  misc_feature (2)..(297): NCBI GI: 85089957 Blast Desc: NCU07738 [Neurospora crassa OR74A] gi|28919524|gb|EAA28953.1| conserved [Neurospora crassa OR74A]
  misc_feature (2)..(286): NCBI GI: 154313089 Blast Desc: BC1G_05546 [Botryotinia fuckeliana B05.10] gi|150849631|gb|EDN24824.1| BC1G_05546 [Botryotinia fuckeliana B05.10]
  misc_feature (5)..(297): NCBI GI: 116200518 Blast Desc: CHGG_10804 [Chaetomium globosum CBS 148.51] gi|88175518|gb|EAQ82986.1| CHGG_10804 [Chaetomium globosum CBS 148.51]
  misc_feature (2)..(287): NCBI GI: 156062770 Blast Desc: SS1G_01501 [Sclerotinia sclerotiorum 1980] gi|154696837|gb|EDN96575.1| SS1G_01501 [Sclerotinia sclerotiorum 1980]
  misc_feature (6)..(283): NCBI GI: 189206986 Blast Desc: conserved [Pyrenophora tritici-repentis Pt-1C-BFP] gi|187975920|gb|EDU42546.1| conserved [Pyrenophora tritici-repentis Pt-1C-BFP]
  misc_feature (2)..(285): NCBI GI: 169624395 Blast Desc: SNOG_15456 [Phaeosphaeria nodorum SN15] gi|160705162|gb|EAT77121.2| SNOG_15456 [Phaeosphaeria nodorum SN15]
  misc_feature (15)..(297): NCBI GI: 261359118 Blast Desc: conserved [Verticillium albo-atrum VaMs.102]
MAESPLRIGFVPEHFSTPIYFAKKYFGLTAELIPFPSGTGHMITAIRAGEIDIGIGLTEGWIAGLGKEDTPDDGGYRLVGTFVETPLCWAISTGAKRPDISSVETLKGGKVGISRIGSGSQVMSYVLADQQGWLSSSSTAPYSDFVILQNFANLRNAVNDGSADFFMWEHFTSKKYYDSGEIRRVGEIYTPWSSWKIVASTKLLSTDGGKDRVMDVCGKLDKGVKHFNENNEEAVKYISTSLDYSEEDAREWLKTVRFSTKTEGVDLKVVQSCIGILRKAGVLKEDKGMHAEGILAKGFGAQFPE

SEQ ID NO: 38781 - DNA, 1216 bp, Muscodor strobelii
  misc_feature: SGI EST ID NO. CUFF.93296.0
  misc_feature: Variant of the nucleotide sequence at SEQ ID NO 38779
tttgactgcagctatgaacaatgcgtgtcaccatccctgtcattttgtatttcacaatctagaagtctagctcaacgttgatacgaacttggctgagaactactctaatagcctctgaacctcaccatggctgaatcaccactgcgcatcggcttcgtgccggagcacttctccacgcccatatacttcgcaaagaaatacttcggtctcacggcagaactgatccccttcccatcagggacaggacacatgatcacagcgatccgcgccggtgagatcgacattggtatcggcctaacagaaggatggatcgctgggctcggcaaagaagacacccctgacgacggaggctatcggctcgtagggactttcgttgagacgccgctctgctgggcaatatcaacaggcgccaagcgtcccgacatatcatccgtcgagacactcaaaggcggcaaagtgggcatatcacgtatcggctcgggaagccaagtaatgagctatgtcctcgcagaccaacaaggttggctctcgtcctcatcgacagcaccatactcggactttgtcatcctccagaatttcgcgaatctgaggaacgccgtaaacgatgggagtgctgatttcttcatgtgggaacacttcacgtcaaagaaatactacgacagcggagaaattcgcagagtcggggagatctacacgccgtggagtagttggaagatcgtcgcctctaccaagttgctcagcaccgatggagggaaagacagggtgatggatgtttgtgggaagttagataagggtgtgaaacactttaatgagaacaacgaggaggctgtcaagtatatcagtacgagtcttgattactcggaagaggatgcaagggaatggcttaagacggtgagattctcgaccaagactgagggtgtggatctgaaggttgtgcaaagttgtatcgggatactgaggaaggcgggtgtgctaaaagaggacaaaggcatgcatgctgaagggatacttgcgaagggatttggggcgcaattccctgagtgatctaggacgggttgattgggatgtggttgtagcattgaggacgatgttgtacgattgttgctgtttagtcgtatttctcatgtctgagggtgactcatgctcatgtcctttcattgccaagttcatcggcgtctgtatgatgagaggcggaagaaaaaaatatgaacactag

SEQ ID NO: 38782 - DNA, 819 bp, Muscodor strobelii
  misc_feature: SGI cDNA ID NO. 573484
  misc_feature: Encodes the peptide sequence at SEQ ID NO 38783
atgtcgtctctccaacgcgccctctggcgccgacaagcccacctcttgaccaccctcccacgcacaacaacccgtcaagccctgcgcttccaccccagacgattccaatcttctgttcctccaccaccgccgcctcctccgtccaaagccagcactctcttctcccgcctcgcatcctcacgcttcataccgaaccgcttaaagtctgccctaactcaacttcgctccgcgcccgtctcccacatagtcgccttcttaatactgcatgaaataacggcaatcttaccagtcgtcgggctcacctacttattctacacaatgaactgggtgcccacatcctgggtcttgggcccgtgggcagcttgggcggaagacggggttaagaaatacatgccctatctgcggaagaagcaattgcttggcatgcggaaggaggataaagatggtgaagatgtgctcgaggatgaactgagagaggaagtagcgagggagcaggaaagggagaagaaagagggcaggatgtggttcaggagagctggaaagaagcagaacgagaatgacgatacatctgttaagggcgtagaagagggtgacaagagcaagaaagcagttgtttggcagaaagctaaacaaaccgtcacggttgaccatacggagaaggggtataaactcgggatccagatcgcggctgcatacgcaattaccaagttcctactagtacctcgggtagctctgagtctgtggatgacgccttggatggcacggaggttcgttgcgttacggcatgccatatggaagaagaaaccgtcgagcggttaa

SEQ ID NO: 38783 - protein, 272 aa, Muscodor strobelii
  misc_feature: SGI Peptide ID NO. 573484
  misc_feature (38)..(254): NCBI GI: 256731098 Blast Desc: NECHADRAFT_96358 [Nectria haematococca mpVI 77-13-4]
  misc_feature (32)..(254): NCBI GI: 46123187 Blast Desc: FG05971.1 [Gibberella zeae PH-1]
  misc_feature (60)..(259): NCBI GI: 189209746 Blast Desc: conserved [Pyrenophora tritici-repentis Pt-1C-BFP] gi|187977298|gb|EDU43924.1| conserved [Pyrenophora tritici-repentis Pt-1C-BFP]
  misc_feature (23)..(255): NCBI GI: 169615699 Blast Desc: SNOG_11013 [Phaeosphaeria nodorum SN15] gi|160703024|gb|EAT81512.2| SNOG_11013 [Phaeosphaeria nodorum SN15]
  misc_feature (63)..(255): NCBI GI: 239612278 Blast Desc: conserved [Ajellomyces dermatitidis ER-3]
  misc_feature (47)..(255): NCBI GI: 261202480 Blast Desc: conserved [Ajellomyces dermatitidis SLH14081] gi|239590551|gb|EEQ73132.1| conserved [Ajellomyces dermatitidis SLH14081]
  misc_feature (49)..(255): NCBI GI: 226287192 Blast Desc: conserved [Paracoccidioides brasiliensis Pb18]
  misc_feature (9)..(259): NCBI GI: 238839359 Blast Desc: conserved [Microsporum canis CBS 113480]
  misc_feature (72)..(255): NCBI GI: 225683571 Blast Desc: conserved [Paracoccidioides brasiliensis Pb03]
  misc_feature (63)..(255): NCBI GI: 240277653 Blast Desc: conserved [Ajellomyces capsulatus H143]
MSSLQRALWRRQAHLLTTLPRTTTRQALRFHPRRFQSSVPPPPPPPPSKASTLFSRLASSRFIPNRLKSALTQLRSAPVSHIVAFLILHEITAILPVVGLTYLFYTMNWVPTSWVLGPWAAWAEDGVKKYMPYLRKKQLLGMRKEDKDGEDVLEDELREEVAREQEREKKEGRMWFRRAGKKQNENDDTSVKGVEEGDKSKKAVVWQKAKQTVTVDHTEKGYKLGIQIAAAYAITKFLLVPRVALSLWMTPWMARRFVALRHAIWKKKPSSG

SEQ ID NO: 38784 - DNA, 1187 bp, Muscodor strobelii
  misc_feature: SGI EST ID NO. CUFF.93266.0
  misc_feature: Variant of the nucleotide sequence at SEQ ID NO 38782
tcaaaatatcatataattcccaccccagagctcctcgtcacttcgcgactgaacaaatggcctttcggattccgtagccggttgacgatcctctatcccggcggggacattcgatccctagagcaatataatgtcgtctctccaacgcgccctctggcgccgacaagcccacctcttgaccaccctcccacgcacaacaacccgtcaagccctgcgcttccaccccagacgattccaatcttctgttcctccaccaccgccgcctcctccgtccaaagccagcactctcttctcccgcctcgcatcctcacgcttcataccgaaccgcttaaagtctgccctaactcaacttcgctccgcgcccgtctcccacatagtcgccttcttaatactgcatgaaataacggcaatcttaccagtcgtcgggctcacctacttattctacacaatgaactgggtgcccacatcctgggtcttgggcccgtgggcagcttgggcggaagacggggttaagaaatacatgccctatctgcggaagaagcaattgcttggcatgcggaaggaggataaagatggtgaagatgtgctcgaggatgaactgagagaggaagtagcgagggagcaggaaagggagaagaaagagggcaggatgtggttcaggagagctggaaagaagcagaacgagaatgacgatacatctgttaagggcgtagaagagggtgacaagagcaagaaagcagttgtttggcagaaagctaaacaaaccgtcacggttgaccatacggagaaggggtataaactcgggatccagatcgcggctgcatacgcaattaccaagttcctactagtacctcgggtagctctgagtctgtggatgacgccttggatggcacggaggttcgttgcgttacggcatgccatatggaagaagaaaccgtcgagcggttaagctttgctgtgttctgggagaggaggatatacccatgtgttactctactcaaaatgcctaggtatctatgctaggtgtgtacattaaggtaaccattgcgagagggccgaaaaagaaacgataccctccaaaaggataatgcttaggaatcgaacatgtgttctttcgcacccaaacgctacctggacgcgatatagcctccgtcaagcttgttgctgcccatgtcaaatgattctcg

SEQ ID NO: 38785 - DNA, 981 bp, Muscodor strobelii
  misc_feature: SGI cDNA ID NO. 573485
  misc_feature: Encodes the peptide sequence at SEQ ID NO 38786
atggggttccgcaatttggttgtgacccttttgagtctattgagtttactgaatctctctgccgcctggacgaatcccattcgttcgcccggtggcgctgaccctttcgtcacgtacaccgacggatacttctacctcctaacaacgacatggactgacgtcgagattgctcgctcgacgaccgttgccggtctaaagactgcaactaagaaagtcatatactcttgcactgactcgtctcgctgctgtaatgtctgggcgcccgaggtgcattacttcggtagtgcctggtatgtctatttcaccgctgggaacagtgacaacttagatggacagcgacttcatgctctcaaaggtggcgccacgccttgggattcttacacatacgccggccagctgacgagcgagtggtccatcgacgcatcaacgctgcgcttcagctcctggggtaactacctgatgttctcgtgtttccacggcgccacatatcaatccatctgtcttcaaaagcttggctcagactacgtcagcctgacgggctccatcacggtcatctcacaaccgacgcagtcctgggagacggtgtcgtacccggtcaacgaggggcccgctgcgctctacttcaacggcaagacgtacatctcgtactcggcgtcgtactgttggtcggcgagctactgcctcgggctgctgacttgggacgggtctacggacccgacgaaagcgagtgcgtggacgaagagcaacggatgcgtcttctcgagcgcgaatgggaattatggctcaggccataatagcttcttccagagcccagatgcgtcgcagacgtggatcgcgtatcatgctacgagtaatagcgcgggtgcttgtgatgatagccggtacacgatgatccagcttatgggtcagcacagcgatgggtcgccaaactttgggagccctgtggattttgctcatgcatatagcgagccttcgacatga

SEQ ID NO: 38786 - protein, 326 aa, Muscodor strobelii
  misc_feature: SGI Peptide ID NO. 573485
  misc_feature (23)..(309): Pfam Id: PF04616 Pfam Desc: Glycosyl hydrolases family 43
  misc_feature (164)..(309): Pfam Id: PF04616 Pfam Desc: Glycosyl hydrolases family 43
  misc_feature (23)..(113): Pfam Id: PF04616 Pfam Desc: Glycosyl hydrolases family 43
  misc_feature (3)..(325): NCBI GI: 119473889 Blast Desc: glycosyl hydrolase family 43 protein [Neosartorya fischeri NRRL 181] gi|119406973|gb|EAW16923.1| glycosyl hydrolase family 43 protein [Neosartorya fischeri NRRL 181]
  misc_feature (3)..(325): NCBI GI: 70985966 Blast Desc: glycosyl hydrolase, family 43 [Aspergillus fumigatus Af293] gi|66846116|gb|EAL86449.1| glycosyl hydrolase, family 43, [Aspergillus fumigatus Af293] gi|159128379|gb|EDP53494.1| family
  misc_feature (3)..(326): NCBI GI: 238495602 Blast Desc: glycosyl hydrolase, family 43, [Aspergillus flavus NRRL3357] gi|220695687|gb|EED52030.1| glycosyl hydrolase, family 43, [Aspergillus flavus NRRL3357]
  misc_feature (4)..(326): NCBI GI: 255930239 Blast Desc: Pc06g00650 [Penicillium chrysogenum Wisconsin 54-1255] gi|211581292|emb|CAP79058.1| Pc06g00650 [Penicillium chrysogenum Wisconsin 54-1255]
  misc_feature (37)..(326): NCBI GI: 169778317 Blast Desc: [Aspergillus oryzae RIB40] gi|83772361|dbj|BAE62491.1| protein product [Aspergillus oryzae]
  misc_feature (14)..(325): NCBI GI: 256722190 Blast Desc: NECHADRAFT_52351 [Nectria haematococca mpVI 77-13-4]
  misc_feature (14)..(325): NCBI GI: 46114414 Blast Desc: FG03049.1 [Gibberella zeae PH-1] gi|55824416|gb|AAV66345.1| xylanase [Gibberella zeae]
  misc_feature (13)..(325): NCBI GI: 261354253 Blast Desc: alpha-N-arabinofuranosidase [Verticillium albo-atrum VaMs.102]
  misc_feature (3)..(325): NCBI GI: 67524151 Blast Desc: AN2533.2 [Aspergillus nidulans FGSC A4] gi|40745482|gb|EAA64638.1| AN2533.2 [Aspergillus nidulans FGSC A4] gi|259487962|tpe|CBF87043.1| TPA: glycosyl hydrolase, family
  misc_feature (20)..(313): NCBI GI: 171682702 Blast Desc: protein product [Podospora anserina] gi|170941310|emb|CAP66960.1| protein product [Podospora anserina]
  misc_feature (21)..(282): SWISSPROT Homolog: EC 3.2.1.55 Alpha-N-arabinofuranosidase
MGFRNLVVTLLSLLSLLNLSAAWTNPIRSPGGADPFVTYTDGYFYLLTTTWTDVEIARSTTVAGLKTATKKVIYSCTDSSRCCNVWAPEVHYFGSAWYVYFTAGNSDNLDGQRLHALKGGATPWDSYTYAGQLTSEWSIDASTLRFSSWGNYLMFSCFHGATYQSICLQKLGSDYVSLTGSITVISQPTQSWETVSYPVNEGPAALYFNGKTYISYSASYCWSASYCLGLLTWDGSTDPTKASAWTKSNGCVFSSANGNYGSGHNSFFQSPDASQTWIAYHATSNSAGACDDSRYTMIQLMGQHSDGSPNFGSPVDFAHAYSEPST

SEQ ID NO: 38787 - DNA, 1427 bp, Muscodor strobelii
  misc_feature: SGI EST ID NO. CUFF.93279.0
  misc_feature: Variant of the nucleotide sequence at SEQ ID NO 38785
cagaattgcattcttggtatctccatcattcctggtttaaacgccttgtttcggcggctggttcgatgagttctccataccagcgtgctattccacacagatggtctggtgaaatggtggatgctatccacctgccgagaatgacggagaaatagtgctactagatattccccgtggggagccattatataggaagagatcggctgtctgtatcgtaaggttgttgttgcgtgctgccggtcaataacaggcgaattaactgttcgccatggggttccgcaatttggttgtgacccttttgagtctattgagtttactgaatctctctgccgcctggacgaatcccattcgttcgcccggtggcgctgaccctttcgtcacgtacaccgacggatacttctacctcctaacaacgacatggactgacgtcgagattgctcgctcgacgaccgttgccggtctaaagactgcaactaagaaagtcatatactcttgcactgactcgtctcgctgctgtaatgtctgggcgcccgaggtgcattacttcggtagtgcctggtatgtctatttcaccgctgggaacagtgacaacttagatggacagcgacttcatgctctcaaaggtggcgccacgccttgggattcttacacatacgccggccagctgacgagcgagtggtccatcgacgcatcaacgctgcgcttcagctcctggggtaactacctgatgttctcgtgtttccacggcgccacatatcaatccatctgtcttcaaaagcttggctcagactacgtcagcctgacgggctccatcacggtcatctcacaaccgacgcagtcctgggagacggtgtcgtacccggtcaacgaggggcccgctgcgctctacttcaacggcaagacgtacatctcgtactcggcgtcgtactgttggtcggcgagctactgcctcgggctgctgacttgggacgggtctacggacccgacgaaagcgagtgcgtggacgaagagcaacggatgcgtcttctcgagcgcgaatgggaattatggctcaggccataatagcttcttccagagcccagatgcgtcgcagacgtggatcgcgtatcatgctacgagtaatagcgcgggtgcttgtgatgatagccggtacacgatgatccagcttatgggtcagcacagcgatgggtcgccaaactttgggagccctgtggattttgctcatgcatatagcgagccttcgacatgacgcggatgctaaaacgtaggattcagaaatggtatcaaaatcttcgtgacaatcacccatacattcgtgcatacacaagcgccacgatcgattttactatttcgtaatctgtactgtcatcgaaactatgaccttcagcagtatgagccatcactattcgagacttgatcaccgctgc

SEQ ID NO: 38788 - DNA, 462 bp, Muscodor strobelii
  misc_feature: SGI cDNA ID NO. 573486
  misc_feature: Elevated expression when VOC is produced
  misc_feature: Encodes the peptide sequence at SEQ ID NO 38789
atgtcttccgagcagaccttcatcgctatcaagcccgatggcgtccagcgtggcctcgttggctccatcattggccgcttcgagagccgtggctacaagctcgtagccatcaagctcgtcactcccggcaaggctcacctcgaggagcactacgctgacctcaaggacaagcccttcttcggtggcctcgtcgactacatgaactctggcccgatctgcgccatggtctgggagggccgtgatgccgtcaagactggccgaactctcctcggtgccaccaacccccttgcctctgcccctggcaccatccgtggtgacttcgccatcgacgtcggccgaaacgtctgccacggttccgacagtgttgagagcgccaagaaggagattgccctctggtttaaggacggagaggtcgtcagctggaagtccgctcaggccagctggatctacgagaagccctag

SEQ ID NO: 38789 - protein, 153 aa, Muscodor strobelii
  misc_feature: SGI Peptide ID NO. 573486
  misc_feature (4)..(138): Pfam Id: PF00334 Pfam Desc: Nucleoside diphosphate kinase
  misc_feature (1)..(153): NCBI GI: 145601735 Blast Desc: nucleoside diphosphate kinase [Magnaporthe grisea 70-15] gi|145010245|gb|EDJ94901.1| nucleoside diphosphate kinase [Magnaporthe grisea 70-15]
  misc_feature (1)..(152): NCBI GI: 156063126 Blast Desc: nucleoside diphosphate kinase [Sclerotinia sclerotiorum 1980] gi|154697015|gb|EDN96753.1| nucleoside diphosphate kinase [Sclerotinia sclerotiorum 1980]
  misc_feature (2)..(152): NCBI GI: 46123189 Blast Desc: FG05972.1 [Gibberella zeae PH-1]
  misc_feature (2)..(153): NCBI GI: 256731494 Blast Desc: [Nectria haematococca mpVI 77-13-4]
  misc_feature (1)..(153): NCBI GI: 238839358 Blast Desc: nucleoside diphosphate kinase A [Microsporum canis CBS 113480]
  misc_feature (1)..(153): NCBI GI: 169616043 Blast Desc: SNOG_11193 [Phaeosphaeria nodorum SN15] gi|111060572|gb|EAT81692.1| SNOG_11193 [Phaeosphaeria nodorum SN15]
  misc_feature (1)..(152): NCBI GI: 189209676 Blast Desc: nucleoside diphosphate kinase [Pyrenophora tritici-repentis Pt-1C-BFP] gi|187977263|gb|EDU43889.1| nucleoside diphosphate kinase [Pyrenophora tritici-repentis
  misc_feature (1)..(152): NCBI GI: 121718351 Blast Desc: nucleoside diphosphate kinase [Aspergillus clavatus NRRL 1] gi|119404381|gb|EAW14757.1| nucleoside diphosphate kinase [Aspergillus clavatus NRRL 1]
  misc_feature (1)..(151): NCBI GI: 119183211 Blast Desc: CIMG_06562 [Coccidioides immitis RS] gi|240109526|gb|EER27695.1| nucleoside diphosphate kinase, [Coccidioides posadasii C735 delta SOWgp]
  misc_feature (1)..(152): NCBI GI: 119498855 Blast Desc: nucleoside diphosphate kinase [Neosartorya fischeri NRRL 181] gi|119414349|gb|EAW24288.1| nucleoside diphosphate kinase [Neosartorya fischeri NRRL 181]
  misc_feature (1)..(152): SWISSPROT Homolog: EC 2.7.4.6 Nucleoside-diphosphate kinase
  misc_feature: Useful for introducing or modulating the production of volatile compounds
MSSEQTFIAIKPDGVQRGLVGSIIGRFESRGYKLVAIKLVTPGKAHLEEHYADLKDKPFFGGLVDYMNSGPICAMVWEGRDAVKTGRTLLGATNPLASAPGTIRGDFAIDVGRNVCHGSDSVESAKKEIALWFKDGEVVSWKSAQASWIYEKP

SEQ ID NO: 38790 - DNA, 996 bp, Muscodor strobelii
  misc_feature: SGI EST ID NO. CUFF.93303.0
  misc_feature: Variant of the nucleotide sequence at SEQ ID NO 38788
cgggaatctggctcgtgttttttctgcttttcctccttccctggcagcttaacgatcgtcccggttggagtttctcgcaaagcttcatacacgatatcaaatattacaaaggagctttcaataatctcttcatcgacaccgagcttgcatctttagcagctctcgctaccccgctacccgagcctattctagcacgtccttacacagacaacatgtcttccgagcagaccttcatcgctatcaagcccgatggcgtccagcgtggcctcgttggctccatcattggccgcttcgagagccgtggctacaagctcgtagccatcaagctcgtcactcccggcaaggctcacctcgaggagcactacgctgacctcaaggacaagcccttcttcggtggcctcgtcgactacatgaactctggcccgatctgcgccatggtctgggagggccgtgatgccgtcaagactggccgaactctcctcggtgccaccaacccccttgcctctgcccctggcaccatccgtggtgacttcgccatcgacgtcggccgaaacgtctgccacggttccgacagtgttgagagcgccaagaaggagattgccctctggtttaaggacggagaggtcgtcagctggaagtccgctcaggccagctggatctacgagaagccctagatgctgtctcgttggcaaccttcacggcgcgactgccgaacacgtaacgtagacaatgacaccgacaagaaatcagtagagacacacaacaaggatgaataaacagtgaaagcatcaataatttttgtgttccggtatatcacagtgactcgtcttgtatgctgcatcgccattgctatgaggccagctgggtattcaatgcgcttatagcattgtcatcagtcgaaatggaaaaatagtggaaggcacgtaattgctatataggggataatcaccagtttgcagcgcctcatgatccgtcaaacccgtctcctaattaacc

SEQ ID NO: 38791 - DNA, 2964 bp, Muscodor strobelii
  misc_feature: SGI cDNA ID NO. 573487
  misc_feature: Encodes the peptide sequence at SEQ ID NO 38792
atgcgcacatccgacaaggtgctccctcgctgggcagccgtgtgttgcgcttttgttatattactttcatttgtatctttcacggccgcggtgaaggagaatgacttcaaaaagtgcgatcagtccggtttctgcaagcgaaatagacaatatgccgatcacgctggtggccaggggtcatcgtggcggtcgccctacaacatccaacccgagcaggcctcgttccagaacggccaattccaagctaccgtactcaagactatagacgataaggggactaccgtggagctacccctgactgtcgccttccacacctctggtactgctcgtgtgaccctagacgagaagcgacgacaggacaaggacatcgagctccgacataacagctcggtgcggaaggagagatacaacgaagctggaaactgggccattgttggtggcacagcggtcgacaccgaggccaagatagctcatgttggtaagaccggcatgaagattcagtatggtcctggctttgcattcgaagcggatatcagctatagtccctactccattgagttcaagcgtggcggatccacccagctcaagctcaacgaccggggcttgatcaatatggaacattggcggcccaagatcgagaaagaagcccctaaagaggcagagagcgagggagagggagagggaaagagcgaggagaagaaagaagaagtcaaagaagaagttgttgagggtgaagacgagagcacgtggtgggaagagagctttggaggtaataaggactccaagcctcgtggccccgaaagtgttgctctcgatatcaccttcttcggctacgaacacgtgtacggtgttcccgagcacacaggaccactttctctcaaggagacgagaggtggcgatggtgctcacagcgagccttatcgcctgtataactccgatgtgtttgagtacatcctggacagcccgatgaccctttacggtgccatccctctcatgcaggctcagagaaaggattcgaccgtggccgttttctggctgaacgctgctgagacctggattgatatcgtcaaagccaaggagtcgaagaacccattggctattggcgctagtgcgaggacgaatacacagactcactggatttccgaaaatggtcagatggacctgtttgttttccttggcccaacaccccgggatatcagcaaagcgtacggcgaactgaccggaacaactgccatgccccaagaatttgctattggttaccaccaatgtcgctggaactacgtctcggatgatgatgtgaaagaagtggaccgtaagatggaccgccatcacattccctacgacgtcatctggctcgacatcgagtacaccgacgagaagaaatacttcacttgggacagtgacatgttcaaggatcccatcggcatgggtcagcacttggatgagcgtggcagacaactagtcgtcatcattgatcctcatatcaagaacacggatcactaccccgtcattgatgacttgaagtcgtataagatcgcagtcaagaacaaagaaggcaatgatttcgatggctggtgctggcctggctcgtccatgtgggtggactgcttcaacccaactgccatcaaatggtggaagagtctgttcaagtacaaaaaattcaagggcaccatgaagaacacatggctatggaatgacatgaacgagccttctgtcttcaatggtcccgagattacgatgcccaaagataatatccaccacggcaattgggagcaccgtgacctacacaacatcaacggtcttaccttccacaacgctacgtatgaggctctcctctctcgcgagaagggagagcttcgtcgcccattcgtcctgactcgatcattctatgccggctcgcagcgtcttggggccatgtggactggtgataatcaggcaagctgggaacatcttggcgcagctatccccatgatcctgaatcagggtatttcgggctttccctttgcaggtgctgatgtcggtggcttctttggtaatcctgaggccgaattgcaaagtcgctggtaccaggctggtgctttctatccctttttccgtggccatgctcatatcgacgcaaagcgccgagagccttacatgcttgccgagccacatcgaagcattgtgacgtcggctcttcgtctgagatatagtcttttacctgcttggtatactgccttccatcaggcgcatgtagacggaagccctatcatccgtcccatgtactggactcatccaagcactgaggccggcttcgctatcgacgaccagttcttcgttggctctacaggtcttctcgtcaagcctgtaatagagaaggacaagagaaccgaggatatctatattcctgatgacgaagtctatttcgactactttacatacaagaagttatcaacgtcgaagggcaagactttgaccgttgacgcccctattgaaagcattcccgtcctaatgcgcggaggccatatcatcccgcgtcgtgatgtgccgcgtcgctccgccaagctcatgcaattcgacgattatatccttgtcatcgcagtcggcaaggacggcacggctgagggtcaactgtatgccgacgatggtgactcctttgattatcaagaaggccaatacatcaaccgctctttcaagtttgccgggtcgaagcttacatctacggatgctgatagccgtgatgtcaagggtctgaagcaaggtgactggatgaagcggatggctgatgttgctgttgaccgcatcatcgttgtcaaccctccttcgtcctgggcgagtaagaaggaagtacaggtcgagtctgaaggatcaacgtcatctgccaaggtcgaatatttcaaggccgatggtgctcggggtccgttcgcgattataggccgtgtcggtgccaagatcagcgctgactggactatcaatttcgcgtag

SEQ ID NO: 38792 - protein, 987 aa, Muscodor strobelii
  misc_feature: SGI Peptide ID NO. 573487
  misc_feature (389)..(837): Pfam Id: PF01055 Pfam Desc: Glycosyl hydrolases family 31
  misc_feature (10)..(987): NCBI GI: 46123191 Blast Desc: FG05973.1 [Gibberella zeae PH-1]
  misc_feature (29)..(987): NCBI GI: 256731099 Blast Desc: glycoside hydrolase family 31 [Nectria haematococca mpVI 77-13-4]
  misc_feature (11)..(987): NCBI GI: 21622350 Blast Desc: related to glucosidase II, alpha subunit [Neurospora crassa]
  misc_feature (11)..(987): NCBI GI: 164426482 Blast Desc: NCU04203 [Neurospora crassa OR74A] gi|157071353|gb|EAA31927.2| NCU04203 [Neurospora crassa OR74A]
  misc_feature (1)..(986): NCBI GI: 171693553 Blast Desc: protein product [Podospora anserina] gi|170946725|emb|CAP73528.1| protein product [Podospora anserina]
  misc_feature (1)..(986): NCBI GI: 116206352 Blast Desc: CHGG_02469 [Chaetomium globosum CBS 148.51] gi|88183066|gb|EAQ90534.1| CHGG_02469 [Chaetomium globosum CBS 148.51]
  misc_feature (11)..(987): NCBI GI: 39947727 Blast Desc: MGG_08623 [Magnaporthe grisea 70-15] gi|145010246|gb|EDJ94902.1| MGG_08623 [Magnaporthe grisea 70-15]
  misc_feature (1)..(987): NCBI GI: 52789943 Blast Desc: glucosidase II alpha subunit [Hypocrea jecorina]
  misc_feature (11)..(987): NCBI GI: 261202476 Blast Desc: alpha glucosidase II [Ajellomyces dermatitidis SLH14081] gi|239590549|gb|EEQ73130.1| alpha glucosidase II [Ajellomyces dermatitidis SLH14081] gi|239612276|gb|EEQ89263.1|
  misc_feature (11)..(987): NCBI GI: 225557110 Blast Desc: glucosidase II alpha subunit [Ajellomyces capsulatus G186AR]
  misc_feature (10)..(948): SWISSPROT Homolog: EC 3.2.1.84 Glucan 1,3-alpha-glucosidase
MRTSDKVLPRWAAVCCAFVILLSFVSFTAAVKENDFKKCDQSGFCKRNRQYADHAGGQGSSWRSPYNIQPEQASFQNGQFQATVLKTIDDKGTTVELPLTVAFHTSGTARVTLDEKRRQDKDIELRHNSSVRKERYNEAGNWAIVGGTAVDTEAKIAHVGKTGMKIQYGPGFAFEADISYSPYSIEFKRGGSTQLKLNDRGLINMEHWRPKIEKEAPKEAESEGEGEGKSEEKKEEVKEEVVEGEDESTWWEESFGGNKDSKPRGPESVALDITFFGYEHVYGVPEHTGPLSLKETRGGDGAHSEPYRLYNSDVFEYILDSPMTLYGAIPLMQAQRKDSTVAVFWLNAAETWIDIVKAKESKNPLAIGASARTNTQTHWISENGQMDLFVFLGPTPRDISKAYGELTGTTAMPQEFAIGYHQCRWNYVSDDDVKEVDRKMDRHHIPYDVIWLDIEYTDEKKYFTWDSDMFKDPIGMGQHLDERGRQLVVIIDPHIKNTDHYPVIDDLKSYKIAVKNKEGNDFDGWCWPGSSMWVDCFNPTAIKWWKSLFKYKKFKGTMKNTWLWNDMNEPSVFNGPEITMPKDNIHHGNWEHRDLHNINGLTFHNATYEALLSREKGELRRPFVLTRSFYAGSQRLGAMWTGDNQASWEHLGAAIPMILNQGISGFPFAGADVGGFFGNPEAELQSRWYQAGAFYPFFRGHAHIDAKRREPYMLAEPHRSIVTSALRLRYSLLPAWYTAFHQAHVDGSPIIRPMYWTHPSTEAGFAIDDQFFVGSTGLLVKPVIEKDKRTEDIYIPDDEVYFDYFTYKKLSTSKGKTLTVDAPIESIPVLMRGGHIIPRRDVPRRSAKLMQFDDYILVIAVGKDGTAEGQLYADDGDSFDYQEGQYINRSFKFAGSKLTSTDADSRDVKGLKQGDWMKRMADVAVDRIIVVNPPSSWASKKEVQVESEGSTSSAKVEYFKADGARGPFAIIGRVGAKISADWTINFA

SEQ ID NO: 38793 - DNA, 5812 bp, Muscodor strobelii
  misc_feature: SGI EST ID NO. CUFF.93305.0
  misc_feature: Variant of the nucleotide sequence at SEQ ID NO 38791
cgggcaacaccaaaacattggagcacgataccgctgaggtggcagagtggacagcttggctagtaccagcgtcccttactacttactgacttcatcacaccctaccatttcgtagcacgtagcaccttacatctaatccaattgctctccgatccggcaagcaattgagatctatatttttccgcacattcttcgcccagattgaccctcatgattgatcggattgtgacagcgtgttaattcctgcgtgccttttcttggtcccccttcactccccccagatatctgggggatcccatccggagtcaagatgcgcacatccgacaaggtgctccctcgctgggcagccgtgtgttgcgcttttgttatattactttcatttgtatctttcacggccgcggtgaaggagaatgacttcaaaaagtgcgatcagtccggtttctgcaagcgaaatagacaatatgccgatcacgctggtggccaggggtcatcgtggcggtcgccctacaacatccaacccgagcaggcctcgttccagaacggccaattccaagctaccgtactcaagactatagacgataaggggactaccgtggagctacccctgactgtcgccttccacacctctggtactgctcgtgtgaccctagacgagaagcgacgacaggacaaggacatcgagctccgacataacagctcggtgcggaaggagagatacaacgaagctggaaactgggccattgttggtggcacagcggtcgacaccgaggccaagatagctcatgttggtaagaccggcatgaagattcagtatggtcctggctttgcattcgaagcggatatcagctatagtccctactccattgagttcaagcgtggcggatccacccagctcaagctcaacgaccggggcttgatcaatatggaacattggcggcccaagatcgagaaagaagcccctaaagaggcagagagcgagggagagggagagggaaagagcgaggagaagaaagaagaagtcaaagaagaagttgttgagggtgaagacgagagcacgtggtgggaagagagctttggaggtaataaggactccaagcctcgtggccccgaaagtgttgctctcgatatcaccttcttcggctacgaacacgtgtacggtgttcccgagcacacaggaccactttctctcaaggagacgagaggtggcgatggtgctcacagcgagccttatcgcctgtataactccgatgtgtttgagtacatcctggacagcccgatgaccctttacggtgccatccctctcatgcaggctcagagaaaggattcgaccgtggccgttttctggctgaacgctgctgagacctggattgatatcgtcaaagccaaggagtcgaagaacccattggctattggcgctagtgcgaggacgaatacacagactcactggatttccgaaaatggtcagatggacctgtttgttttccttggcccaacaccccgggatatcagcaaagcgtacggcgaactgaccggaacaactgccatgccccaagaatttgctattggttaccaccaatgtcgctggaactacgtctcggatgatgatgtgaaagaagtggaccgtaagatggaccgccatcacattccctacgacgtcatctggctcgacatcgagtacaccgacgagaagaaatacttcacttgggacagtgacatgttcaaggatcccatcggcatgggtcagcacttggatgagcgtggcagacaactagtcgtcatcattgatcctcatatcaagaacacggatcactaccccgtcattgatgacttgaagtcgtataagatcgcagtcaagaacaaagaaggcaatgatttcgatggctggtgctggcctggctcgtccatgtgggtggactgcttcaacccaactgccatcaaatggtggaagagtctgttcaagtacaaaaaattcaagggcaccatgaagaacacatggctatggaatgacatgaacgagccttctgtcttcaatggtcccgagattacgatgcccaaagataatatccaccacggcaattgggagcaccgtgacctacacaacatcaacggtcttaccttccacaacgctacgtatgaggctctcctctctcgcgagaagggagagcttcgtcgcccattcgtcctgactcgatcattctatgccggctcgcagcgtcttggggccatgtggactggtgataatcaggcaagctgggaacatcttggcgcagctatccccatgatcctgaatcagggtatttcgggctttccctttgcaggtgctgatgtcggtggcttctttggtaatcctgaggccgaattgcaaagtcgctggtaccaggctggtgctttctatccctttttccgtggccatgctcatatcgacgcaaagcgccgagagccttacatgcttgccgagccacatcgaagcattgtgacgtcggctcttcgtctgagatatagtcttttacctgcttggtatactgccttccatcaggcgcatgtagacggaagccctatcatccgtcccatgtactggactcatccaagcactgaggccggcttcgctatcgacgaccagttcttcgttggctctacaggtcttctcgtcaagcctgtaatagagaaggacaagagaaccgaggatatctatattcctgatgacgaagtctatttcgactactttacatacaagaagttatcaacgtcgaagggcaagactttgaccgttgacgcccctattgaaagcattcccgtcctaatgcgcggaggccatatcatcccgcgtcgtgatgtgccgcgtcgctccgccaagctcatgcaattcgacgattatatccttgtcatcgcagtcggcaaggacggcacggctgagggtcaactgtatgccgacgatggtgactcctttgattatcaagaaggccaatacatcaaccgctctttcaagtttgccgggtcgaagcttacatctacggatgctgatagccgtgatgtcaagggtctgaagcaaggtgactggatgaagcggatggctgatgttgctgttgaccgcatcatcgttgtcaaccctccttcgtcctgggcgagtaagaaggaagtacaggtcgagtctgaaggatcaacgtcatctgccaaggtcgaatatttcaaggccgatggtgctcggggtccgttcgcgattataggccgtgtcggtgccaagatcagcgctgactggactatcaatttcgcgtaggtgaacatattgggcatttataatgaacgaacgcgaaatcgtcatgtataggtacattatagacattttcgcacagcactgtgttgcgtgtggttgagaatcgaaatcgaaatcatttcccacacacattgttctatataacatccacgactattacgcgtacttgcatatcccttgaagtacgagagaatcacacccttaacctcgatcgcattaattatcatgtacgtaacatcatcgtcaagcgtcgacgagaatgaattacggttattgaacaatcttgtaagtactactacacaaccaacacagagcataaccactgccaattagtctccgcattagataggcccatcaactaactgctcaagttccctcttctcactttcatccagctggcccagcgcctctctcctcgtcggtgcggacgggtcaaaatatggcttctcggctagcgacgtgactcgtgtgccgtggcgcggatacttgccgccgtagtcccaacttgcgttgtgtatcgttattctgtgtttattagtcttcgactctcttcttgtctcgatgcatagactacgtgatgggagggtggcaggaggtacagagagggttgtactgagagaaaggggaaacgatcgtgacttaccgattatcccacaacgcactagtccccggcgtccaacgaaatcggacctggatatccacattattctcataaacatcatataaataattcagtatcgcatcgctttcccccctatcaagtcccactatcctatccgtcatcgcgcgattgacccataacgctttccaacccgtcgccgggtggaccctaaccaacggatgtaccctttcgatgtgcttcggcccggcggaggggtcattgcggtctagatacccgtgagcagatcgatagacggcttttcgtccgtcgattatttggcggaaggccggggataatttctcgtaggctgcgtagcccgaggcccagagcgtgtcgcctccgactggggggacggtgtcgttgtgcaggtgggttattccggcgggttgcagctcgtgcactaggtctgtatgccatcgcgatgcgcccccgggcttgcggaaggatgtgctgcgttcggtggattggaggtccggccatattactgttattcctagctcgcctgggacctggggtacttgtggctgttcttatcgttaggacgtttttctcagagattgagcgaagccgaaggtcaatgggggaatgggaaaagaagaagggtagaataggaaaaggggtcgtacgtgtatttcgggcacgccgaagtattttccgagctcgagctgttgttgaggtgagagatcttggtctcgaaagaatacgacgctgcgttctgcgattaggagagcgagttcgtctttttgttgatcggtcaagtctttgagttgtagaccagtgatctcggttccgatgtgtgttgttaggtccgtcactttcgttgctgctgagaagagtgcggacttcgatttatcggcccgggcgccggcgtcgttgtgtacccattctttgttacggatttcttgcacatcttggaggtaaagcggccttgagggcctgtatgggtaccctttagagaggtcaacaccacccttcttaagtcggtgaattgcggtctcgggaagcccgagtgtgtctttgatcggctccgcgacgtccgtaatgcggtcgtctattggtgctggtgccatgatggaaaggtgatgttcctggtatgaagctcaattaggttacacttttgtcgttggagatcgagcggctatctagacatgagcaattcattatatgatgctacggttgctaccctcctatatattcttgtcctcctcacatcgtcaacatcccgcgataccgggacgatgttgatgaataatccaagctcgggtatttttgcacccttcgggtctttctctcacccatagaccaatctgcttcattttgaacaacgtagaaagttttccgccatgcacgtcgcctcacgcaacattcactatctcgccggcgatcgcgtgatgaggtcgtcgtagcccccgggacggtgacagggtccgcaatttcaaatctagtgttgcattgattggtccccgccgaattcgtgatatgatgcgagcgcggcatcccaccatcgcaacgcgtcagggtatcattctgcaactctaattgattgatttggggaggaggttatgatgcgatgttggggaaattggtgtcatcaacccccaactcgatagacccagggttcatacatagctcgcgtcattgcgatagaggataggacttgatagctagatgagtcagccaatgaggagtaagacattcgatggaagaggaaaagcagatgggtgctcgacttcacgggtctagatgctctaaatcgtccgactgcgtgaactccgactgcgcttcttggaacatccgtcgggacattcagggttacgcaatatctaagaaattggtgaaagcgatcgaagctgaatgcgtgcaccttgataacaagcttg

SEQ ID NO: 38794 - DNA, 1170 bp, Muscodor strobelii
  misc_feature: SGI cDNA ID NO. 573488
  misc_feature: Encodes the peptide sequence at SEQ ID NO 38795
atggcaccagcaccaatagacgaccgcattacggacgtcgcggagccgatcaaagacacactcgggcttcccgagaccgcaattcaccgacttaagaagggtggtgttgacctctctaaagggtacccatacaggccctcaaggccgctttacctccaagatgtgcaagaaatccgtaacaaagaatgggtacacaacgacgccggcgcccgggccgataaatcgaagtccgcactcttctcagcagcaacgaaagtgacggacctaacaacacacatcggaaccgagatcactggtctacaactcaaagacttgaccgatcaacaaaaagacgaactcgctctcctaatcgcagaacgcagcgtcgtattctttcgagaccaagatctctcacctcaacaacagctcgagctcggaaaatacttcggcgtgcccgaaatacacccacaagtaccccaggtcccaggcgagctaggaataacagtaatatggccggacctccaatccaccgaacgcagcacatccttccgcaagcccgggggcgcatcgcgatggcatacagacctagtgcacgagctgcaacccgccggaataacccacctgcacaacgacaccgtccccccagtcggaggcgacacgctctgggcctcgggctacgcagcctacgagaaattatccccggccttccgccaaataatcgacggacgaaaagccgtctatcgatctgctcacgggtatctagaccgcaatgacccctccgccgggccgaagcacatcgaaagggtacatccgttggttagggtccacccggcgacgggttggaaagcgttatgggtcaatcgcgcgatgacggataggatagtgggacttgataggggggaaagcgatgcgatactgaattatttatatgatgtttatgagaataatgtggatatccaggtccgatttcgttggacgccggggactagtgcgttgtgggataatcgaataacgatacacaacgcaagttgggactacggcggcaagtatccgcgccacggcacacgagtcacgtcgctagccgagaagccatattttgacccgtccgcaccgacgaggagagaggcgctgggccagctggatgaaagtgagaagagggaacttgagcagttagttgatgggcctatctaa

SEQ ID NO: 38795 - protein, 389 aa, Muscodor strobelii
  misc_feature: SGI Peptide ID NO. 573488
  misc_feature (85)..(359): Pfam Id: PF02668 Pfam Desc: Taurine catabolism dioxygenase TauD, TfdA family
  misc_feature (1)..(381): NCBI GI: 261354581 Blast Desc: alpha-ketoglutarate-dependent sulfonate dioxygenase [Verticillium albo-atrum VaMs.102]
  misc_feature (1)..(384): NCBI GI: 46117911 Blast Desc: FG04667.1 [Gibberella zeae PH-1]
  misc_feature (1)..(382): NCBI GI: 256723207 Blast Desc: [Nectria haematococca mpVI 77-13-4]
  misc_feature (1)..(381): NCBI GI: 145248315 Blast Desc: An13g02700 [Aspergillus niger] gi|134081157|emb|CAK41667.1| protein product [Aspergillus niger]
  misc_feature (1)..(381): NCBI GI: 171687154 Blast Desc: protein product [Podospora anserina] gi|170943538|emb|CAP69191.1| protein product [Podospora anserina]
  misc_feature (1)..(381): NCBI GI: 119473715 Blast Desc: alpha-ketoglutarate-dependent taurine dioxygenase [Neosartorya fischeri NRRL 181] gi|119406886|gb|EAW16836.1| alpha-ketoglutarate-dependent taurine dioxygenase [Neosartorya
  misc_feature (1)..(381): NCBI GI: 159128442 Blast Desc: alpha-ketoglutarate-dependent taurine dioxygenase [Aspergillus fumigatus A1163]
  misc_feature (1)..(384): NCBI GI: 67527668 Blast Desc: AN4111.2 [Aspergillus nidulans FGSC A4] gi|40740182|gb|EAA59372.1| AN4111.2 [Aspergillus nidulans FGSC A4] gi|259481298|tpe|CBF74685.1| TPA: taurine dioxygenase FGSC
  misc_feature (1)..(381): NCBI GI: 70985833 Blast Desc: alpha-ketoglutarate-dependent taurine dioxygenase [Aspergillus fumigatus Af293] gi|66846051|gb|EAL86384.1| alpha-ketoglutarate-dependent taurine dioxygenase [Aspergillus
  misc_feature (1)..(371): NCBI GI: 189201373 Blast Desc: alpha-ketoglutarate-dependent taurine dioxygenase [Pyrenophora tritici-repentis Pt-1C-BFP] gi|187984122|gb|EDU49610.1| alpha-ketoglutarate-dependent taurine
  misc_feature (80)..(359): SWISSPROT Homolog: EC 1.14.11.17 Taurine dioxygenase
MAPAPIDDRITDVAEPIKDTLGLPETAIHRLKKGGVDLSKGYPYRPSRPLYLQDVQEIRNKEWVHNDAGARADKSKSALFSAATKVTDLTTHIGTEITGLQLKDLTDQQKDELALLIAERSVVFFRDQDLSPQQQLELGKYFGVPEIHPQVPQVPGELGITVIWPDLQSTERSTSFRKPGGASRWHTDLVHELQPAGITHLHNDTVPPVGGDTLWASGYAAYEKLSPAFRQIIDGRKAVYRSAHGYLDRNDPSAGPKHIERVHPLVRVHPATGWKALWVNRAMTDRIVGLDRGESDAILNYLYDVYENNVDIQVRFRWTPGTSALWDNRITIHNASWDYGGKYPRHGTRVTSLAEKPYFDPSAPTRREALGQLDESEKRELEQLVDGPI

SEQ ID NO: 38796 - DNA, 5192 bp, Muscodor strobelii
  misc_feature: SGI EST ID NO. CUFF.93306.1
  misc_feature: Variant of the nucleotide sequence at SEQ ID NO 38794
caagcttgttatcaaggtgcacgcattcagcttcgatcgctttcaccaatttcttagatattgcgtaaccctgaatgtcccgacggatgttccaagaagcgcagtcggagttcacgcagtcggacgatttagagcatctagacccgtgaagtcgagcacccatctgcttttcctcttccatcgaatgtcttactcctcattggctgactcatctagctatcaagtcctatcctctatcgcaatgacgcgagctatgtatgaaccctgggtctatcgagttgggggttgatgacaccaatttccccaacatcgcatcataacctcctccccaaatcaatcaattagagttgcagaatgataccctgacgcgttgcgatggtgggatgccgcgctcgcatcatatcacgaattcggcggggaccaatcaatgcaacactagatttgaaattgcggaccctgtcaccgtcccgggggctacgacgacctcatcacgcgatcgccggcgagatagtgaatgttgcgtgaggcgacgtgcatggcggaaaactttctacgttgttcaaaatgaagcagattggtctatgggtgagagaaagacccgaagggtgcaaaaatacccgagcttggattattcatcaacatcgtcccggtatcgcgggatgttgacgatgtgaggaggacaagaatatataggagggtagcaaccgtagcatcatataatgaattgctcatgtctagatagccgctcgatctccaacgacaaaagtgtaacctaattgagcttcataccaggaacatcacctttccatcatggcaccagcaccaatagacgaccgcattacggacgtcgcggagccgatcaaagacacactcgggcttcccgagaccgcaattcaccgacttaagaagggtggtgttgacctctctaaagggtacccatacaggccctcaaggccgctttacctccaagatgtgcaagaaatccgtaacaaagaatgggtacacaacgacgccggcgcccgggccgataaatcgaagtccgcactcttctcagcagcaacgaaagtgacggacctaacaacacacatcggaaccgagatcactggtctacaactcaaagacttgaccgatcaacaaaaagacgaactcgctctcctaatcgcagaacgcagcgtcgtattctttcgagaccaagatctctcacctcaacaacagctcgagctcggaaaatacttcggcgtgcccgaaatacacccacaagtaccccaggtcccaggcgagctaggaataacagtaatatggccggacctccaatccaccgaacgcagcacatccttccgcaagcccgggggcgcatcgcgatggcatacagacctagtgcacgagctgcaacccgccggaataacccacctgcacaacgacaccgtccccccagtcggaggcgacacgctctgggcctcgggctacgcagcctacgagaaattatccccggccttccgccaaataatcgacggacgaaaagccgtctatcgatctgctcacgggtatctagaccgcaatgacccctccgccgggccgaagcacatcgaaagggtacatccgttggttagggtccacccggcgacgggttggaaagcgttatgggtcaatcgcgcgatgacggataggatagtgggacttgataggggggaaagcgatgcgatactgaattatttatatgatgtttatgagaataatgtggatatccaggtccgatttcgttggacgccggggactagtgcgttgtgggataatcgaataacgatacacaacgcaagttgggactacggcggcaagtatccgcgccacggcacacgagtcacgtcgctagccgagaagccatattttgacccgtccgcaccgacgaggagagaggcgctgggccagctggatgaaagtgagaagagggaacttgagcagttagttgatgggcctatctaatgcggagactaattggcagtggttatgctctgtgttggttgtgtagtagtacttacaagattgttcaataaccgtaattcattctcgtcgacgcttgacgatgatgttacgtacatgataattaatgcgatcgaggttaagggtgtgattctctcgtacttcaagggatatgcaagtacgcgtaatagtcgtggatgttatatagaacaatgtgtgtgggaaatgatttcgatttcgattctcaaccacacgcaacacagtgctgtgcgaaaatgtctataatgtacctatacatgacgatttcgcgttcgttcattataaatgcccaatatgttcacctacgcgaaattgatagtccagtcagcgctgatcttggcaccgacacggcctataatcgcgaacggaccccgagcaccatcggccttgaaatattcgaccttggcagatgacgttgatccttcagactcgacctgtacttccttcttactcgcccaggacgaaggagggttgacaacgatgatgcggtcaacagcaacatcagccatccgcttcatccagtcaccttgcttcagacccttgacatcacggctatcagcatccgtagatgtaagcttcgacccggcaaacttgaaagagcggttgatgtattggccttcttgataatcaaaggagtcaccatcgtcggcatacagttgaccctcagccgtgccgtccttgccgactgcgatgacaaggatataatcgtcgaattgcatgagcttggcggagcgacgcggcacatcacgacgcgggatgatatggcctccgcgcattaggacgggaatgctttcaataggggcgtcaacggtcaaagtcttgcccttcgacgttgataacttcttgtatgtaaagtagtcgaaatagacttcgtcatcaggaatatagatatcctcggttctcttgtccttctctattacaggcttgacgagaagacctgtagagccaacgaagaactggtcgtcgatagcgaagccggcctcagtgcttggatgagtccagtacatgggacggatgatagggcttccgtctacatgcgcctgatggaaggcagtataccaagcaggtaaaagactatatctcagacgaagagccgacgtcacaatgcttcgatgtggctcggcaagcatgtaaggctctcggcgctttgcgtcgatatgagcatggccacggaaaaagggatagaaagcaccagcctggtaccagcgactttgcaattcggcctcaggattaccaaagaagccaccgacatcagcacctgcaaagggaaagcccgaaataccctgattcaggatcatggggatagctgcgccaagatgttcccagcttgcctgattatcaccagtccacatggccccaagacgctgcgagccggcatagaatgatcgagtcaggacgaatgggcgacgaagctctcccttctcgcgagagaggagagcctcatacgtagcgttgtggaaggtaagaccgttgatgttgtgtaggtcacggtgctcccaattgccgtggtggatattatctttgggcatcgtaatctcgggaccattgaagacagaaggctcgttcatgtcattccatagccatgtgttcttcatggtgcccttgaattttttgtacttgaacagactcttccaccatttgatggcagttgggttgaagcagtccacccacatggacgagccaggccagcaccagccatcgaaatcattgccttctttgttcttgactgcgatcttatacgacttcaagtcatcaatgacggggtagtgatccgtgttcttgatatgaggatcaatgatgacgactagttgtctgccacgctcatccaagtgctgacccatgccgatgggatccttgaacatgtcactgtcccaagtgaagtatttcttctcgtcggtgtactcgatgtcgagccagatgacgtcgtagggaatgtgatggcggtccatcttacggtccacttctttcacatcatcatccgagacgtagttccagcgacattggtggtaaccaatagcaaattcttggggcatggcagttgttccggtcagttcgccgtacgctttgctgatatcccggggtgttgggccaaggaaaacaaacaggtccatctgaccattttcggaaatccagtgagtctgtgtattcgtcctcgcactagcgccaatagccaatgggttcttcgactccttggctttgacgatatcaatccaggtctcagcagcgttcagccagaaaacggccacggtcgaatcctttctctgagcctgcatgagagggatggcaccgtaaagggtcatcgggctgtccaggatgtactcaaacacatcggagttatacaggcgataaggctcgctgtgagcaccatcgccacctctcgtctccttgagagaaagtggtcctgtgtgctcgggaacaccgtacacgtgttcgtagccgaagaaggtgatatcgagagcaacactttcggggccacgaggcttggagtccttattacctccaaagctctcttcccaccacgtgctctcgtcttcaccctcaacaacttcttctttgacttcttctttcttctcctcgctctttccctctccctctccctcgctctctgcctctttaggggcttctttctcgatcttgggccgccaatgttccatattgatcaagccccggtcgttgagcttgagctgggtggatccgccacgcttgaactcaatggagtagggactatagctgatatccgcttcgaatgcaaagccaggaccatactgaatcttcatgccggtcttaccaacatgagctatcttggcctcggtgtcgaccgctgtgccaccaacaatggcccagtttccagcttcgttgtatctctccttccgcaccgagctgttatgtcggagctcgatgtccttgtcctgtcgtcgcttctcgtctagggtcacacgagcagtaccagaggtgtggaaggcgacagtcaggggtagctccacggtagtccccttatcgtctatagtcttgagtacggtagcttggaattggccgttctggaacgaggcctgctcgggttggatgttgtagggcgaccgccacgatgacccctggccaccagcgtgatcggcatattgtctatttcgcttgcagaaaccggactgatcgcactttttgaagtcattctccttcac

SEQ ID NO: 38797 - DNA, 1545 bp, Muscodor strobelii
  misc_feature: SGI cDNA ID NO. 573489
  misc_feature: Encodes the peptide sequence at SEQ ID NO 38798
atgttacgcttgcgagtgcagttttctgacgtccgtgtcaaacacaacatgacggttcagaaaatcagtcccgccattggcgtcagtaccgatgttaaagcgtcaacaccttctctagatgatcgcagttcgagtgaaaataccatacacgaaggctcggatgtagttgcaacgaaaccgaagaagacatggcggtcatacttgtgggataccttcgacaaatcaccggaagaacgcaagttcctcttcaaattggacgctgttgttcttactcttgcttcattggggtacttcatcaagtatatcgatcaaattaatatcaatagtgccttcgtgtcggggatgaaagaagacttgaacctcaatggtaatcaattgaactacatgattgcatcatggactgttggatatgtcatcggagagattccaagtaacataatattgaccaaagtccgaccaagtatttggataccgtcgcttgaggtgacgtggtccgtcctcaccatccttctcgccaaatgccaaacagcacagcagatatatgtcttaaggttcttcatcgggctcgcggaaagtgcgttctacccgggcatgcaatacctcattggcagttggtaccgtaaagacgaactggcaaagcgcagttgcatattccattctagcggcgcgattggccaaatggtttcaggctatctcattacgggaacatataggctcgaaggcagaggcggctttcacggatggcagtggctcttcatcatcaacaccgttatatcactcccagttgccattgcaggattcttcctcttccccgacgtacccgagatcacgaaagcttggtggcttacagaaaaggatattgcaatcgcgaataaacggatggcacttgagggtcgtgcgaaacgaggaaagtacagcagagagaaaatcaagaagatattctcatcgtggcacatctacacgcttgtcctgttatacatcttcttcaataacggagccggatacggtggtcaacccgccttcgcgttgtggctcaagtcggaaggatacggcatcaaacctgtcaacacgtatcccaccattgcaacagcgatccaaatcttattcacttatatctacgcatggacttccgactctgtcttccgcggtgcaagatggcctccgatgatctttgctggggtcgtcaacattttcacgagtgcaagtctcgccgtttggaatatcccgaaccgcttgaaatgggcaagctacattttaggcagtattagcggtggtatcagcggcttgacctttgcatgggctcatgagatatgcagcgacgataatgaggagcgggctctggtgacagcggccatgaatcagttcgcttacgtcgtgcaggcttggctgcctcttatcatctggcagacggtagacgcgccgcagtatcataagggtttcatcacgatgatcttcatctccgcggggcttatagtcaccgcgctcacgattcgggtactgcatcatcgcgaagtagctagaaagagatcaaatattgctgcttaa

SEQ ID NO: 38798 - protein, 514 aa, Muscodor strobelii
  misc_feature: SGI Peptide ID NO. 573489
  misc_feature (93)..(464): Pfam Id: PF07690 Pfam Desc: Major Facilitator Superfamily
  misc_feature (9)..(513): NCBI GI: 261354580 Blast Desc: pantothenate transporter liz1 [Verticillium albo-atrum VaMs.102]
  misc_feature (56)..(508): NCBI GI: 39968453 Blast Desc: MGG_02319 [Magnaporthe grisea 70-15] gi|145014107|gb|EDJ98748.1| MGG_02319 [Magnaporthe grisea 70-15]
  misc_feature (31)..(508): NCBI GI: 85109488 Blast Desc: NCU07820 [Neurospora crassa OR74A] gi|28924586|gb|EAA33705.1| NCU07820 [Neurospora crassa OR74A]
  misc_feature (40)..(513): NCBI GI: 46139921 Blast Desc: FG11475.1 [Gibberella zeae PH-1]
  misc_feature (22)..(514): NCBI GI: 256723930 Blast Desc: [Nectria haematococca mpVI 77-13-4]
  misc_feature (34)..(508): NCBI GI: 115437094 Blast Desc: conserved [Aspergillus terreus NIH2624] gi|114188539|gb|EAU30239.1| conserved [Aspergillus terreus NIH2624]
  misc_feature (35)..(509): NCBI GI: 256723562 Blast Desc: NECHADRAFT_94050 [Nectria haematococca mpVI 77-13-4]
  misc_feature (43)..(508): NCBI GI: 212536897 Blast Desc: MFS transporter Liz1/Seo1, [Penicillium marneffei ATCC 18224] gi|210068346|gb|EEA22437.1| MFS transporter Liz1/Seo1, [Penicillium marneffei ATCC 18224]
  misc_feature (41)..(510): NCBI GI: 156055898 Blast Desc: SS1G_05301 [Sclerotinia sclerotiorum 1980] gi|154703085|gb|EDO02824.1| SS1G_05301 [Sclerotinia sclerotiorum 1980]
  misc_feature (56)..(513): NCBI GI: 121712403 Blast Desc: pantothenate transporter [Aspergillus clavatus NRRL 1] gi|119401965|gb|EAW12387.1| pantothenate transporter [Aspergillus clavatus NRRL 1]
MLRLRVQFSDVRVKHNMTVQKISPAIGVSTDVKASTPSLDDRSSSENTIHEGSDVVATKPKKTWRSYLWDTFDKSPEERKFLFKLDAVVLTLASLGYFIKYIDQININSAFVSGMKEDLNLNGNQLNYMIASWTVGYVIGEIPSNIILTKVRPSIWIPSLEVTWSVLTILLAKCQTAQQIYVLRFFIGLAESAFYPGMQYLIGSWYRKDELAKRSCIFHSSGAIGQMVSGYLITGTYRLEGRGGFHGWQWLFIINTVISLPVAIAGFFLFPDVPEITKAWWLTEKDIAIANKRMALEGRAKRGKYSREKIKKIFSSWHIYTLVLLYIFFNNGAGYGGQPAFALWLKSEGYGIKPVNTYPTIATAIQILFTYIYAWTSDSVFRGARWPPMIFAGVVNIFTSASLAVWNIPNRLKWASYILGSISGGISGLTFAWAHEICSDDNEERALVTAAMNQFAYVVQAWLPLIIWQTVDAPQYHKGFITMIFISAGLIVTALTIRVLHHREVARKRSNIAA

SEQ ID NO: 38799 - DNA, 1002 bp, Muscodor strobelii
  misc_feature: SGI cDNA ID NO. 573490
  misc_feature: Encodes the peptide sequence at SEQ ID NO 38800
atggctaccacaattgtgtgtggaaagcaggtttcgcagaatgggctaggtctgagtcgtcttgttagtccgccgctgagcgtcacggcggatgaagcgattcgagttttaaaagctgctctccaagcgggtgtgaatgtctggaatgctgccgatttctacggaacaccagagtacaattcgattcacctaatgaatttgtacttcaccaagtaccctgaagatgccgataaagtcctgttgatggttaagggcggaatcacaaacatgagaacattctctctggattgctcggccgagggcatgagaaagtcgttcgaatcggtcaacgatatccttgacgggaagaagacgatcgacgcattcgggccggccagagtcgaccccaaagtttctattgaagacacaattaagggacttctagagttgaagaacgagggcaaggttggcgggattcagttgagtgaagtcaatgcagacacgatcaagcgtgcgtccaaagtcgccaagatcgacatggttgagcaagaagtcagtctgtgggcgactgcaatcttcgacaacggtgtcgcagacacatgcgccgaactaggtatcccgatcgttgctcatacaccactgggcggcgggatgctcactggcaaatacaagagcccggaggacctcgaacctaacaaccatcatcgacactttcctagataccagggtgagaacttcaagaaaaatctagatcttgtcgaaaaggtcaaggagcttgcggagtcaaagggttgtaactctacgcagcttgcattgagttggattaagacacagagtcaacgaccaaacatgccgttcttcgttccaattgctggctcgacgtcacaaacaagagtcgttgagaatgcgaaacaggttgatttgacgaacgctgatttgaaggcgatcgacgagatcctcgcaagctttgaagtgtcgggcactcgctatcccgaaatgggcatgaagctgacggaattctga

SEQ ID NO: 38800 - protein, 333 aa, Muscodor strobelii
  misc_feature: SGI Peptide ID NO. 573490
  misc_feature (5)..(314): Pfam Id: PF00248 Pfam Desc: Aldo/keto reductase family
  misc_feature (192)..(314): Pfam Id: PF00248 Pfam Desc: Aldo/keto reductase family
  misc_feature (6)..(333): NCBI GI: 212539720 Blast Desc: aldo/keto reductase, [Penicillium marneffei ATCC 18224] gi|210067314|gb|EEA21406.1| aldo/keto reductase, [Penicillium marneffei ATCC 18224]
  misc_feature (5)..(333): NCBI GI: 145243898 Blast Desc: An11g04700 [Aspergillus niger] gi|134079145|emb|CAK40674.1| protein product [Aspergillus niger]
  misc_feature (6)..(333): NCBI GI: 121719114 Blast Desc: aldo/keto reductase [Aspergillus clavatus NRRL 1] gi|119404490|gb|EAW14866.1| aldo/keto reductase [Aspergillus clavatus NRRL 1]
  misc_feature (1)..(333): NCBI GI: 169776335 Blast Desc: [Aspergillus oryzae RIB40] gi|83771369|dbj|BAE61501.1| protein product [Aspergillus oryzae]
  misc_feature (5)..(333): NCBI GI: 154298700 Blast Desc: BC1G_11605 [Botryotinia fuckeliana B05.10] gi|150857777|gb|EDN32969.1| BC1G_11605 [Botryotinia fuckeliana B05.10]
  misc_feature (6)..(333): NCBI GI: 242774296 Blast Desc: aldo/keto reductase, [Talaromyces stipitatus ATCC 10500] gi|218722033|gb|EED21451.1| aldo/keto reductase, [Talaromyces stipitatus ATCC 10500]
  misc_feature (1)..(333): NCBI GI: 212531925 Blast Desc: aldo/keto reductase, [Penicillium marneffei ATCC 18224] gi|210071483|gb|EEA25572.1| aldo/keto reductase, [Penicillium marneffei ATCC 18224]
  misc_feature (6)..(325): NCBI GI: 85119285 Blast Desc: NCU02930 [Neurospora crassa OR74A] gi|28927423|gb|EAA36376.1| NCU02930 [Neurospora crassa OR74A]
  misc_feature (6)..(326): NCBI GI: 169607521 Blast Desc: SNOG_06819 [Phaeosphaeria nodorum SN15] gi|160701430|gb|EAT85470.2| SNOG_06819 [Phaeosphaeria nodorum SN15]
  misc_feature (6)..(329): NCBI GI: 116180740 Blast Desc: CHGG_00998 [Chaetomium globosum CBS 148.51] gi|88185295|gb|EAQ92763.1| CHGG_00998 [Chaetomium globosum CBS 148.51]
  misc_feature (5)..(325): SWISSPROT Homolog: EC 1.1.1.65 Pyridoxine 4-dehydrogenase
MATTIVCGKQVSQNGLGLSRLVSPPLSVTADEAIRVLKAALQAGVNVWNAADFYGTPEYNSIHLMNLYFTKYPEDADKVLLMVKGGITNMRTFSLDCSAEGMRKSFESVNDILDGKKTIDAFGPARVDPKVSIEDTIKGLLELKNEGKVGGIQLSEVNADTIKRASKVAKIDMVEQEVSLWATAIFDNGVADTCAELGIPIVAHTPLGGGMLTGKYKSPEDLEPNNHHRHFPRYQGENFKKNLDLVEKVKELAESKGCNSTQLALSWIKTQSQRPNMPFFVPIAGSTSQTRVVENAKQVDLTNADLKAIDEILASFEVSGTRYPEMGMKLTEF

SEQ ID NO: 38801 - DNA, 1886 bp, Muscodor strobelii
  misc_feature: SGI EST ID NO. CUFF.93294.0
  misc_feature: Variant of the nucleotide sequence at SEQ ID NO 38799
gctgatacttggatatgcatactacctgaacttcactacacggtgcgtgtgattcttagcctggggtaaccacgtcatcgcatgacagagcgcgtgctcttacatctatcaacaaatgcctcatactatcgttatgaatgctgtctctcccttttgtgcctttcgtcgctttttactacaaccttgatctgtgcgtttcaggccggagttaattaactgttattaccgtaacattggactataattgaagctcgtcgctaggaagtggagtccagtcccgtaacacacgtgtttaatgccgatgcagatggatgttggtctcgtaactatggcattagactagttgcgggcccgtttgcctccgtgattctcgaccttaggagaactgatgctttgagcggggtgatgcaagggccgtacagattgctttctttcaattgagatccggtggtacggtgacagattgaccgaccggcgagcatagcagtccgcttcaattgcaataaaatgactgcgcagtctcctttggtaacagattgcaacctgctgtattaacgaaccgataaagtgccgtcgactgcccgagatttcaacatcgttctcagaaacaaaggtcaattatcagttcggacaaacagtttcccgctccgcaatggctaccacaattgtgtgtggaaagcaggtttcgcagaatgggctaggtctgagtcgtcttgttagtccgccgctgagcgtcacggcggatgaagcgattcgagttttaaaagctgctctccaagcgggtgtgaatgtctggaatgctgccgatttctacggaacaccagagtacaattcgattcacctaatgaatttgtacttcaccaagtaccctgaagatgccgataaagtcctgttgatggttaagggcggaatcacaaacatgagaacattctctctggattgctcggccgagggcatgagaaagtcgttcgaatcggtcaacgatatccttgacgggaagaagacgatcgacgcattcgggccggccagagtcgaccccaaagtttctattgaagacacaattaagggacttctagagttgaagaacgagggcaaggttggcgggattcagttgagtgaagtcaatgcagacacgatcaagcgtgcgtccaaagtcgccaagatcgacatggttgagcaagaagtcagtctgtgggcgactgcaatcttcgacaacggtgtcgcagacacatgcgccgaactaggtatcccgatcgttgctcatacaccactgggcggcgggatgctcactggcaaatacaagagcccggaggacctcgaacctaacaaccatcatcgacactttcctagataccagggtgagaacttcaagaaaaatctagatcttgtcgaaaaggtcaaggagcttgcggagtcaaagggttgtaactctacgcagcttgcattgagttggattaagacacagagtcaacgaccaaacatgccgttcttcgttccaattgctggctcgacgtcacaaacaagagtcgttgagaatgcgaaacaggttgatttgacgaacgctgatttgaaggcgatcgacgagatcctcgcaagctttgaagtgtcgggcactcgctatcccgaaatgggcatgaagctgacggaattctgatttctgatcggaagacgacgaatattcaccgcttagcgcctgggcgagcattggagtgtggaagagcatcagcaattcgaaactggttcaactttatggtattacctgctgtttgagcgttatgtgctatattaagcagcaatatttgatctctttctagctacttcgcgatgatgcagtacccgaatcgtgagcgcggtgactataagccccgcggagatgaagatcatcg

SEQ ID NO: 38802 - DNA, 525 bp, Muscodor strobelii
  misc_feature: SGI cDNA ID NO. 573491
  misc_feature: Encodes the peptide sequence at SEQ ID NO 38803
atgagccctatatccgcggaattcgtagtcggtaccacgattgcatgttccttcgtcctctttggcaatgctatcacacaatctttcatgggcgttcctgcgctgctggtgaactttccgcgcgcttcgtcgtctgagcatgattccagagtccgcctactgggtagacaatggccagtgttctggcaagtagggaacgtcttttttagacccataagcacattcggtatatttggctatgcatacacagcttgggtagtctcgtcgcgatctccaagcagccagatgggagactggagaatgtatgccgttgcggccatttgccatctcattactgtagtacactcggcactgaatatgcagccgattaacgaaaagcttgcggctctccaagcgccaaagggtcatgtcgatccaaggcaggcagagagttatgctcgcaaatggatcaagttcaacacggtgcgcctggtgtctcccttcatcgctgggtcgctcgctttatcacaggctcttaaacactag

SEQ ID NO: 38803 - protein, 174 aa, Muscodor strobelii
  misc_feature: SGI Peptide ID NO. 573491
  misc_feature (7)..(172): NCBI GI: 171682762 Blast Desc: protein product [Podospora anserina] gi|170941340|emb|CAP66990.1| protein product [Podospora anserina]
  misc_feature (2)..(173): NCBI GI: 85096421 Blast Desc: NCU07091 [Neurospora crassa OR74A] gi|28921737|gb|EAA31016.1| [Neurospora crassa OR74A]
  misc_feature (9)..(168): NCBI GI: 189210297 Blast Desc: conserved [Pyrenophora tritici-repentis Pt-1C-BFP] gi|187977573|gb|EDU44199.1| conserved [Pyrenophora tritici-repentis Pt-1C-BFP]
  misc_feature (21)..(172): NCBI GI: 134108262 Blast Desc: CNBB3140 [Cryptococcus neoformans var. neoformans B-3501A] gi|50259767|gb|EAL22435.1| CNBB3140 [Cryptococcus neoformans var. neoformans B-3501A]
  misc_feature (20)..(161): NCBI GI: 145257603 Blast Desc: An04g04280 [Aspergillus niger] gi|134058708|emb|CAK38692.1| protein product [Aspergillus niger]
  misc_feature (20)..(172): NCBI GI: 169773341 Blast Desc: [Aspergillus oryzae RIB40] gi|238491310|ref|XP_002376892.1| conserved [Aspergillus flavus NRRL3357] gi|83769000|dbj|BAE59137.1| protein product oryzae]
MSPISAEFVVGTTIACSFVLFGNAITQSFMGVPALLVNFPRASSSEHDSRVRLLGRQWPVFWQVGNVFFRPISTFGIFGYAYTAWVVSSRSPSSQMGDWRMYAVAAICHLITVVHSALNMQPINEKLAALQAPKGHVDPRQAESYARKWIKFNTVRLVSPFIAGSLALSQALKH

SEQ ID NO: 38804 - DNA, 1488 bp, Muscodor strobelii
  misc_feature: SGI cDNA ID NO. 573492
  misc_feature: Encodes the peptide sequence at SEQ ID NO 38805
atggggtccgttcctgacactaacgactatcgaccagttggatcttatccatcaactggtattgatgttctcattgtgggtaccggtcttgcgggactaacagcctcgatcgaatgcatccgaaaaggccacaatgtgcgcgtattggaacgctatgacagcatcaacactgcaggagatatgtacttcatgggccacagtgccatccagttcttcaaacattggccagagatgctcgaagaatacgaacagatctcaatgtgtgatgcatggctcgagactttcaagcatagtggcgaacgcatgattccgccgaagacagtatccgaccgattacgtgctgcaggtgtggatcccaaaacgccacctgggagattcgagatgcgaccccttatatatacgatgttcgtccgtcaagtagaaaaattgggtgtccaggtgcaattcggcaagaaagtggttgaatacgaagaagaccaagcgcggcagaagggaatagtcaccactgataaaggagagaaatttgaagccgacattgtgatagctgcggatggcgttggttccaagagtcaaaagcttgtcggtggtcaagtaagagctaggagctccggaagagccatgtggagagcagccttcccttccagtttgcttgaccaaaatcccagcgtcaaggagttttacggccatatgcttggagagaggaacgatgagccggtgattagaacatttatggggccaggcatgtatgcgttgactttgatacgacctggaacttgtgtctggataatgaatcacgacgtaaccggcaacgaagcagaaagctggactcataccgtcgagccgcacgaagtgttgaaagacatagataaaggtcttggatcgaatcagccatgggcacccattttcaaggaattagtcaagctcactccgccgaaaacaattctcaattttgaactgttttggcgtaatccgcagccatcatggtcttcacctggagggcgggtgatacaaatcggagatgccgcccattcttttctgccttcttcgggaaacggcgcgactcaagccattgaggatgcggtgtcgctcgcttcatgccttcagcttggaggaaaagagaatattccactgtctgttcagactcatatccggtttcgcttcatacgatgtgcctgtgcgcagaaattggggtttgcaaatgcggaactgcttcaagacaccgattggagcaaagcaaagtttgatcccaagcaggctcaacccagacatccaaaatgggtatggcaacatgatcccgaaccttacacatacgagcattatcatgcgatggccgaaacggtaaggcagggtgtcccgtttgaccaaatagatagcataccaccaaactatccacctggctaccgatatcaaccttggagcattgaccagatcatggaagatatcagaaatggcaaatctgttgacctcggagaaggaaattgggactaa

SEQ ID NO: 38805 - protein, 495 aa, Muscodor strobelii
  misc_feature: SGI Peptide ID NO. 573492
  misc_feature (22)..(234): Pfam Id: PF01266 Pfam Desc: FAD dependent oxidoreductase
  misc_feature (20)..(395): Pfam Id: PF01494 Pfam Desc: FAD binding domain
  misc_feature (22)..(53): Pfam Id: PF01266 Pfam Desc: FAD dependent oxidoreductase
  misc_feature (22)..(50): Pfam Id: PF00890 Pfam Desc: FAD binding domain
  misc_feature (20)..(54): Pfam Id: PF01494 Pfam Desc: FAD binding domain
  misc_feature (129)..(185): Pfam Id: PF00070 Pfam Desc: Pyridine nucleotide-disulphide oxidoreductase
  misc_feature (22)..(51): Pfam Id: PF07992 Pfam Desc: Pyridine nucleotide-disulphide oxidoreductase
  misc_feature (6)..(495): NCBI GI: 171682766 Blast Desc: protein product [Podospora anserina] gi|170941342|emb|CAP66992.1| protein product [Podospora anserina]
  misc_feature (11)..(495): NCBI GI: 189210293 Blast Desc: monoxygenase [Pyrenophora tritici-repentis Pt-1C-BFP] gi|187977571|gb|EDU44197.1| monoxygenase [Pyrenophora tritici-repentis Pt-1C-BFP]
  misc_feature (11)..(494): NCBI GI: 164424518 Blast Desc: NCU07094 [Neurospora crassa OR74A] gi|157070548|gb|EAA31019.2| NCU07094 [Neurospora crassa OR74A]
  misc_feature (1)..(495): NCBI GI: 169619028 Blast Desc: SNOG_12707 [Phaeosphaeria nodorum SN15] gi|160703732|gb|EAT80005.2| SNOG_12707 [Phaeosphaeria nodorum SN15]
  misc_feature (13)..(494): NCBI GI: 256720797 Blast Desc: [Nectria haematococca mpVI 77-13-4]
  misc_feature (13)..(494): NCBI GI: 46134089 Blast Desc: FG09184.1 [Gibberella zeae PH-1]
  misc_feature (16)..(495): NCBI GI: 145232414 Blast Desc: An02g05170 [Aspergillus niger] gi|134056570|emb|CAK37624.1| protein product [Aspergillus niger]
  misc_feature (11)..(494): NCBI GI: 212546805 Blast Desc: monoxygenase, [Penicillium marneffei ATCC 18224] gi|210065076|gb|EEA19171.1| monoxygenase, [Penicillium marneffei ATCC 18224]
  misc_feature (7)..(494): NCBI GI: 212529404 Blast Desc: monoxygenase, [Penicillium marneffei ATCC 18224] gi|210074257|gb|EEA28344.1| monoxygenase, [Penicillium marneffei ATCC 18224]
  misc_feature (16)..(494): NCBI GI: 67515731 Blast Desc: AN0147.2 [Aspergillus nidulans FGSC A4] gi|40746864|gb|EAA66020.1| AN0147.2 [Aspergillus nidulans FGSC A4] gi|259489654|tpe|CBF90103.1| TPA: conserved [Aspergillus FGSC
  misc_feature (22)..(394): SWISSPROT Homolog: EC 1.14.13.24 3-hydroxybenzoate 6-monooxygenase
MGSVPDTNDYRPVGSYPSTGIDVLIVGTGLAGLTASIECIRKGHNVRVLERYDSINTAGDMYFMGHSAIQFFKHWPEMLEEYEQISMCDAWLETFKHSGERMIPPKTVSDRLRAAGVDPKTPPGRFEMRPLIYTMFVRQVEKLGVQVQFGKKVVEYEEDQARQKGIVTTDKGEKFEADIVIAADGVGSKSQKLVGGQVRARSSGRAMWRAAFPSSLLDQNPSVKEFYGHMLGERNDEPVIRTFMGPGMYALTLIRPGTCVWIMNHDVTGNEAESWTHTVEPHEVLKDIDKGLGSNQPWAPIFKELVKLTPPKTILNFELFWRNPQPSWSSPGGRVIQIGDAAHSFLPSSGNGATQAIEDAVSLASCLQLGGKENIPLSVQTHIRFRFIRCACAQKLGFANAELLQDTDWSKAKFDPKQAQPRHPKWVWQHDPEPYTYEHYHAMAETVRQGVPFDQIDSIPPNYPPGYRYQPWSIDQIMEDIRNGKSVDLGEGNWD

SEQ ID NO: 38806 - DNA, 89 bp, Muscodor strobelii
  misc_feature: SGI EST ID NO. CUFF.93315.0
  misc_feature: Variant of the nucleotide sequence at SEQ ID NO 38804
aacatttatggggccaggcatgtatgcgttgactttgatacgacctggaacttgtgtctggataatgaatcacgacgtaaccggcaacg

SEQ ID NO: 38807 - DNA, 1872 bp, Muscodor strobelii
  misc_feature: SGI cDNA ID NO. 573493
  misc_feature: Encodes the peptide sequence at SEQ ID NO 38808
atggcgtcgaggtttctgtcgctcccgacggagctcgtacttgaggttctcgaggatctagtccctgatcctcacccagccagtccaacgggctctcaaaagcttgatcccgacttccacgcaagccgcaaagcactccacagcctgtcgctgcattaccgttacctgccccagtggaatctgagagtagttccttccatctccaacggcttagccgcagaggtgctacacatcatgagccttttcaacttgcccctaaccccggttgatcagacacaaatcaacagcgcgtcaagctatagatacagacaccacttcccagaggagggagagcctgaaccgaatattcttctagagcaagtcgtggctgtaactctgtgtttaacgacttgcgttaaggatgtcctcatcactcaatcgccggtgcacacccgtcaccctcccctttcacgcatcaagcaagccttgacattaggtagcgagagtaacagcgagtattttaagcatctccgcagtgttcgtgtgcagacaagctcagagtgccgccctcgagattcacaacctcatctaaggatccgaggcggacatgatggaattgatccctttgacataccaacctacgaactagcgcggatccagcgcgtggaactcacaggagacaacggagagtggatgaagaagttcaatcaaggtagcacgactgcatccgccaataagctgcccgccgaaagccatattcaccgcttcggacgactgcgcgacctgagactctatgacagccgaaccgatcatgacacactcgcctgtgtgctcacgaaagcaaagagtttggaaacgttccattatacttccgattctcgctgctacagctatcggccgggagctcctttgagcgtgacaggccgcaagagctttgaggacgctcttttggcattagcgaagacattgaaagaactgcacttgcgcgacctacgaccaaatctcatctgcttacgaccgcgatgttcctgcatgtctccacgtcgtctctgtttagtcgttgaacaaaagattcaatccctttcagaattcgatcacttgactcgcctctccatcgacatacgctcgcttcagttgccaccaacgcccgaatgcaccttcgcacacacgcttgcggctgcactacctcaaagtctggtcgagctcgagctcgttgagtcatggtattactcggaaatttgtgtgcagaaaacatccaagcgctgggaggaggctcttattctttggatgcaatccattctactcgagttgctgcgatgcgtcgctggtactcgtggttttctgcacaatgcacagaatcgcttaccgaattggaaggtcttcaagttcgagggacatccagctttccacaactacgaggcgtttggcactacgatcaccatgtgcgaagctggtcaagagaacgaatcaatagacccctaccgagagtctgattgtcaactacagcagcagatcaaggaagacgaacgctccaagaatgacgagatcgactctgctgaccaagaggttgaggacagcggcgcgctccttggctatgcagcttacagaagttctagactccccacatatcgcgaactgcgacgcatgtgggcgaattggtacaactcaggaaaacgctatcgagatattaattcagcaagcgagttccaccagatgtaccgcgcgatagacatttaccctcctcccattctactgaagacagatgccgggttagctgcccttactgagatattcagtaaagttggcgttaacttccaggtcacgttagaggagaaagccgagtatgaagaggtggacgaggatgatgacatgtggccgcatcatatcgcatga

SEQ ID NO: 38808 - protein, 623 aa, Muscodor strobelii
  misc_feature: SGI Peptide ID NO. 573493
MASRFLSLPTELVLEVLEDLVPDPHPASPTGSQKLDPDFHASRKALHSLSLHYRYLPQWNLRVVPSISNGLAAEVLHIMSLFNLPLTPVDQTQINSASSYRYRHHFPEEGEPEPNILLEQVVAVTLCLTTCVKDVLITQSPVHTRHPPLSRIKQALTLGSESNSEYFKHLRSVRVQTSSECRPRDSQPHLRIRGGHDGIDPFDIPTYELARIQRVELTGDNGEWMKKFNQGSTTASANKLPAESHIHRFGRLRDLRLYDSRTDHDTLACVLTKAKSLETFHYTSDSRCYSYRPGAPLSVTGRKSFEDALLALAKTLKELHLRDLRPNLICLRPRCSCMSPRRLCLVVEQKIQSLSEFDHLTRLSIDIRSLQLPPTPECTFAHTLAAALPQSLVELELVESWYYSEICVQKTSKRWEEALILWMQSILLELLRCVAGTRGFLHNAQNRLPNWKVFKFEGHPAFHNYEAFGTTITMCEAGQENESIDPYRESDCQLQQQIKEDERSKNDEIDSADQEVEDSGALLGYAAYRSSRLPTYRELRRMWANWYNSGKRYRDINSASEFHQMYRAIDIYPPPILLKTDAGLAALTEIFSKVGVNFQVTLEEKAEYEEVDEDDDMWPHHIA

SEQ ID NO: 38809 - DNA, 2538 bp, Muscodor strobelii
  misc_feature: SGI cDNA ID NO. 573494
  misc_feature: Encodes the peptide sequence at SEQ ID NO 38810
atgtcgcatccatccgacgagaagagctctccaacgctcactcacgctccaacggtgtccgacgagcctttcgaacatctggagcagtcagagaagcctcagcgtcgagggacacttgccgaccgcgaccgtctacaggttccgggccagtatgccgaccggtcagacgtcggcaatgcacattacctctcatactcagagtcacaaaaccaggccaccgtgctcgcagacaatcttgctgtgctccaagccgaacgggctgttagcaactccgaggaacccgaacagctacgtcgttctcactctagggtcaggacaaacgacgaaccgaacgacgatgtcttcaaccagactgagaaaggcccgacggcaccaggcctgccctccagcgacacaaacaagctgaaaaagctttatgattttactcgcaatttgccgcggttcctgcgctactttctgtacagcttgcccatcaccgtcgttcttcttatccccatcttcctcggtatcttcctggacaaagatcaccaatcagttataggcgggccgggtggcgtgtcggagctatggttcggcatctggctagaagtcgtctggctatctctctgggctgctcggattgtcacttctgcgctccctctgatttttggtctctgcggtaaggtcgtgggctccaactatacaaagtggagagatattggcaagcagcttgagctctcgtgtgctctctttttgtggatgctggctgtcctcatctcctttttgccaatcgtcaatagccacaaaattgcggcccaagttccggacgaggccgacaccccattcccaagcatccgctggatcaatgtcgttgataaagtcatcattgcgctcttcgttctggcgatcttgaacttcatcgaaaagctcttgattcagtggatcgctgccgctttccaccagcggacatattccactcgcatcgagacaaacaagcagagcattgcataccttgttcatctctacgatcattcgaaagacaggctagtgtcggaggcggcggtcatgggagacagcaggggctcaggaactaaaaccccaatcggtatattcgctgacaacgcacgggatgttgcgaataagatcggtgatatgactacccgtgtggctggtgacttcactggtaaacaggtcaagcttagcaatcatcctcgcaaggtcgtttctgagctccttcgcaactctagttcagcccagatcctggcccgccgccttttccgcacgtatgctggaatagatagcaatgtcttggtcccccaagatctgcggcctgcatttcctaccgacgaggacgccgaggcagcatttctcgtttttgaccgtgacttgaacggagacgtctctatggaagaacttgaggcttttgtcgatgaggttcaccgcgagaagaaagcgattacagcatcccttaaagacttggactctgttattaccaaattggatagggtctttctgattgtgatcatcatcatcacggtcattgtcttcgtcacctcaatctctacttcgacagcagccgccctggcctcggctggctctgcaatcctcggtctgtcttggcttctacaggctactgctcaggagtttctgcaatccattatatttgtctttgtaaagcaccccttcgacgtcggtgatcgtgtcacagtttataatagcgggactacagccgccggcgacgactactacgtcacagaaatctcgttgctctacaccgaattcaagaaaatgcagggaatgatcgtccaggcccccaactccgttcttaacaatctcttcattctgaatcatcgacgcagtggagcattagcagatgtcttcactctcaccatgaaatacggtacgcccgcttcggtcattactgagcttgaggctcgcatgtcggagtttgtcgaggccaacaagcgagactatactagcaagattatcactgaactctgcagcttcgaggacgcctgcagcatgcaagtgaatttcatttgcttccacaaatccagctaccagaacgaacttctacgtctcattcgtcacaacaagttcgctcacgaattgatggaccaaatggtcgctctgggcatcgagcaacctcggaaacaattccaggtttctggtcgggatttcccgattttccagtccaacatttccccgccttcctactcagaagagcaacaatccgttgatcctgccatcttgagtgccacgagacgccgtagagccaactctcgcgcaaatgccgatgtcaccgatatgtatcaggacgtctttgttagccgcgccgttgccaacaacaatatttcaacatctcaacttcctccagtgatcaacgaggagcagccgtcggataccgagcagcccaggaggaccagtacgaatttgtcaagaccgccaactaatggtagtggcagaaggggtttcttcaatcgctcagcaggtacactgagacgacaacaacgttcgactgaccggtcggatcgacaatcggatcgcgatatggtgtga

SEQ ID NO: 38810 - protein, 845 aa, Muscodor strobelii
  misc_feature: SGI Peptide ID NO. 573494
  misc_feature (494)..(709): Pfam Id: PF00924 Pfam Desc: Mechanosensitive ion channel
  misc_feature (494)..(640): Pfam Id: PF00924 Pfam Desc: Mechanosensitive ion channel
  misc_feature (63)..(740): NCBI GI: 171693529 Blast Desc: protein product [Podospora anserina] gi|170946713|emb|CAP73516.1| protein product [Podospora anserina]
  misc_feature (63)..(827): NCBI GI: 116206350 Blast Desc: CHGG_02468 [Chaetomium globosum CBS 148.51] gi|88183065|gb|EAQ90533.1| CHGG_02468 [Chaetomium globosum CBS 148.51]
  misc_feature (33)..(741): NCBI GI: 145612968 Blast Desc: MGG_08304 [Magnaporthe grisea 70-15] gi|145020051|gb|EDK04279.1| MGG_08304 [Magnaporthe grisea 70-15]
  misc_feature (64)..(790): NCBI GI: 256731100 Blast Desc: NECHADRAFT_993 [Nectria haematococca mpVI 77-13-4]
  misc_feature (68)..(734): NCBI GI: 261359127 Blast Desc: mechanosensitive ion channel family [Verticillium albo-atrum VaMs.102]
  misc_feature (72)..(771): NCBI GI: 85101516 Blast Desc: NCU04207 [Neurospora crassa OR74A] gi|21622353|emb|CAD36984.1| conserved [Neurospora crassa] gi|28922707|gb|EAA31931.1| [Neurospora crassa OR74A]
  misc_feature (72)..(821): NCBI GI: 46123193 Blast Desc: FG05974.1 [Gibberella zeae PH-1]
  misc_feature (64)..(732): NCBI GI: 212539117 Blast Desc: Mechanosensitive ion channel family [Penicillium marneffei ATCC 18224] gi|210069456|gb|EEA23547.1| Mechanosensitive ion channel family [Penicillium marneffei ATCC
  misc_feature (64)..(733): NCBI GI: 242761395 Blast Desc: Mechanosensitive ion channel family [Talaromyces stipitatus ATCC 10500] gi|218723367|gb|EED22784.1| Mechanosensitive ion channel family [Talaromyces stipitatus ATCC
  misc_feature (63)..(750): NCBI GI: 156062642 Blast Desc: SS1G_01437 [Sclerotinia sclerotiorum 1980] gi|154696773|gb|EDN96511.1| SS1G_01437 [Sclerotinia sclerotiorum 1980]
MSHPSDEKSSPTLTHAPTVSDEPFEHLEQSEKPQRRGTLADRDRLQVPGQYADRSDVGNAHYLSYSESQNQATVLADNLAVLQAERAVSNSEEPEQLRRSHSRVRTNDEPNDDVFNQTEKGPTAPGLPSSDTNKLKKLYDFTRNLPRFLRYFLYSLPITVVLLIPIFLGIFLDKDHQSVIGGPGGVSELWFGIWLEVVWLSLWAARIVTSALPLIFGLCGKVVGSNYTKWRDIGKQLELSCALFLWMLAVLISFLPIVNSHKIAAQVPDEADTPFPSIRWINVVDKVIIALFVLAILNFIEKLLIQWIAAAFHQRTYSTRIETNKQSIAYLVHLYDHSKDRLVSEAAVMGDSRGSGTKTPIGIFADNARDVANKIGDMTTRVAGDFTGKQVKLSNHPRKVVSELLRNSSSAQILARRLFRTYAGIDSNVLVPQDLRPAFPTDEDAEAAFLVFDRDLNGDVSMEELEAFVDEVHREKKAITASLKDLDSVITKLDRVFLIVIIIITVIVFVTSISTSTAAALASAGSAILGLSWLLQATAQEFLQSIIFVFVKHPFDVGDRVTVYNSGTTAAGDDYYVTEISLLYTEFKKMQGMIVQAPNSVLNNLFILNHRRSGALADVFTLTMKYGTPASVITELEARMSEFVEANKRDYTSKIITELCSFEDACSMQVNFICFHKSSYQNELLRLIRHNKFAHELMDQMVALGIEQPRKQFQVSGRDFPIFQSNISPPSYSEEQQSVDPAILSATRRRRANSRANADVTDMYQDVFVSRAVANNNISTSQLPPVINEEQPSDTEQPRRTSTNLSRPPTNGSGRRGFFNRSAGTLRRQQRSTDRSDRQSDRDMV

SEQ ID NO: 38811 - DNA, 3189 bp, Muscodor strobelii
  misc_feature: SGI EST ID NO. CUFF.93342.0
  misc_feature: Variant of the nucleotide sequence at SEQ ID NO 38809
ttgtgattgaatcttctgcagcagtgattaagaacaaaatgtccaccagtgcttaatacttcactcttcattccacttataccagtgatcagtcattcgttacagaatcaatcacttaaaccttgttattagcgtggatatcattcgaccagacgcaaagatagaaacgctatcattattcgcgcggccattcgtaagtttctcaaccgccagaattccacaaaatctcgacccgctgtgggaattataggatcgcagattgcgtggagacaggagtggaccacattcatgctgcattcagtcaatgtcaaggcataattgactcgatgctctctacttctaccccggactgcgtcttttgacttgcaacctccagtcgacggtttgccagctcgcaacatgtcgcatccatccgacgagaagagctctccaacgctcactcacgctccaacggtgtccgacgagcctttcgaacatctggagcagtcagagaagcctcagcgtcgagggacacttgccgaccgcgaccgtctacaggttccgggccagtatgccgaccggtcagacgtcggcaatgcacattacctctcatactcagagtcacaaaaccaggccaccgtgctcgcagacaatcttgctgtgctccaagccgaacgggctgttagcaactccgaggaacccgaacagctacgtcgttctcactctagggtcaggacaaacgacgaaccgaacgacgatgtcttcaaccagactgagaaaggcccgacggcaccaggcctgccctccagcgacacaaacaagctgaaaaagctttatgattttactcgcaatttgccgcggttcctgcgctactttctgtacagcttgcccatcaccgtcgttcttcttatccccatcttcctcggtatcttcctggacaaagatcaccaatcagttataggcgggccgggtggcgtgtcggagctatggttcggcatctggctagaagtcgtctggctatctctctgggctgctcggattgtcacttctgcgctccctctgatttttggtctctgcggtaaggtcgtgggctccaactatacaaagtggagagatattggcaagcagcttgagctctcgtgtgctctctttttgtggatgctggctgtcctcatctcctttttgccaatcgtcaatagccacaaaattgcggcccaagttccggacgaggccgacaccccattcccaagcatccgctggatcaatgtcgttgataaagtcatcattgcgctcttcgttctggcgatcttgaacttcatcgaaaagctcttgattcagtggatcgctgccgctttccaccagcggacatattccactcgcatcgagacaaacaagcagagcattgcataccttgttcatctctacgatcattcgaaagacaggctagtgtcggaggcggcggtcatgggagacagcaggggctcaggaactaaaaccccaatcggtatattcgctgacaacgcacgggatgttgcgaataagatcggtgatatgactacccgtgtggctggtgacttcactggtaaacaggtcaagcttagcaatcatcctcgcaaggtcgtttctgagctccttcgcaactctagttcagcccagatcctggcccgccgccttttccgcacgtatgctggaatagatagcaatgtcttggtcccccaagatctgcggcctgcatttcctaccgacgaggacgccgaggcagcatttctcgtttttgaccgtgacttgaacggagacgtctctatggaagaacttgaggcttttgtcgatgaggttcaccgcgagaagaaagcgattacagcatcccttaaagacttggactctgttattaccaaattggatagggtctttctgattgtgatcatcatcatcacggtcattgtcttcgtcacctcaatctctacttcgacagcagccgccctggcctcggctggctctgcaatcctcggtctgtcttggcttctacaggctactgctcaggagtttctgcaatccattatatttgtctttgtaaagcaccccttcgacgtcggtgatcgtgtcacagtttataatagcgggactacagccgccggcgacgactactacgtcacagaaatctcgttgctctacaccgaattcaagaaaatgcagggaatgatcgtccaggcccccaactccgttcttaacaatctcttcattctgaatcatcgacgcagtggagcattagcagatgtcttcactctcaccatgaaatacggtacgcccgcttcggtcattactgagcttgaggctcgcatgtcggagtttgtcgaggccaacaagcgagactatactagcaagattatcactgaactctgcagcttcgaggacgcctgcagcatgcaagtgaatttcatttgcttccacaaatccagctaccagaacgaacttctacgtctcattcgtcacaacaagttcgctcacgaattgatggaccaaatggtcgctctgggcatcgagcaacctcggaaacaattccaggtttctggtcgggatttcccgattttccagtccaacatttccccgccttcctactcagaagagcaacaatccgttgatcctgccatcttgagtgccacgagacgccgtagagccaactctcgcgcaaatgccgatgtcaccgatatgtatcaggacgtctttgttagccgcgccgttgccaacaacaatatttcaacatctcaacttcctccagtgatcaacgaggagcagccgtcggataccgagcagcccaggaggaccagtacgaatttgtcaagaccgccaactaatggtagtggcagaaggggtttcttcaatcgctcagcaggtacactgagacgacaacaacgttcgactgaccggtcggatcgacaatcggatcgcgatatggtgtgatggagtcgagtttaatgattaatgacacaagtgataaaaggaaatagatattagacgggattagcattatttgcgaagcgttgtatagactcgtgtaatgaccattttgatgaataccgaatagattgcatatcatcactcctacttggacagaaggataacagtacggataaacattcgacggaatatccggtttgtgtacgaactagcagatatgatacataattagcaaaacaagcatatcatcgctct

SEQ ID NO: 38812 - DNA, 1512 bp, Muscodor strobelii
  misc_feature: SGI cDNA ID NO. 573495
  misc_feature: Elevated expression when VOC is produced
  misc_feature: Encodes the peptide sequence at SEQ ID NO 38813
atgggctcaatcgatgtctgtaatacccctttgagaaacggcttcgcaatcagcaatgttgccatcatcggcgccggcatcagtgggatcacatcggcggcccatttggcaagggaaggattggacgttacaattttcgaacggacacagaaaatagggggcgcttgggtttataatcatgagctggatcgtgatccgccgtttccgaacctcattccaccagtatatgactggaccgatatcgataagcccggtttaagtgtcgatgaagtcagtctcattcttgcgccgccaggcccgtgctatgcaggtctcaagaacaacgtcccgacatcattaatgaaaagctgtctcctcgaatggcctggaggaactgaagagtttgtcgatcagggaaggattgtggactatgtcacagacattgcgaactcccaaaacgtgacacacaagatcaaattcggtacacgagttgaagatgtgtctaagccggaaggaagtctgaaatggagagtgagaacatgtacattggcagcgaaagatcagacatacttgattacaagacaagaggaggagtttgacgctgttgttgtggcaagtgggcactaccacgtgccctttgtaccggaggttcctggcctatcagaatggaaacagcttttcccggaccgggtgctgcactcgaagcgatatcgtacagcagatgtgtttcgagggaagacggtactactgataggggcaggagcatcgtcgctcgatatcgctcgtgaagttattgaagttgggggccaagtgtaccagagcagacgcgagtcaaaatatgacctgatcgcaaatcggttgccgaaagaggtcaagagggttgcaatggtaactcacttcatcgcacttcaatccaattcattcacatcaggtattccaagtggcaaagcaataccagggaagattgtgcttgaagatggtgaaaatttggagaacattgattttgtcgtggtcgcgacaggatacatcacttcatacccctttctaggtgaattagaacagccgttggtcgattggaaagatgctggcgaaagaacagtaatcacttcggacgggtacacaacacataacctccataaggacatcttttacatcccagatccaacactgtcctttataggtgtctccaatctagtgtcaaccttctcgctgttcgatttccaagcaaagatcatggcaaaagtcctagcagggaaagtacatctccccaccaaggctgatatgaaggaggagcaaacggagagaaagaaacgattcaagcctggcgacaggttccacgccttggtgcttggcgaacctgcgtacatcgatgagctgttgacttgggcaaatgaccagcttgttgacaatggctttgaccccctgactgggatggatgctgagtgggtaaaggcctatgagttttttaagggtactagaatatctacaataagccaacaaggtccagacaaaacaaacggctctacagaataa

SEQ ID NO: 38813 - protein, 503 aa, Muscodor strobelii
  misc_feature: SGI Peptide ID NO. 573495
  misc_feature (19)..(352): Pfam Id: PF01266 Pfam Desc: FAD dependent oxidoreductase
  misc_feature (20)..(494): Pfam Id: PF00743 Pfam Desc: Flavin-binding monooxygenase-like
  misc_feature (27)..(54): Pfam Id: PF01593 Pfam Desc: Flavin containing amine oxidoreductase
  misc_feature (19)..(55): Pfam Id: PF01266 Pfam Desc: FAD dependent oxidoreductase
  misc_feature (19)..(55): Pfam Id: PF00890 Pfam Desc: FAD binding domain
  misc_feature (18)..(53): Pfam Id: PF03486 Pfam Desc: HI0933-like protein
  misc_feature (19)..(52): Pfam Id: PF00070 Pfam Desc: Pyridine nucleotide-disulphide oxidoreductase
  misc_feature (19)..(54): Pfam Id: PF07992 Pfam Desc: Pyridine nucleotide-disulphide oxidoreductase
  misc_feature (15)..(54): Pfam Id: PF01946 Pfam Desc: Thi4 family
  misc_feature (11)..(457): NCBI GI: 116191609 Blast Desc: CHGG_05522 [Chaetomium globosum CBS 148.51] gi|88181435|gb|EAQ88903.1| CHGG_05522 [Chaetomium globosum CBS 148.51]
  misc_feature (11)..(484): NCBI GI: 171687156 Blast Desc: protein product [Podospora anserina] gi|170943539|emb|CAP69192.1| protein product [Podospora anserina]
  misc_feature (19)..(483): NCBI GI: 85109490 Blast Desc: NCU07821 [Neurospora crassa OR74A] gi|28924587|gb|EAA33706.1| [Neurospora crassa OR74A]
  misc_feature (18)..(486): NCBI GI: 256723561 Blast Desc: NECHADRAFT_42322 [Nectria haematococca mpVI 77-13-4]
  misc_feature (18)..(483): NCBI GI: 256724200 Blast Desc: NECHADRAFT_87446 [Nectria haematococca mpVI 77-13-4]
  misc_feature (17)..(480): NCBI GI: 67527666 Blast Desc: AN4110.2 [Aspergillus nidulans FGSC A4] gi|40740181|gb|EAA59371.1| AN4110.2 [Aspergillus nidulans FGSC A4] gi|259481299|tpe|CBF74687.1| TPA: FAD dependent AFUA_3G01002)
  misc_feature (17)..(481): NCBI GI: 242810667 Blast Desc: FAD dependent oxidoreductase, [Talaromyces stipitatus ATCC 10500] gi|218716253|gb|EED15675.1| FAD dependent oxidoreductase, [Talaromyces stipitatus ATCC 10500]
  misc_feature (17)..(480): NCBI GI: 159128443 Blast Desc: AFUB_047400 [Aspergillus fumigatus A1163]
  misc_feature (17)..(480): NCBI GI: 146323141 Blast Desc: FAD dependent oxidoreductase [Aspergillus fumigatus Af293] gi|129556485|gb|EAL86382.2| FAD dependent oxidoreductase, [Aspergillus fumigatus Af293]
  misc_feature (17)..(503): NCBI GI: 119473713 Blast Desc: dimethylaniline monooxygenase [Neosartorya fischeri NRRL 181] gi|119406885|gb|EAW16835.1| dimethylaniline monooxygenase [Neosartorya fischeri NRRL 181]
  misc_feature (39)..(455): SWISSPROT Homolog: EC 1.14.13.8 Flavin-containing monooxygenase
  misc_feature: Useful for introducing or modulating the production of volatile compounds
MGSIDVCNTPLRNGFAISNVAIIGAGISGITSAAHLAREGLDVTIFERTQKIGGAWVYNHELDRDPPFPNLIPPVYDWTDIDKPGLSVDEVSLILAPPGPCYAGLKNNVPTSLMKSCLLEWPGGTEEFVDQGRIVDYVTDIANSQNVTHKIKFGTRVEDVSKPEGSLKWRVRTCTLAAKDQTYLITRQEEEFDAVVVASGHYHVPFVPEVPGLSEWKQLFPDRVLHSKRYRTADVFRGKTVLLIGAGASSLDIAREVIEVGGQVYQSRRESKYDLIANRLPKEVKRVAMVTHFIALQSNSFTSGIPSGKAIPGKIVLEDGENLENIDFVVVATGYITSYPFLGELEQPLVDWKDAGERTVITSDGYTTHNLHKDIFYIPDPTLSFIGVSNLVSTFSLFDFQAKIMAKVLAGKVHLPTKADMKEEQTERKKRFKPGDRFHALVLGEPAYIDELLTWANDQLVDNGFDPLTGMDAEWVKAYEFFKGTRISTISQQGPDKTNGSTE

SEQ ID NO: 38814 - DNA, 1160 bp, Muscodor strobelii
  misc_feature: SGI EST ID NO. CUFF.93345.1
  misc_feature: Variant of the nucleotide sequence at SEQ ID NO 38812
gaggatagttatttatctgcaaattaattgaaagttcccagttgttcgcgagcccgagtcacgaatatatgatacactagaatgggctcaatcgatgtctgtaatacccctttgagaaacggcttcgcaatcagcaatgttgccatcatcggcgccggcatcagtgggatcacatcggcggcccatttggcaagggaaggattggacgttacaattttcgaacggacacagaaaatagggggcgcttgggtttataatcatgagctggatcgtgatccgccgtttccgaacctcattccaccagtatatgactggaccgatatcgataagcccggtttaagtgtcgatgaagtcagtctcattcttgcgccgccaggcccgtgctatgcaggtctcaagaacaacgtcccgacatcattaatgaaaagctgtctcctcgaatggcctggaggaactgaagagtttgtcgatcagggaaggattgtggactatgtcacagacattgcgaactcccaaaacgtgacacacaagatcaaattcggtacacgagttgaagatgtgtctaagccggaaggaagtctgaaatggagagtgagaacatgtacattggcagcgaaagatcagacatacttgattacaagacaagaggaggagtttgacgctgttgttgtggcaagtgggcactaccacgtgccctttgtaccggaggttcctggcctatcagaatggaaacagcttttcccggaccgggtgctgcactcgaagcgatatcgtacagcagatgtgtttcgagggaagacggtactactgataggggcaggagcatcgtcgctcgatatcgctcgtgaagttattgaagttgggggccaagtgtaccagagcagacgcgagtcaaaatatgacctgatcgcaaatcggttgccgaaagaggtcaagagggttgcaatggtaactcacttcatcgcacttcaatccaattcattcacatcaggtattccaagtggcaaagcaataccagggaagattgtgcttgaagatggtgaaaatttggagaacattgattttgtcgtggtcgcgacaggatacatcacttcatacccctttctaggtgaattagaacagccgttggtcgattggaaagatgctggcgaaagaacagt

SEQ ID NO: 38815 - DNA, 1608 bp, Muscodor strobelii
  misc_feature: SGI cDNA ID NO. 573496
  misc_feature: Elevated expression when VOC is produced
  misc_feature: Encodes the peptide sequence at SEQ ID NO 38816
atgagctcaatcttatcggtctttctggttaccacagtatggactggaggaggacttgttgccgctggcgccattgctgcatggcaagttcctggatcagacatggatgcacctcaagtcataatgcaagatgataccacaggacatattctacatagcttttgcaacagcggcagcacaccggtctttccaggagatgatactgcggcattcaacctcacagactcgaatttcatacctatgaaagcaactagtttggcaggctatggctacaatgatgataatggatccgtggcatctatattctatatgaatacgaagcaccaaatcgttaatgctctttggcggtgcggcgaaggcggacgttttattccgtataaagacgactacttaaacccgatttctcaatcggcagcacctcccaagcccgatacaggactagccctagtgaatctgggcgcggacgctggtgtcagagtctattttgaacaagaagataatacgacgacaatattgcagtacataccaggacctgagatatggagcctgagcaataatatctcgcgagacgcctctaagcaatcgcccctcagtgcagggcatactgataacgacaagattagtctcgtcagcccacgagatactagtaacattgagatatccaagctcaatcctaacgggacctggagcacatacacttttccaacaccgttagaagcataccagagcgagtctgacgataaatactacatcccaactaacgaaacggaaccggaggccttcaaactcgatacagattctaacgtgacacgtactgaattagaagcttgggatggccagacggctagcattggactcacattcgatagcgtggatcagatacgcagagtcttctacattgggaccgactcgcagttccattgccaaaaagagtcaacaagtggcgtttggcaaaagtgtcctgagtttagtccggatggctggcctcttgcagatagcccaaacgcacagtttgggtcgacctatgattggcaacacgataagatttggctgttctacgtgagtcagggtaagctcacccaagcataccgaagtcgtatcgacagctgggagaacaccgtggtacttcctaactcaacatcaacagcgaacgcaggtcatcgtggactttccactggtgcgaaagccggcattggtgtcggtgtgggagtcgctggtcttgcactcattgccctattagcctacatcatcatgcaacgcaagaagggcaagagcgagaaggaaaaggctgaagctgacgccgaggcagttgctgctaccaatcaaccgccgccggaatcttggccctcgccggccccagcttacacttcaggggttcccggtggtggtggagcgtggatagatggaaaatggacgccgacacccgagccaagtaaaagtgcggtgccctggtcaagcaggtcgtcttaccaacccgttccagtgtcaccaatgctctcatctgcggggactcctcaaccatttcagcctcctatacacgagatgtcaaatgatgttagttatcacgagatgccagcagagcgaagcgaaactgcacctgggaagtga

SEQ ID NO: 38816 - protein, 535 aa, Muscodor strobelii
  misc_feature: SGI Peptide ID NO. 573496
  misc_feature (21)..(534): NCBI GI: 171683899 Blast Desc: protein product [Podospora anserina] gi|170941910|emb|CAP67562.1| protein product [Podospora anserina]
  misc_feature (22)..(471): NCBI GI: 171694469 Blast Desc: protein product [Podospora anserina] gi|170947183|emb|CAP73988.1| protein product [Podospora anserina]
  misc_feature (24)..(474): NCBI GI: 116193101 Blast Desc: CHGG_06268 [Chaetomium globosum CBS 148.51] gi|88182181|gb|EAQ89649.1| CHGG_06268 [Chaetomium globosum CBS 148.51]
  misc_feature (39)..(421): NCBI GI: 46105162 Blast Desc: FG00209.1 [Gibberella zeae PH-1]
  misc_feature (39)..(425): NCBI GI: 256723605 Blast Desc: NECHADRAFT_52084 [Nectria haematococca mpVI 77-13-4]
  misc_feature (39)..(377): NCBI GI: 46122981 Blast Desc: FG05868.1 [Gibberella zeae PH-1]
  misc_feature (20)..(433): NCBI GI: 149209797 Blast Desc: MGCH7_ch7g380 [Magnaporthe grisea 70-15] gi|86196335|gb|EAQ70973.1| MGCH7_ch7g380 [Magnaporthe grisea 70-15]
  misc_feature (38)..(422): NCBI GI: 256730395 Blast Desc: NECHADRAFT_82851 [Nectria haematococca mpVI 77-13-4]
  misc_feature (20)..(425): NCBI GI: 39970375 Blast Desc: MGG_02654 [Magnaporthe grisea 70-15] gi|145017558|gb|EDK01921.1| MGG_02654 [Magnaporthe grisea 70-15]
  misc_feature (5)..(398): NCBI GI: 46115172 Blast Desc: FG03428.1 [Gibberella zeae PH-1]
  misc_feature: Useful for introducing or modulating the production of volatile compounds
MSSILSVFLVTTVWTGGGLVAAGAIAAWQVPGSDMDAPQVIMQDDTTGHILHSFCNSGSTPVFPGDDTAAFNLTDSNFIPMKATSLAGYGYNDDNGSVASIFYMNTKHQIVNALWRCGEGGRFIPYKDDYLNPISQSAAPPKPDTGLALVNLGADAGVRVYFEQEDNTTTILQYIPGPEIWSLSNNISRDASKQSPLSAGHTDNDKISLVSPRDTSNIEISKLNPNGTWSTYTFPTPLEAYQSESDDKYYIPTNETEPEAFKLDTDSNVTRTELEAWDGQTASIGLTFDSVDQIRRVFYIGTDSQFHCQKESTSGVWQKCPEFSPDGWPLADSPNAQFGSTYDWQHDKIWLFYVSQGKLTQAYRSRIDSWENTVVLPNSTSTANAGHRGLSTGAKAGIGVGVGVAGLALIALLAYIIMQRKKGKSEKEKAEADAEAVAATNQPPPESWPSPAPAYTSGVPGGGGAWIDGKWTPTPEPSKSAVPWSSRSSYQPVPVSPMLSSAGTPQPFQPPIHEMSNDVSYHEMPAERSETAPGK

SEQ ID NO: 38817 - DNA, 2154 bp, Muscodor strobelii
  misc_feature: SGI EST ID NO. CUFF.93460.0
  misc_feature: Variant of the nucleotide sequence at SEQ ID NO 38815
gcagatgtggttcatattataactcttcagtgcctggtgtgtctatgagagctgctctctctccttgccttgttcatgcctctctgtcgctggtccaatacctccgaaactgtcggcaagcagtgttaagtagactgctataacaacatgagctcaatcttatcggtctttctggttaccacagtatggactggaggaggacttgttgccgctggcgccattgctgcatggcaagttcctggatcagacatggatgcacctcaagtcataatgcaagatgataccacaggacatattctacatagcttttgcaacagcggcagcacaccggtctttccaggagatgatactgcggcattcaacctcacagactcgaatttcatacctatgaaagcaactagtttggcaggctatggctacaatgatgataatggatccgtggcatctatattctatatgaatacgaagcaccaaatcgttaatgctctttggcggtgcggcgaaggcggacgttttattccgtataaagacgactacttaaacccgatttctcaatcggcagcacctcccaagcccgatacaggactagccctagtgaatctgggcgcggacgctggtgtcagagtctattttgaacaagaagataatacgacgacaatattgcagtacataccaggacctgagatatggagcctgagcaataatatctcgcgagacgcctctaagcaatcgcccctcagtgcagggcatactgataacgacaagattagtctcgtcagcccacgagatactagtaacattgagatatccaagctcaatcctaacgggacctggagcacatacacttttccaacaccgttagaagcataccagagcgagtctgacgataaatactacatcccaactaacgaaacggaaccggaggccttcaaactcgatacagattctaacgtgacacgtactgaattagaagcttgggatggccagacggctagcattggactcacattcgatagcgtggatcagatacgcagagtcttctacattgggaccgactcgcagttccattgccaaaaagagtcaacaagtggcgtttggcaaaagtgtcctgagtttagtccggatggctggcctcttgcagatagcccaaacgcacagtttgggtcgacctatgattggcaacacgataagatttggctgttctacgtgagtcagggtaagctcacccaagcataccgaagtcgtatcgacagctgggagaacaccgtggtacttcctaactcaacatcaacagcgaacgcaggtcatcgtggactttccactggtgcgaaagccggcattggtgtcggtgtgggagtcgctggtcttgcactcattgccctattagcctacatcatcatgcaacgcaagaagggcaagagcgagaaggaaaaggctgaagctgacgccgaggcagttgctgctaccaatcaaccgccgccggaatcttggccctcgccggccccagcttacacttcaggggttcccggtggtggtggagcgtggatagatggaaaatggacgccgacacccgagccaagtaaaagtgcggtgccctggtcaagcaggtcgtcttaccaacccgttccagtgtcaccaatgctctcatctgcggggactcctcaaccatttcagcctcctatacacgagatgtcaaatgatgttagttatcacgagatgccagcagagcgaagcgaaactgcacctgggaagtgaaaacccaagacttgaaagatgcttggtgtgtatacggatataatatctagaaggcgtgatactggtttcaggtattctggaggttcttagtgattggaatttgatattatttcatatagtccagtctttataacattcttgggcttccgcgaccgctatctatcagcgaatctgcccaaatcgtcttattctgccttgtcactggcatgcagtctacgcgatacactctatctagctaaatgctactcatgaattagttatgatttatagccaagcgatacgactcgccgtaacacttcaacatttgatgtgattcgcgatctcgataaatgagacgccgactctatcaatggcgtatttcagctcttgagctcattccgcagaacatgcaataactaa

SEQ ID NO: 38818 - DNA, 2148 bp, Muscodor strobelii
  misc_feature: SGI cDNA ID NO. 573497
  misc_feature: Elevated expression when VOC is produced
  misc_feature: Encodes the peptide sequence at SEQ ID NO 38819
atgagtgggcaagagaagaagaagtggccattgcattggccgccgaggtctagagaggctaagaagcgaagtctaaaagtcgatcccgcagagttccagcgattctgttgcagcaaaattagcatcttccagcgcaggcggcctgaccctccccatttcgataaggatgaagatagatatttatctgaccaggaggcggcgagaaaaaatctcgataatattttgaaagcgcatgatcaagatgaggacacagtcttgcagacatcagattgtccgtggagtactgtcttgaagcagatggcggaggccgcgaggctgaaaaccaatcaacacgactctggcggctattgggaagctggaatagacatagcagaccagttcataagtatattcccagaggagttcggcttgagcgctatcaaaggcggcctgtcacttattttcgaggcatgtaagaggtaccaagagaacaggcagaaaatcatggacgcatttgagtctgttccggatgcgatagtcacgttcaatactgcatatactctcttagatcccgaagaagaggagcaggaatttctcagggcatttttcgcagagcttctcagagacttgcctcaattgatccagaaactacttggacaagagaaatggtatcaacaggctgtgtccgtcttgtcgctctatatactagaagagcaagcccttgacgatatcttgtcaagttggactaaaacaatgcagggtatcaaagagcgcgtgaaaagaatgaagatcaggacactacagaggctgggtcagaaggttgatgacttgggcgacagggtgagcttatccgagaaggagattattgccatgatcggcagttcacgagatacgttaatggatcaaatgatgaactcagtagctggtattatgacgctcttgcttgaacagcaggactcgattcattttatcatgaatcaggttcaaggtcagcaagagcttaagagtgcttccgagctcacagctaatgacgcatccgcggctgcaatgactgggttattaagagaaatgatccagaggtcggaaagagatcgacagcgagaattagttcttgagcgaagacttcaacacgaagaggaacagcacaggaaggagcagcacaaatggaatgaagagagaggtcagtttcatcgcgaactgcagcacgcacaaaggagcgaggatcagttgcgacgtgacaaacaagtgtaccgggacgaaaatgagagactccaagtctctaatcgcgaactttcccgtcagatttcctctcagtctctaaaaagcgaagaacaaagtgttatcagcaccgccccacctgtcatatcaccaatgcaacttctgcgcgcaatcggtgtgccgctaaatgccatatggcgagatttggatcgcgttgtgcagcgagccatcgcctttgacgccgattcccaagggaaggcgcaatggttgcttcagacactcgatttccaacactggatgcaggatcaaagttcttccatcctccttgccgatggcgccacgaacgatagaatcctacacgtgtcaccaatttcaggtctgtgtgctatatttacgagcgaactcgctaataaccagcctggcacaatcgcactttgcttctttgcaggactacacgttgacagcgggcgggacgccgccgatcgcatcctttacgggccagaaggcatgatgcgttgcatgattgcgcagcttcttaactcgcctctgttgacgccagatctatcatttgttacgcctggccacctcgaccactatagaacacatgacttgaaatcgctttgccatttattcgtccgtctagtcaagcaactaccaggcggaattgatgtctattgtactatcgatggcatctcgtggtacgagcagcgaccgtggctggaaggtctgaagagcatagtgggcatgttggagcatcttgccgatcaactatgcgattcgcactttggagccaccttgaaagtgttgatgacaagtcatggaataagtagggagatcgttcacagagctagagcgaccggcgccaaagtacggctttggcggcacgtgacactggccgcgggccatgtgtatcatggatcagtcaaagacataggccatatgcgaacttga

SEQ ID NO: 38819 - protein, 715 aa, Muscodor strobelii
  misc_feature: SGI Peptide ID NO. 573497
  misc_feature (20)..(705): NCBI GI: 256725915 Blast Desc: NECHADRAFT_82103 [Nectria haematococca mpVI 77-13-4]
  misc_feature (50)..(653): NCBI GI: 67522266 Blast Desc: AN1590.2 [Aspergillus nidulans FGSC A4] gi|40745141|gb|EAA64297.1| AN1590.2 [Aspergillus nidulans FGSC A4] gi|259486921|tpe|CBF85173.1| TPA: conserved [Aspergillus FGSC
  misc_feature (53)..(702): NCBI GI: 145237768 Blast Desc: An07g04490 [Aspergillus niger] gi|134076005|emb|CAK48199.1| protein product [Aspergillus niger]
  misc_feature (447)..(702): NCBI GI: 242816998 Blast Desc: TSTA_052730 [Talaromyces stipitatus ATCC 10500] gi|218713328|gb|EED12752.1| TSTA_052730 [Talaromyces stipitatus ATCC 10500]
  misc_feature (384)..(672): NCBI GI: 212544005 Blast Desc: conserved [Penicillium marneffei ATCC 18224] gi|210067064|gb|EEA21157.1| conserved [Penicillium marneffei ATCC 18224]
  misc_feature (120)..(258): NCBI GI: 242816998 Blast Desc: TSTA_052730 [Talaromyces stipitatus ATCC 10500] gi|218713328|gb|EED12752.1| TSTA_052730 [Talaromyces stipitatus ATCC 10500]
  misc_feature (449)..(678): NCBI GI: 169620734 Blast Desc: SNOG_13571 [Phaeosphaeria nodorum SN15] gi|111057898|gb|EAT79018.1| SNOG_13571 [Phaeosphaeria nodorum SN15]
  misc_feature (467)..(715): NCBI GI: 145602965 Blast Desc: [Magnaporthe grisea 70-15] gi|145011308|gb|EDJ95964.1| [Magnaporthe grisea 70-15]
  misc_feature (466)..(676): NCBI GI: 145228711 Blast Desc: An01g02260 [Aspergillus niger] gi|134054756|emb|CAK43596.1| protein product [Aspergillus niger]
  misc_feature (368)..(671): NCBI GI: 116201317 Blast Desc: [Chaetomium globosum CBS 148.51] gi|88177061|gb|EAQ84529.1| [Chaetomium globosum CBS 148.51]
  misc_feature: Useful for introducing or modulating the production of volatile compounds
MSGQEKKKWPLHWPPRSREAKKRSLKVDPAEFQRFCCSKISIFQRRRPDPPHFDKDEDRYLSDQEAARKNLDNILKAHDQDEDTVLQTSDCPWSTVLKQMAEAARLKTNQHDSGGYWEAGIDIADQFISIFPEEFGLSAIKGGLSLIFEACKRYQENRQKIMDAFESVPDAIVTFNTAYTLLDPEEEEQEFLRAFFAELLRDLPQLIQKLLGQEKWYQQAVSVLSLYILEEQALDDILSSWTKTMQGIKERVKRMKIRTLQRLGQKVDDLGDRVSLSEKEIIAMIGSSRDTLMDQMMNSVAGIMTLLLEQQDSIHFIMNQVQGQQELKSASELTANDASAAAMTGLLREMIQRSERDRQRELVLERRLQHEEEQHRKEQHKWNEERGQFHRELQHAQRSEDQLRRDKQVYRDENERLQVSNRELSRQISSQSLKSEEQSVISTAPPVISPMQLLRAIGVPLNAIWRDLDRVVQRAIAFDADSQGKAQWLLQTLDFQHWMQDQSSSILLADGATNDRILHVSPISGLCAIFTSELANNQPGTIALCFFAGLHVDSGRDAADRILYGPEGMMRCMIAQLLNSPLLTPDLSFVTPGHLDHYRTHDLKSLCHLFVRLVKQLPGGIDVYCTIDGISWYEQRPWLEGLKSIVGMLEHLADQLCDSHFGATLKVLMTSHGISREIVHRARATGAKVRLWRHVTLAAGHVYHGSVKDIGHMRT

SEQ ID NO: 38820 - DNA, 1629 bp, Muscodor strobelii
  misc_feature: SGI EST ID NO. CUFF.93380.0
  misc_feature: Variant of the nucleotide sequence at SEQ ID NO 38818
caacaggctgtgtccgtcttgtcgctctatatactagaagagcaagcccttgacgatatcttgtcaagttggactaaaacaatgcagggtatcaaagagcgcgtgaaaagaatgaagatcaggacactacagaggctgggtcagaaggttgatgacttgggcgacagggtgagcttatccgagaaggagattattgccatgatcggcagttcacgagatacgttaatggatcaaatgatgaactcagtagctggtattatgacgctcttgcttgaacagcaggactcgattcattttatcatgaatcaggttcaaggtcagcaagagcttaagagtgcttccgagctcacagctaatgacgcatccgcggctgcaatgactgggttattaagagaaatgatccagaggtcggaaagagatcgacagcgagaattagttcttgagcgaagacttcaacacgaagaggaacagcacaggaaggagcagcacaaatggaatgaagagagaggtcagtttcatcgcgaactgcagcacgcacaaaggagcgaggatcagttgcgacgtgacaaacaagtgtaccgggacgaaaatgagagactccaagtctctaatcgcgaactttcccgtcagatttcctctcagtctctaaaaagcgaagaacaaagtgttatcagcaccgccccacctgtcatatcaccaatgcaacttctgcgcgcaatcggtgtgccgctaaatgccatatggcgagatttggatcgcgttgtgcagcgagccatcgcctttgacgccgattcccaagggaaggcgcaatggttgcttcagacactcgatttccaacactggatgcaggatcaaagttcttccatcctccttgccgatggcgccacgaacgatagaatcctacacgtgtcaccaatttcaggtctgtgtgctatatttacgagcgaactcgctaataaccagcctggcacaatcgcactttgcttctttgcaggactacacgttgacagcgggcgggacgccgccgatcgcatcctttacgggccagaaggcatgatgcgttgcatgattgcgcagcttcttaactcgcctctgttgacgccagatctatcatttgttacgcctggccacctcgaccactatagaacacatgacttgaaatcgctttgccatttattcgtccgtctagtcaagcaactaccaggcggaattgatgtctattgtactatcgatggcatctcgtggtacgagcagcgaccgtggctggaaggtctgaagagcatagtgggcatgttggagcatcttgccgatcaactatgcgattcgcactttggagccaccttgaaagtgttgatgacaagtcatggaataagtagggagatcgttcacagagctagagcgaccggcgccaaagtacggctttggcggcacgtgacactggccgcgggccatgtgtatcatggatcagtcaaagacataggccatatgcgaacttgaggatgttattcataattgggaaaagcggtatagcataagtcttagctacattgttgaaataacgagtgacctaccaagtttccgggaagactagagaaggtctttgctgttcaagtgtacttcgtgatgaag

SEQ ID NO: 38821 - DNA, 3156 bp, Muscodor strobelii
  misc_feature: SGI cDNA ID NO. 573498
  misc_feature: Encodes the peptide sequence at SEQ ID NO 38822
atggcgcaagatcaccaaggtcccgataaggatgagtgctctgacacagcatccctggaatcgcaagtaaaacgcgatgtggagcaggctgcttctactacacaagcaaagacggcagataatgattcgattctctcgtctgttaaacctgagcgacgccccgttacggtgggtgtgcgttattacaattatgaagcattcacaaatcgccgctttggtgataacgaggaccacatcattgaggtacttgtcacaaaatctgacccgaaagcggaatttgaagccgagctctccagacgccgtgaaaaccggaacgaaagatctgatccaaggtcaacagccaaggtggaggactttggcaatgatcgccgtcttcaacagatcagaatccggtctcgagcagtacttcattttctttcgaccctgatagatagccaggccattgtctgggactcagttctgttctgcaggccatataaagtcttatggtattactacgatgatatgaaaaagcaattggccaagttggaaaatgatcacgatccgagcacttctctgggatctcatgttggcggcgatgatggatataactcagggccagcacaaatggatatggccaaaaaggtgtcagacatgccttttgaaagaatcgtgcagcatatgcggacatatgtcaagtttattgaggagataattggaccactatacacgaattatcgggagtcaatactgagttcccggaagatcagatatgaagacatcccgtttctattccagccaggccagctggttttctatagacctgagcttcccaaaggtcatattctccaccgttcggccgtgcaggaagtctggagactggcagaatgcgttccaagggatcacccgaatatatactattcggaggacagtggtagcacacgctggaggctgtattatcttgattttgacggcgataagatagtgcccatcttttccatagtgagattcaaggtctttgatggcgacaaggacattaccaagctggaatgctttccgctcgaattccatacgaactacaaatcaatcctgaaagagcagatagagataggtcacgccttcaagagggctatccggggaaaagtacagttctacgctggatggacatttgtaacgggcctgcgggcggagtctttgaaggatgacaaaggtgccagcattacctactcggagtacattgagagtgacatcatcatcgacttcaaagaaacaattcgagcttttcccgaatggcagtctgattcggaggatttcgggttttccttaggaacttttagctgcgaagtgaatactcgggcgccccagcttcgattatggatggaagaccccaagctgtcaccagtagaagaggacgaagggctgcttgtacgagaagacagcttatatgagaacgagtcgagccaatactcgtctcaagatccatttcttcagcaagatgctgccctcggtacctatcaatggcaggacgaggaaatagcgttgttaacgaagagaatattcggctacattttgagggaaagaaggtttgcgagactcgatgtccgaggaattcactgggacaacaagcaaactaaaataacgctgaacgacatccagatggacggcaaaaaacgagaaatcatcaaatcggccgtcaaatctcatttcaaggcccagaagcaagagaaggagctcaacatcccaacattcaatcttgatgccattattggcaagggcagaggtcttacaattctgctccacggcgcacccggagttggcaagacagctacagcggaagctgtcgcaagggaatttgataagccattgtttcccatcacgtgtggggaccttggcaccaaacctgagacagtagataagacacttcgcgatattttccgatacgctcaccaatgggagtgcattctccttttcgacgaggccgatatctttcttactcagcgagagcgtagtagtatagagcgcaatgctctagtcggagtatttctcagggttctagaatactacaggggcgtcctgtttttgactactaacagggttggatctctcgacgaagcctttcggtcgcgtgtacatatcagtctatggtatccacatttgacggccgatcaatcggttaatgttctaaatagttgcctcgatagattgccccaaccaagcgaatctgggcaaaagcgccaatacggtgagctcatagtagcgcaagaggagattgaggatttcgttagagaagagtacaataggtactctcgggctatgggtgtaaatcgaggaccttggaacggtcgtcaaatccgcaatgctgtgcagattgccgcgtgtctggcgctataccagaaggaaactgcaaaggtcaaggatggtaagccagcgatccttacagcaagccagtttagatccgttgggcaaactacgagtgatttcgaaagctttctcaaaaaggcgagagtcggagatgattcctattgggcccgtcagcgcaatgaccgcgatgatgactggaacgccgctagtgataatggtgacgactcttacgattacaagagtgaagaggacacaaggccaccatataagtcaacacagcagagagatggtcggtttatgaagagccaagcttctgccgaaacacagttccgttcatccgtcggtcgtcgagaaactataatgccgcaagaggcgtctgtgacccgcagaggaccgaccaatctaacatcagccagctcatcgcgccgccccgcccaaagagaatactaccgagaagacaagagatcaaatgttgcttataatgcatatgacgatgagagcccgatcatcgctaagagccatggatcacccgagcgagtgatgggcgttggcagccctcgaagagagagtaacaggagagcaccgccccggccgcgtgttgctgctgacaaccaggtctccaacctctctcgcgatagctgggcagaagaggaagacgaagatcatctaggagagtgggcacaagatgaggatgctatccgaaggtctcaaaggggtccattgacccctactagggatcgatcttatgagtttagagagaatgaagaggcgcaattcaattcgagtagtaggaaagatcagcgaaggagaatttag

SEQ ID NO: 38822 - protein, 1051 aa, Muscodor strobelii
  misc_feature: SGI Peptide ID NO. 573498
  misc_feature (589)..(763): Pfam Id: PF00004 Pfam Desc: ATPase family associated with various cellular activities (AAA)
  misc_feature (589)..(702): Pfam Id: PF00004 Pfam Desc: ATPase family associated with various cellular activities (AAA)
  misc_feature (69)..(846): NCBI GI: 256726318 Blast Desc: NECHADRAFT_43342 [Nectria haematococca mpVI 77-13-4]
  misc_feature (39)..(1019): NCBI GI: 145237766 Blast Desc: An07g04480 [Aspergillus niger] gi|134076004|emb|CAK48198.1| protein product [Aspergillus niger]
  misc_feature (69)..(977): NCBI GI: 67522268 Blast Desc: AN1591.2 [Aspergillus nidulans FGSC A4] gi|40745142|gb|EAA64298.1| AN1591.2 [Aspergillus nidulans FGSC A4] gi|259486922|tpe|CBF85175.1| TPA: conserved [Aspergillus FGSC
  misc_feature (53)..(826): NCBI GI: 46114954 Blast Desc: FG03319.1 [Gibberella zeae PH-1]
  misc_feature (50)..(842): NCBI GI: 116203341 Blast Desc: CHGG_09555 [Chaetomium globosum CBS 148.51] gi|88178073|gb|EAQ85541.1| CHGG_09555 [Chaetomium globosum CBS 148.51]
  misc_feature (53)..(826): NCBI GI: 256724231 Blast Desc: [Nectria haematococca mpVI 77-13-4]
  misc_feature (54)..(853): NCBI GI: 171681389 Blast Desc: protein product [Podospora anserina] gi|170940653|emb|CAP65881.1| protein product [Podospora anserina]
  misc_feature (59)..(788): NCBI GI: 256725321 Blast Desc: NECHADRAFT_45867 [Nectria haematococca mpVI 77-13-4]
  misc_feature (51)..(859): NCBI GI: 119467011 Blast Desc: AAA family ATPase, [Neosartorya fischeri NRRL 181] gi|119405464|gb|EAW15415.1| AAA family ATPase, [Neosartorya fischeri NRRL 181]
  misc_feature (36)..(834): NCBI GI: 67526315 Blast Desc: AN3615.2 [Aspergillus nidulans FGSC A4] gi|40740633|gb|EAA59823.1| AN3615.2 [Aspergillus nidulans FGSC A4] gi|259481858|tpe|CBF75772.1| TPA: conserved [Aspergillus FGSC
MAQDHQGPDKDECSDTASLESQVKRDVEQAASTTQAKTADNDSILSSVKPERRPVTVGVRYYNYEAFTNRRFGDNEDHIIEVLVTKSDPKAEFEAELSRRRENRNERSDPRSTAKVEDFGNDRRLQQIRIRSRAVLHFLSTLIDSQAIVWDSVLFCRPYKVLWYYYDDMKKQLAKLENDHDPSTSLGSHVGGDDGYNSGPAQMDMAKKVSDMPFERIVQHMRTYVKFIEEIIGPLYTNYRESILSSRKIRYEDIPFLFQPGQLVFYRPELPKGHILHRSAVQEVWRLAECVPRDHPNIYYSEDSGSTRWRLYYLDFDGDKIVPIFSIVRFKVFDGDKDITKLECFPLEFHTNYKSILKEQIEIGHAFKRAIRGKVQFYAGWTFVTGLRAESLKDDKGASITYSEYIESDIIIDFKETIRAFPEWQSDSEDFGFSLGTFSCEVNTRAPQLRLWMEDPKLSPVEEDEGLLVREDSLYENESSQYSSQDPFLQQDAALGTYQWQDEEIALLTKRIFGYILRERRFARLDVRGIHWDNKQTKITLNDIQMDGKKREIIKSAVKSHFKAQKQEKELNIPTFNLDAIIGKGRGLTILLHGAPGVGKTATAEAVAREFDKPLFPITCGDLGTKPETVDKTLRDIFRYAHQWECILLFDEADIFLTQRERSSIERNALVGVFLRVLEYYRGVLFLTTNRVGSLDEAFRSRVHISLWYPHLTADQSVNVLNSCLDRLPQPSESGQKRQYGELIVAQEEIEDFVREEYNRYSRAMGVNRGPWNGRQIRNAVQIAACLALYQKETAKVKDGKPAILTASQFRSVGQTTSDFESFLKKARVGDDSYWARQRNDRDDDWNAASDNGDDSYDYKSEEDTRPPYKSTQQRDGRFMKSQASAETQFRSSVGRRETIMPQEASVTRRGPTNLTSASSSRRPAQREYYREDKRSNVAYNAYDDESPIIAKSHGSPERVMGVGSPRRESNRRAPPRPRVAADNQVSNLSRDSWAEEEDEDHLGEWAQDEDAIRRSQRGPLTPTRDRSYEFRENEEAQFNSSSRKDQRRRI

SEQ ID NO: 38823 - DNA, 1371 bp, Muscodor strobelii
  misc_feature: SGI cDNA ID NO. 573499
  misc_feature: Encodes the peptide sequence at SEQ ID NO 38824
atgtcgatagacctgaactgggagacactgacgggcgggcctgacggcgaggccttagcagagcgcatccgcgacttcatacacgtgaaattccaatcggtgccgctcccgcggttcatcaagtctgtgacggtacatcagtttgactttggggctataccgccgagcatagtgcttaaggacttgtgtgatccgctgccggatttctacgaagaggattatgaggagagtgatgatgaagcgacggaggatggcgatggggaggaagatgttcctgatgcgattagagctgcggagcgcagacggagggctgagttgagggccatgggtgagcggcaggggagtgggagtgatgggtttttcccaccgcatgtacacgcgggtctgagaacacccggcactccggacctgaataatccgttttcgggcctcggcgcatcgacacctgggattccaggaggtccgtcgacaatgcattatttccagtcaaaacttggaccggcatggagcgggacgcagactccgcttgctgcggttgcgggggcgcagcaactgagcagttggatggattcgcagagtcgtgcctcgcccagcagcagacatgcgggctcgaattcgggacatggaagacatttctcgcagagctcgattgttagcgtggagaatttcccagcgggtagtgggagtcttgcgacgcctgtgcatacgttgagggagaaacatagtgttagtacgcttgcgcctacgagtgccgggaccagcagaccgccgactagggatatggcggggagtgcggcgttgcttgcgggcagtgcgattgatgaggagatggatgaggctgcgactggagatggagagtgcgagggggaggatggaaagacgtttagacatgagccgaggcctgatgatatgcaggctgtgtttcggatcaagtatgctggcgatgtgaggcttaagcttacggcggagatactgctggattatcctatgccgagcttcgtgggtattccggttaagctgaatatcaccggtctgacgtttgatggggtgggagtcgtggcatatatcaggaaacgggttcacttttgttttctgagccctgaggatgcactggctgctgttggcgatgataccagcgaaggggaggacgggatagagggggacgatgaagataaaacgtcgggcagaggaaagggtcgcttgggaggcttgctgcaggagatcagggttgagagtgagatcgggcagagagagggcatgaagcagagtctgaagaatgtcgggaaggtagagaaattcgtgcttgagcaggttagaaggatctttgaggaggagttcgtgtacccgagtttctggactttcttagtttag

SEQ ID NO: 38824 - protein, 456 aa, Muscodor strobelii
  misc_feature: SGI Peptide ID NO. 573499
  misc_feature (1)..(456): NCBI GI: 261355329 Blast Desc: mitochondrial inheritance component mdm12 [Verticillium albo-atrum VaMs.102]
  misc_feature (1)..(456): NCBI GI: 259495611 Blast Desc: mitochondrial inheritance component mdm12 [Verticillium albo-atrum VaMs.102]
  misc_feature (1)..(456): NCBI GI: 46105324 Blast Desc: FG00290.1 [Gibberella zeae PH-1]
  misc_feature (1)..(456): NCBI GI: 39953854 Blast Desc: MGG_08869 [Magnaporthe grisea 70-15] gi|259495515|sp|A4RM00.1|MDM12_MAGGR RecName: Full=Mitochondrial distribution and morphology protein 12; AltName: inheritance
  misc_feature (1)..(456): NCBI GI: 156054582 Blast Desc: SS1G_06139 [Sclerotinia sclerotiorum 1980] gi|259495537|sp|A7ELE2.1|MDM12_SCLS1 RecName: Full=Mitochondrial distribution and morphology protein 12; AltName: inheritance
  misc_feature (1)..(456): NCBI GI: 154320993 Blast Desc: BC1G_01371 [Botryotinia fuckeliana B05.10] gi|259495506|sp|A6RLP9.1|MDM12_BOTFB RecName: Full=Mitochondrial distribution and morphology protein 12; AltName: inheritance
  misc_feature (1)..(456): NCBI GI: 171695186 Blast Desc: protein product [Podospora anserina] gi|259495533|sp|B2AA87.1|MDM12_PODAN RecName: Full=Mitochondrial distribution and morphology protein 12; AltName: inheritance
  misc_feature (1)..(437): NCBI GI: 116182258 Blast Desc: CHGG_01757 [Chaetomium globosum CBS 148.51] gi|88186054|gb|EAQ93522.1| CHGG_01757 [Chaetomium globosum CBS 148.51]
  misc_feature (1)..(456): NCBI GI: 70996186 Blast Desc: mitochondrial inheritance component mdm12 [Aspergillus fumigatus Af293] gi|74672267|sp|Q4WRX2.1|MDM12_ASPFU RecName: Full=Mitochondrial distribution and morphology protein 12; mdm12
  misc_feature (1)..(456): NCBI GI: 121701027 Blast Desc: mitochondrial inheritance component mdm12 [Aspergillus clavatus NRRL 1] gi|259495502|sp|A1CNY1.1|MDM12_ASPCL RecName: Full=Mitochondrial distribution and morphology protein 12; mdm12
MSIDLNWETLTGGPDGEALAERIRDFIHVKFQSVPLPRFIKSVTVHQFDFGAIPPSIVLKDLCDPLPDFYEEDYEESDDEATEDGDGEEDVPDAIRAAERRRRAELRAMGERQGSGSDGFFPPHVHAGLRTPGTPDLNNPFSGLGASTPGIPGGPSTMHYFQSKLGPAWSGTQTPLAAVAGAQQLSSWMDSQSRASPSSRHAGSNSGHGRHFSQSSIVSVENFPAGSGSLATPVHTLREKHSVSTLAPTSAGTSRPPTRDMAGSAALLAGSAIDEEMDEAATGDGECEGEDGKTFRHEPRPDDMQAVFRIKYAGDVRLKLTAEILLDYPMPSFVGIPVKLNITGLTFDGVGVVAYIRKRVHFCFLSPEDALAAVGDDTSEGEDGIEGDDEDKTSGRGKGRLGGLLQEIRVESEIGQREGMKQSLKNVGKVEKFVLEQVRRIFEEEFVYPSFWTFLV

SEQ ID NO: 38825 - DNA, 1632 bp, Muscodor strobelii
  misc_feature: SGI EST ID NO. CUFF.93382.0
  misc_feature: Variant of the nucleotide sequence at SEQ ID NO 38823
caaacgaacaacatctgtccaggactcattcattgacaccgtcgttatcatatatgtctatagccgctgtgatacatattacttcacgcatgcatgagaaccactacaatcattcgcatcgcgttccaataaactcgatctcaattgcgtctcaagcccttgagctagagccatgagcgcagcatgtcgatagacctgaactgggagacactgacgggcgggcctgacggcgaggccttagcagagcgcatccgcgacttcatacacgtgaaattccaatcggtgccgctcccgcggttcatcaagtctgtgacggtacatcagtttgactttggggctataccgccgagcatagtgcttaaggacttgtgtgatccgctgccggatttctacgaagaggattatgaggagagtgatgatgaagcgacggaggatggcgatggggaggaagatgttcctgatgcgattagagctgcggagcgcagacggagggctgagttgagggccatgggtgagcggcaggggagtgggagtgatgggtttttcccaccgcatgtacacgcgggtctgagaacacccggcactccggacctgaataatccgttttcgggcctcggcgcatcgacacctgggattccaggaggtccgtcgacaatgcattatttccagtcaaaacttggaccggcatggagcgggacgcagactccgcttgctgcggttgcgggggcgcagcaactgagcagttggatggattcgcagagtcgtgcctcgcccagcagcagacatgcgggctcgaattcgggacatggaagacatttctcgcagagctcgattgttagcgtggagaatttcccagcgggtagtgggagtcttgcgacgcctgtgcatacgttgagggagaaacatagtgttagtacgcttgcgcctacgagtgccgggaccagcagaccgccgactagggatatggcggggagtgcggcgttgcttgcgggcagtgcgattgatgaggagatggatgaggctgcgactggagatggagagtgcgagggggaggatggaaagacgtttagacatgagccgaggcctgatgatatgcaggctgtgtttcggatcaagtatgctggcgatgtgaggcttaagcttacggcggagatactgctggattatcctatgccgagcttcgtgggtattccggttaagctgaatatcaccggtctgacgtttgatggggtgggagtcgtggcatatatcaggaaacgggttcacttttgttttctgagccctgaggatgcactggctgctgttggcgatgataccagcgaaggggaggacgggatagagggggacgatgaagataaaacgtcgggcagaggaaagggtcgcttgggaggcttgctgcaggagatcagggttgagagtgagatcgggcagagagagggcatgaagcagagtctgaagaatgtcgggaaggtagagaaattcgtgcttgagcaggttagaaggatctttgaggaggagttcgtgtacccgagtttctggactttcttagtttagaatacacgctcgtgtgactcactgttggttcgcctaacagatctatgcagtcttgcgtccatttgaagtgatgcgata

SEQ ID NO: 38826 - DNA, 7497 bp, Muscodor strobelii
  misc_feature: SGI cDNA ID NO. 573500
  misc_feature: Encodes the peptide sequence at SEQ ID NO 38827
atgtcggataacacgcactctcctgctcccatgtctcccgcgagcctgctctcgcccagagacaggcagcggcgactctcaacaacctctagtagctcccaactgccccaagtcgacaaggaacacctcgcccaagccctcgacaagatccatacgtcctccaaagagcagagcgtgctcaccaccttccatgacctcggcccgccccccgattccgttgctgccaccgagggcaaagggttcgccggagatctcgtccagaatggcttcagtggcctgtattccaggttcaaggaggcagtgggtgtgagtgggaaagagagagctgctgccccaccgagtctggagagctcgtcctcggctaccatagacatggcgtccaagaagcctgcgaacaccaccccgagaccgtctctcggcggcgtcgtgtccccgctacttcgcttggacacgggtgcaacacactcgacgttgcagtcgaccacctccgatcctattgtccctaccctcgcagcctcttcctcgcagttgggcactgagactcagatgcaacaatcctattctaacaagccctcatccaccaccaacgtggccagcactgcctcctccaagtctgcttcatccagccgacaaagcatccccgcaatgataaagccaacagggtctctggccacagccaacattagtagtgtcaatgtcttcagagacaactctcggccaaactcttctcgcgtcgaagctgggcctggcactgttcgaggtacgcggagggagagtttcagcaaattaggagatgggcagtctagcgtacccataggccaaggggagagcttggcttcatcacatttggagaaaagcgctgtctcggcccgtccccgtcgcgaagaaattcgcagtggagatggtatctcggactcgcctgtaaatccttctgtctcggcagggcagcccgttctcagccctaccatccctcagataactacatcagaatcgagtttacttgcaccgcaaaccaggccgtctgcacggcccatgactcggcgtccggccatcattgaccgtatcagtcagtctcggggatcagggagtctttcaaggtcttcctccctttcgcgagggactgccgagccaagtcccatcaacacctctgttcatgctcatcataatgttcgccatgaatccttcggtctgggcggccaacacgagcgaacccagtctggggactaccgcatccccggaacgacaatggatgagggtgctcccgaggccgtcaatgcgaagctcgagtcaatgcggaagcaagtactcagcaagcagttctggatgtccgacgaaacctgcaaagaatgctttctatgtggctcaccattcacggcttttcgtcggaagcatcattgtagaacttgcggctgcatatttgacagccggtgcacgtcgataatttcgggtcagcggtttggtgtacaaggtactcttcgcgtctgcaagacctgcctgggcatcattctacaaagacaggatgggaatgtgtcagacgaatcggcagacgatactttcttgccaatgttccgccctaatcagcctcgaccaaccacgtcctcgtcgggactgaagcacgtccgtgatgagggtccccccgaacgagcaagtgagactaacgaccacaatcgatctatgatcactccgatgatggccattcctgcaacaaagaggattggagaatcgtccaatcgtaattccgcgattcttgaaatcgaaacgccacagcttagccgaccaagctcttcaagatccttgcgatctatcacatccggtcgcccacagtcgtcaggccataggcgtcagcattcgcagaaacacaatttatggaaccgtttaaaaccccccgctatcgaaagagcgccatttcgaaagtcggccacggaagaaagctccagaaagcctggcctctctgcctttcatgatgacaacgtcatagaccctgatttggccgcatacatgtcagatgagtcgagtgaggatgaacaaatgagtattatgggagtagttaccggaaatgagcatcctgcatcgaatattgagcaagaaaaatctaatttcggcccgtacctcggagcaggccggaggattcgcaacagggcgcaagcggacaagagcatcagcgggttcagctacaacagtcgtggcgttgatgagtaccatcctcgctcatcgagacgtcggaatctcagcacaactacaagtggacaacaggtctaccacatgcgctcaccccgcccgaggactgcgaccatgaaaggaggaccgtctgggtcaaacgagacgcttccctactttgattcgatcgtagcgtctagcgctcctcgcatgacgcgaagctcgtctatgaggggtgcaaaagagcctcgcctggagttgaatccggccagcatgatgcacgtccgcaaactcctccatcaactacttcttgattccgaaattccgcatgtcaatgcctgggaaaaggctttgatccccattttactcaagtgcacatcgtcagtagatcccgatattgaccgcggtgatgacatagatattcgacattatgtcaaattaaagaaaattcccggcggaaaaccaagtgatacaagctatgtccctggagtcattttcaccaaaaagctagcattgaaaagcatgccacgccgaatgagcaacccacgagttgttattatctcatttccaatagaatatcaacggcaccagcaccatttcatgagtcttcaaccagtcatcgagcaagaaaaggagtaccttaaacaattggtgaaccggcttattgcgctacgtcctcagctgctattgacggaaaagagtgtgtctggtgttgcacttcaaatgctatccgacgcgaagattgcagtagcatacaacgtgaaaccatccgtgctctcagctgtatcaagatgcttggaaacagagatcatctcgtctgtggatatgctggccctccctcctcaccagttccagaccggcaagagtactggatttgaagtgaagactttcgtcaacgaaagcattcctggccgaaagaagacttacatcttcttatctagcaatcaagaagagctcggttgtaccatcgctctccgcggagcaccgactgcagtccttgcgaggttgaagcatattactgaattcatggtgtacgtggtatacaacttgaaactagaatcatgcttgatgcgagattctttcatccaacttccaacaagcgaggacttgagcagaaactcaacccagcccttcgaggagaatgggccgatcaacggactcacgggtattgatacagcagaacagcgccagagaacattctctaccatgacgctagacgaccaacctgctgaagaatcggcgcagtcaagaccggaaattggtgagactagagagcaccaggcacaacttgttgatcctcagaagagactcatctcgctacatgagactcacgcgtcacatgacagcctcagtccaggagatgatgcgcctatgccaacgttctacagtgacatggtagccaagtacgaaacaaaggtcctatctgcttcgccatttgtcaaatttgctcagccttacctactcatgaaggcgagagagcaagaacgcaggcttggtcacttgaaacgacttcgagaccaggatatcatcgaagaacgggatgaagatgagaagccgaagccccagaaatttcaattaatcaaaccagaaatggtgcatcagactggccagaaggccccacgacaaattatggaagtgctacacgctgtccatgacgctgagtacgacaaagccctctacatctatcagacgcaaacaaagtcgtgggaaaactatattcaagggaacctagacttgtttgatccctatgcacaccagaatattgtcgttttacactcagtaatatgcacggaaacgaagataccttgcgtcgaaccccagctcattgctcttgggttctatgacgagcatacggatcataataacgagatggatccagactgtactctggggcaatatatagaagatgtctgttatggcgcagattctctgtgtacggcgaacagctgtgacagaaagatgcacgagcatcatcggacctacgttcatggcgaagctcggataacgattttcatcgagcttgaagctaagagtaaagctcggaatgatggtatcatgatgtggagctattgcaagctgtgccaacgtgaaacaagcgagatggaaatgtcacgtgcaacttggaaatattcgttcggcaaataccttgaactttcgttctggagcagaggcactcatcttatcagggacgaaagcctgggtggctggaattgccctcacgaccatcatcgagatcatatcagatatttcggcctcggcgacaagatcataagaattcactacgaccctattgacctattggaaatcattgtaccccgtgccaggatcacatggaaagtcgagcatgatctgaatatgaaaaatgccatctttacacattgccaagacagatggacaagatttacggcttctgtgaaagccaggctaaaagcaatcaaattagacaatatcgctccggaaaaggcggactcttgcaaaacggaaatcgaacgtctgaacaagaaaatacaagacgaacacacttcccttgtccgaaaacttcaagagaaatacatgagctcgagatactacgaggtcatacctttcaacattgtccttcgtgagatgctagtcaaggtcgctgagtgggatgttgcgtttacaaaattcgaagccgacttcatgccgactgacaaagatctccgtcgaatcacaatgattcaactgcgcaagatgttcacggacgagtcgaaagaatctttgtctagcatcgaaacttccacggaggcatctacaactcaagaaaaggacagccagcagacgctttcggagggtgattctaaagaagaaattcagctcaccgaggtcacacctgacatttcacagccagactcggtgggggaaaagctcacgcgtgttatttcacctcaggaagcgactctcgcctctgcgcccgaagcaactctggaacgagtcgaaccattggatctagccacttctcagtcacctagtgtagctgccacaccgttcgatcaagttcgagagcttgtgccaaatcccgtaccattctcgcaacctgagagtactttagagtcccctgtcaccccggggccgggaaatatcagcccagtgatcagcagaaactcgcagatgtctatttcagagcacgtggaacagcttcaccgtcggcaaaacagtatgaatgcagaaaattttggtcgtcctgttagtcaagagaccacggaccatggagccgattctcccggctctccgaaggtggttattgagcgcggttcttctcgtagggcgggattgaacgtctcgccacctatgattcgtgctatctcaactccggcgaaccacttaccaactttgccacgtactaactctgcaattggcaagaaggcttttgttctaaataaggatagggataaaaccccaaccgtagaaacaccgtcgggtagtgaccttcgaaaggcgcccacaaacgaatcaattaagagtgacaagaagctttttagcctcaaaaatcgcaaagggactgcgtcttcaattcctgttttcgtgggaaagaaagagtcgagagtttcaagagtctctacaattcgcaaacattttgaacaactaagccgtgagttcgagaaggaacgcgaaaaggacaggaaaaagcgtgcagcgaaaatgaccaattctcggcccttcctacagcattcgagaaccaaggccattgtggaagtctaccaggatattcgtgatgcagtgcaagagcccagtcctgtcgaagatgagccagcagtcgacaaggatataggcgccgtgagttcacccgccgcagtcggcccaggttcgactacagtcaaagaggccgagattccacaggagccaccgcacacacctcgatcaccagttgagacgcaagatcgcagcaaagaagccgctgagcctgaaacggacgaccaaaccctgaccaccagtgttggtgctactgatgacgagcaaggcgatagtgatacggagaattctctacttgatggcagtacccttgaagaaatcgctgattctctaggctcaagcacggagattccactagaacttcctaaacatgatagaatgaattttatgaaggcgctgtccaatttttggaatgaacgctcagcaagtcaatggccgcccttagactatcccctgggtccctcagatcacatcttcattgactctgatatcatcgttcgcgaagatgaacctagctcggtcatcgctttcgcattaagttccgaggattacaagcagaaacttcgacgattccaccgcagaaagcctggccagatgacgcagccttcttcagacactgaagatcacgttatgactgacagtaatccatacttatctgaagaccagatcactgaagatcgacttgagaccagcctagttcacaccacgagcagccactataaatatcagtttagcgaaggttcggctagaatgctcgttaagatcttctatgcagagcagttcgacgcgctccgacggaaatgcggagtgtctgatcgcatcattgaatcgttatcccgttgtgttccatgggactcaaaaggcggaaagacaaaatcagtgttccttaagacacaagacgaccgcttagtgatgaaatcactgtcacagattgagactcaggcattcttgaaattcgccccggcgtattttagtataatggctgaggcgctgttccatgatttaccttctgttatcgcgaagatgcttgggttcttccaggttgtcatcaaaaatccattgacaaatacggaaatcaggctcgatctcctcttgatggaaaatctgttctatgatcgcgaacccacgcgcatttttgacctcaagggctccatgaggaatcgaaaaatccagtcgacaggcgagcaaaatgaggttctgctggatgagaacatggttgagtacatctacgaatctccattgttcgcaagggaacattcgaagaagctactgagggcgtcagtctttaacgatacactattcttggcgcgacaaaacgtaatggactactctctcatgatcgctgttgacgaggcaaagaaagagctcgtggtgggcataatcgactgcattcgcacctacacatgggacaagaagcttgagagttggatcaaggatcgcggatttgccggcggcaatagaaatagaccgactgtaactagtccgaaggaatacaagtcgcgatttcgcgaggctatggcaagatacattctccaagcgccaaattgctggaaccaattcaatgcatctctcttagctggccgtcgcgacgctggcgacgatactatgatcacggagaatgctctgtaa

SEQ ID NO: 38827 - protein, 2498 aa, Muscodor strobelii
  misc_feature: SGI Peptide ID NO. 573500
  misc_feature (439)..(504): Pfam Id: PF01363 Pfam Desc: FYVE zinc finger
  misc_feature (2232)..(2466): Pfam Id: PF01504 Pfam Desc: Phosphatidylinositol-4-phosphate 5-Kinase
  misc_feature (830)..(914): Pfam Id: PF00118 Pfam Desc: TCP-1/cpn60 chaperonin family
  misc_feature (439)..(498): Pfam Id: PF01363 Pfam Desc: FYVE zinc finger
  misc_feature (2232)..(2406): Pfam Id: PF01504 Pfam Desc: Phosphatidylinositol-4-phosphate 5-Kinase
  misc_feature (2412)..(2466): Pfam Id: PF01504 Pfam Desc: Phosphatidylinositol-4-phosphate 5-Kinase
  misc_feature (2)..(2466): NCBI GI: 171695088 Blast Desc: protein product [Podospora anserina] gi|170947786|emb|CAP59949.1| protein product [Podospora anserina]
  misc_feature (10)..(2482): NCBI GI: 261355330 Blast Desc: 1-phosphatidylinositol-3-phosphate 5-kinase FAB1 [Verticillium albo-atrum VaMs.102]
  misc_feature (22)..(2465): NCBI GI: 256735529 Blast Desc: [Nectria haematococca mpVI 77-13-4]
  misc_feature (42)..(2464): NCBI GI: 46105324 Blast Desc: FG00290.1 [Gibberella zeae PH-1]
  misc_feature (19)..(2480): NCBI GI: 85113934 Blast Desc: NCU02083 [Neurospora crassa OR74A] gi|28926398|gb|EAA35374.1| conserved [Neurospora crassa OR74A]
  misc_feature (86)..(2452): NCBI GI: 154322242 Blast Desc: BC1G_01268 [Botryotinia fuckeliana B05.10] gi|150850515|gb|EDN25708.1| BC1G_01268 [Botryotinia fuckeliana B05.10]
  misc_feature (676)..(2468): NCBI GI: 116182104 Blast Desc: CHGG_01680 [Chaetomium globosum CBS 148.51] gi|88185977|gb|EAQ93445.1| CHGG_01680 [Chaetomium globosum CBS 148.51]
  misc_feature (274)..(2470): NCBI GI: 159124197 Blast Desc: 1-phosphatidylinositol-3-phosphate 5-kinase (Fab1), [Aspergillus fumigatus A1163]
  misc_feature (274)..(2470): NCBI GI: 70991577 Blast Desc: 1-phosphatidylinositol-3-phosphate 5-kinase (Fab1) [Aspergillus fumigatus Af293] gi|66848270|gb|EAL88599.1| 1-phosphatidylinositol-3-phosphate 5-kinase (Fab1), [Aspergillus
  misc_feature (347)..(2477): NCBI GI: 239608481 Blast Desc: 1-phosphatidylinositol-3-phosphate 5-kinase [Ajellomyces dermatitidis ER-3]
MSDNTHSPAPMSPASLLSPRDRQRRLSTTSSSSQLPQVDKEHLAQALDKIHTSSKEQSVLTTFHDLGPPPDSVAATEGKGFAGDLVQNGFSGLYSRFKEAVGVSGKERAAAPPSLESSSSATIDMASKKPANTTPRPSLGGVVSPLLRLDTGATHSTLQSTTSDPIVPTLAASSSQLGTETQMQQSYSNKPSSTTNVASTASSKSASSSRQSIPAMIKPTGSLATANISSVNVFRDNSRPNSSRVEAGPGTVRGTRRESFSKLGDGQSSVPIGQGESLASSHLEKSAVSARPRREEIRSGDGISDSPVNPSVSAGQPVLSPTIPQITTSESSLLAPQTRPSARPMTRRPAIIDRISQSRGSGSLSRSSSLSRGTAEPSPINTSVHAHHNVRHESFGLGGQHERTQSGDYRIPGTTMDEGAPEAVNAKLESMRKQVLSKQFWMSDETCKECFLCGSPFTAFRRKHHCRTCGCIFDSRCTSIISGQRFGVQGTLRVCKTCLGIILQRQDGNVSDESADDTFLPMFRPNQPRPTTSSSGLKHVRDEGPPERASETNDHNRSMITPMMAIPATKRIGESSNRNSAILEIETPQLSRPSSSRSLRSITSGRPQSSGHRRQHSQKHNLWNRLKPPAIERAPFRKSATEESSRKPGLSAFHDDNVIDPDLAAYMSDESSEDEQMSIMGVVTGNEHPASNIEQEKSNFGPYLGAGRRIRNRAQADKSISGFSYNSRGVDEYHPRSSRRRNLSTTTSGQQVYHMRSPRPRTATMKGGPSGSNETLPYFDSIVASSAPRMTRSSSMRGAKEPRLELNPASMMHVRKLLHQLLLDSEIPHVNAWEKALIPILLKCTSSVDPDIDRGDDIDIRHYVKLKKIPGGKPSDTSYVPGVIFTKKLALKSMPRRMSNPRVVIISFPIEYQRHQHHFMSLQPVIEQEKEYLKQLVNRLIALRPQLLLTEKSVSGVALQMLSDAKIAVAYNVKPSVLSAVSRCLETEIISSVDMLALPPHQFQTGKSTGFEVKTFVNESIPGRKKTYIFLSSNQEELGCTIALRGAPTAVLARLKHITEFMVYVVYNLKLESCLMRDSFIQLPTSEDLSRNSTQPFEENGPINGLTGIDTAEQRQRTFSTMTLDDQPAEESAQSRPEIGETREHQAQLVDPQKRLISLHETHASHDSLSPGDDAPMPTFYSDMVAKYETKVLSASPFVKFAQPYLLMKAREQERRLGHLKRLRDQDIIEERDEDEKPKPQKFQLIKPEMVHQTGQKAPRQIMEVLHAVHDAEYDKALYIYQTQTKSWENYIQGNLDLFDPYAHQNIVVLHSVICTETKIPCVEPQLIALGFYDEHTDHNNEMDPDCTLGQYIEDVCYGADSLCTANSCDRKMHEHHRTYVHGEARITIFIELEAKSKARNDGIMMWSYCKLCQRETSEMEMSRATWKYSFGKYLELSFWSRGTHLIRDESLGGWNCPHDHHRDHIRYFGLGDKIIRIHYDPIDLLEIIVPRARITWKVEHDLNMKNAIFTHCQDRWTRFTASVKARLKAIKLDNIAPEKADSCKTEIERLNKKIQDEHTSLVRKLQEKYMSSRYYEVIPFNIVLREMLVKVAEWDVAFTKFEADFMPTDKDLRRITMIQLRKMFTDESKESLSSIETSTEASTTQEKDSQQTLSEGDSKEEIQLTEVTPDISQPDSVGEKLTRVISPQEATLASAPEATLERVEPLDLATSQSPSVAATPFDQVRELVPNPVPFSQPESTLESPVTPGPGNISPVISRNSQMSISEHVEQLHRRQNSMNAENFGRPVSQETTDHGADSPGSPKVVIERGSSRRAGLNVSPPMIRAISTPANHLPTLPRTNSAIGKKAFVLNKDRDKTPTVETPSGSDLRKAPTNESIKSDKKLFSLKNRKGTASSIPVFVGKKESRVSRVSTIRKHFEQLSREFEKEREKDRKKRAAKMTNSRPFLQHSRTKAIVEVYQDIRDAVQEPSPVEDEPAVDKDIGAVSSPAAVGPGSTTVKEAEIPQEPPHTPRSPVETQDRSKEAAEPETDDQTLTTSVGATDDEQGDSDTENSLLDGSTLEEIADSLGSSTEIPLELPKHDRMNFMKALSNFWNERSASQWPPLDYPLGPSDHIFIDSDIIVREDEPSSVIAFALSSEDYKQKLRRFHRRKPGQMTQPSSDTEDHVMTDSNPYLSEDQITEDRLETSLVHTTSSHYKYQFSEGSARMLVKIFYAEQFDALRRKCGVSDRIIESLSRCVPWDSKGGKTKSVFLKTQDDRLVMKSLSQIETQAFLKFAPAYFSIMAEALFHDLPSVIAKMLGFFQVVIKNPLTNTEIRLDLLLMENLFYDREPTRIFDLKGSMRNRKIQSTGEQNEVLLDENMVEYIYESPLFAREHSKKLLRASVFNDTLFLARQNVMDYSLMIAVDEAKKELVVGIIDCIRTYTWDKKLESWIKDRGFAGGNRNRPTVTSPKEYKSRFREAMARYILQAPNCWNQFNASLLAGRRDAGDDTMITENAL

SEQ ID NO: 38828 - DNA, 15501 bp, Muscodor strobelii
  misc_feature: SGI EST ID NO. CUFF.93621.2
  misc_feature: Variant of the nucleotide sequence at SEQ ID NO 38826
ctgattaacatgcagtaatacatgcacgaagatctcgtagcaactgtgatagcattgtcgttgaatattttgaatattttgcgaacttctatatggtatgctatatatacacgagattcgctatgttgcgatcccaactcatctataggtatgtgtccaaatatgcttttggtccacactaactagcatgcaaatatcccactttccaaacgtccttcccatcatttccccaacatcgtctagatgctttgtactatttcgatgctcgattctccctcgtcttacatttcatccccactaaaatcatccaaaaacacctgtctcaacaaatccttcttattaatcttccccatagcattcctcggtatatgctcgaccatcctcagaacctgcggtatcttataattcgccagtctgcctctaagagcacggcgcatatccattggcttccagccctcggggcagatcgtgcgatctaagattacgaccgcgccgactttttgaccccatttccctgatggaacggccatcacggctgtctctagcacttcggggagagataggagttcgcgctcgacttcgagcgcggacactttttctccgcccgatttgattatatctgcgctttgacgacctaggatgaagaacattgggcctttggcccaggatccgctggaccctgagcctgcggtttctgggccggcgcgtcgctcggcgacatcgccagttttgaaccaggggccttttccgtcgtcgccttggacaaattcctttgccgttgccgtgggatttgcccagtactcgcggaaaacgttcgcaccccggagctgaatctcgccggagtggttgaggttatcggcagggatgagttcattggtatccgtgtcccagagccgtgcttcgacgcctggtaatggccaacccacactcccgtctacgcgatcggaatattcgagaccgcatgacaatgccataccgacctcggtcattccgtagcgctctaggagaacatttccacgggagatgtctttccatgcgcgctttactggcgtagggagagcggctgatccggaaatggcaacgcgcatatgttctggacttgctcccgttcgggctgcttctaatatctcggggggtaatgttttgtgcgtagagagaagacggctatagaccgtgggcaccacggtgaagaaggttattttctcctttgacatgttcgcgtatttctcttctaggatcccgttggctgcgctcgcgcttgttgagtatggtatggatcgcgcagctggtgggcgaacgacattgttcagatcaacagctagttgactgattctggttgtctcccgaggcgataatgtgacgcccgtggcctcaggagatgtgttgggtccagcagctagtcgaataattccgtacagctcggcggcaatttggctgattctacttgtatcggccggcgataatggtagatccacgctgacaggtgttgtcaaacctgtgctacttgcttctgaaatggggaagctgggcaggctcggtaatgaaggatgggagagaccgttggtgaaagtgttcataatgctattgtgctttgaagattccaggaacggagtcgcaaaacgcctccatacggtatccggattgaagggaaacaggaattcgatggtactgcccgcgaataaaggcgtaagtgtcgcattgacggtgccgtgaatgtgatggaggggtaaaacatggagtagcctgtctgtaggcgtgtatttccaggcctcgatcagggcgcggcattgcgccgtcaacgcagtttccggcaagagaacgcctttcggccgcgccgttgtgcctgaggtatagagcatcatacccgcgccctctgtgtcgtcatcgtctgaaatggtgaccgactcgagtttggtagcatccgagtcgacgccgaggccgacatgcttgaccaattcgacagcctttatcgagggcttgaactcggggtcggtgttcggcgatgggtcaggaaatggagcggtgaggacttctgtcgccttcgcggtgaacttggaggaatggagcagtagcgaggcttgagattgcgatagaatatactgtaattcaggcgcgggaaacggaggcgagagcggcagcgcaatcgcgcgacaggcgaggatcgcaaggaatgtgactgcatagatgtgagtttgtttgcgccgtattgacaactggggctcaattatcccataccaacataatcatagctgttctcaatgagaaatgctatgcgctcgcctcgtatatccgatttgccggcagtagcgtggatctggtcgcgcacgcgacagacgtccggaagcagctcgccatatttgaacgaccggcccgacagacaatgaacaaccgcagtcgattgggggtcgtgtttcgatatggcctcgaagatggggaatttgggtaaagacagagaggacgccattctgaaggagtgaagaaatgctctatgccgcacaacaacaggaggggttggaggggtgcatgtggtggtggacgtccgggatgacaacgacggtctgggcttataataagtagcgaacgagcgacgggacacggacgtgacaatattactagcagcggcggtggcactacttaagaaactactgcgtgaaggagcggacgtggagtggagaaatgcatgatggaacggagaggtcgcggcgatcgtagtggcagaagtcagcaacagtgacggaaacgacgaagtacagcagaaaacagtcactcgcagccctcccccaccagacagccgcatcccgggagccaagggtgtcgcgcagtttagtcaggaacacgacacacgacacggcccaggggtattcgacgggaagtgggagtaatggttagagggccatacgtgggggatatgtagagtcgaccgaattgggggagagatgatgtagtggtatctgccggctgaagtcggagatgcaccgaccgcctaatagagtgatatgataactcccgtctagcgtcccgaagcaaagtcaagcccggtcatgaatacccggcagatgtggtgtcacgtcacaacgcaagatgtgcctgggtttgcgaccagtgaccatcaaaagtcaatcttcaagaaacatcggcccgtgtaattccaaagatggttgtcaaacagatggggtctggcgtgatggtaagtagtgttatcctctcgcatatctctctaaacatgcagtttgagatagattgggacataggcccgtcatgttgaagtcgatcaatctttttttggtagctcggtcgcaacctgagatccaacattcgataaggcgatatgtcggtgctgagttttctgccgtagcgtgcgctgtttctttgcacggaggctttggttgaagatttgcgcctgggaaagccacttcggccttaaaagatgtccctcgaatccactgaaagttttggtaatggggctacccgtgggactacagggatccgtcgatcactagtgcggtggtccaacgacatgtcatgttgatttctgtttgattgcacacactggctcgattggtagcaaactcgagtatttccatgattttttgacatgcgagattcgattcgttgagaaatacaccgctagtatctgcacgaacaataaatctcagctcgcaccgatctcgcaaacccaaccatttcagcctcatctgcaggggatgatatagtatcagatcggcggtgccaaagcttcccggccacacccgagctgtctattcgacgtcccttccggacacactgctggatttgatgttgcgccgggccgcagccgccgctttcacaccgggcgtgccgatcaggtcttttgtattccctacaagatcactgtcatcagcaaacatggcttctgaaacgcctatagaggatgcgatccgaacgaagatcacagaagcattcaacccatcacggttggaaatcttcaacgactcacataagcatgcgcatcacaaaccaatgcaaggaagcaaatcaggcgagacgcatttccgcgtcgtcataacctcagaagcctttcagtctaaaatgcagcccgcgagacatcgccttgtctacggactgttcaaggatgagatggcggctgaaggtggtatacatgctctccaactccgtaccatgacgcccgaggaggaggagaggcagaaagccaaggaagcgagcaatgcatagatgtagtgagaaacaggtggacgtctagttgaggattgtaagataggctgagaggatatgagtgggggttgatgtaagatagcattgtgtgtacgcgaaaatacgtagactgagtacgtctgtggaataaacgtgatgtatcgttaaatcatgatttcggtttatttattaacggtacctagtgtaatgagtttgtgtcctttccatacacgcagggtatctgacgctctgaacaaagtcctaacaatcgctttcatgatgtcctcgaagaatccgtactcttacatcataatactatagttctttggtattgttactcgcacccttctggcacgattcattacctctgccctgaggtaggtgtatttctgaccggggccgaagagctcatgatgcggtccctctctgccttttgcttagcgaagtgcttcgctagcttgcgacgtcttctttcttctgggttttctgcatctctcttctttttcctgccggtactagagtccaccacaacagcactccgattggtgaccctagatcgcacggattgttcgctggtggtactgcaagaatcagacatcatagatcggtcagtaatcgccgttgtgaaaccggaaacccggcgttttggcgggtcggcggaagtttcgccttcgacttttctcttgtgcgaggcagattcggacaaggatcgtgtgagaccaggaccctttgactcctcccgccgggtcccaagattgttgaatgacttatgagttggagctacgttggtggtatcaaggagtggagtgggtagctttactgccggcgccacgggcttgatcatttctccgacggggatcttccctttgggttcttgtgcgacgggagaaacaccattcagggccaccatgttttgatcgtgttgctgtgtgcggtcatcgaccgtcgttgttttacttgcagctctattggtagagatgccggatcttttctctgccactggcaactcctccttataaaaatcgagaatatcctgcagattatctcggtttactacaccagcagtatacaattgtctaccacagaaatcatagtaccagtccagagctcttaaggcttcgacctttggctgagccttatcgcaatctcggacgtatggcacgaacccctcatgccatgcgcgaatgaaatcgtcgtacagaaatgtatggattcgtcgatactgaagtgaaatatagtaacatgccgctataaaatctcgtattgtccctttgtagtttggatatttcgtagtaaaataatcaaatggggctgcccaggcttttgattcgacgttttcctgagctgcggcctgtgcaagttccgcaggttgtcgagacggagggttgaatatcggagaatgtgggcgaggcattgagggagtcggcgggtgctcagaattcgtgctagctgtggttgccgatggctgggctgctgggatatcccaagatgatactggcagattactcccattaatgtggtctatactagtggacggcacgactgaagatgaagtatttgccgtagataatgagctatcaacctcttcgatgtgatggctgagtgtccttgctttggcgccgccaggataggcactcgaacgagttgatgcgaccgattgcttgtctggccactgtacggccgcataccgaatttgtcttggttttggctgcggcttgagctccgaattggttgacgcggtcttgctagattgctctatggtgcatgggacaatttgggcagaaggaggtgtcatcataggtagcgcagatttattcacaggaataacattgcccgggagggcggccgggacctctagctcaagctcctcttctggtcccaggctactctgtggaaactcaggtattggccggtggactggtgaggtcaggatagtggcctgtactggtgactgttccggtagctgggtgaggaatggttgactgatagatggttggctgggtggtctcatgtgacgttcaggactcgaaggccaggagattgtgcccccttggttggattcttcaccctcgctgtcttctgcttggggctcaggtccatgaggcgacgatgggtggtggtctggtaattctggctcaaccgcagctcccaacatgggggatgctgggtgaggttcagtcactgattcctgagtcccttcccgattggcatgggactgtttgattcgttccagcacgtcaggaggcacgttgataaagccattaggtctccggcctaggatgttggcccaggagtcagagcgatccagaagcttcttttgctcactcgcgatcttgacaagtgagcgggaaaacttgatgtcaccgaacaaatccgaaggcgaggaatttggtgtggacttggaaatgtgagagtctgccattttggctctgaaaattgtctacgtgtgagcggtaggcatttgacaattttgatatgggcctcaggctcgttcaaggtgataaacaggtagctcctagcttatggctgacgacctgagaagatcatctcatcccacatgtagtcttgctacagattttgtagtcgaatcgaacaatataaaaaattgtatgaccgaccaattgattgactaccttagtgatggctgatagtcaggtagattcgtgttcgcaattttacatggaattggtctggaaatggccaatatcaagaagtcactttcttggtagagtccgtgtgcacacgcgattgtgacggctgggacgcgttgtgggtgacagtgcggggcttaggtcagatgcgtattcacgtgagatagagctccgacctcagagcctgagtcaggtactgcgggctacatgatccctgtcgcaccttaactcgaccgaggtttcctggcccgagatagtacccggcgatctggtaaaacggcctggtagtgggaaagtagcgacttctgaagatctactcgagtcgcgatatcagcctccaagttccggattgaatcccacttggaacttaccccagctgcgtcactcccgccgtggtggtcctgccaaaacacttccgtgaggtgcatgtaggcagccgcaacacaacctcatcgcgcaggacgcctctttgccgactgtcacacacacatcgtcatgccgctgtgcaaaggcacctctcatcgcttctgagagcggcttgaggtcgccacctcctacaaagttgtcagcgcggagtcttctactctttgtcaccacaacagtattcttttcccaggttccacctacttccaatagcatcgatacccgtgtgccgcttgaatatatgctacaagatcatcattgctttgtttctgactcttctgttgcgattctgaactaagtgatcgtccgtgaccccacgacaacccaacattccgcctactactttgacacctccgccaacaccactcgattgctagcaccatccccatcaccatcgccttgcctctagctagaatcatgtcatcgatattactgcactggtgctctactggctagacatactgcctctgaccaaaccacaccaccatagcgctagtatcgccttcgctggcctgctcgctcgccaaaatgtcggataacacgcactctcctgctcccatgtctcccgcgagcctgctctcgcccagagacaggcagcggcgactctcaacaacctctagtagctcccaactgccccaagtcgacaaggaacacctcgcccaagccctcgacaagatccatacgtcctccaaagagcagagcgtgctcaccaccttccatgacctcggcccgccccccgattccgttgctgccaccgagggcaaagggttcgccggagatctcgtccagaatggcttcagtggcctgtattccaggttcaaggaggcagtgggtgtgagtgggaaagagagagctgctgccccaccgagtctggagagctcgtcctcggctaccatagacatggcgtccaagaagcctgcgaacaccaccccgagaccgtctctcggcggcgtcgtgtccccgctacttcgcttggacacgggtgcaacacactcgacgttgcagtcgaccacctccgatcctattgtccctaccctcgcagcctcttcctcgcagttgggcactgagactcagatgcaacaatcctattctaacaagccctcatccaccaccaacgtggccagcactgcctcctccaagtctgcttcatccagccgacaaagcatccccgcaatgataaagccaacagggtctctggccacagccaacattagtagtgtcaatgtcttcagagacaactctcggccaaactcttctcgcgtcgaagctgggcctggcactgttcgaggtacgcggagggagagtttcagcaaattaggagatgggcagtctagcgtacccataggccaaggggagagcttggcttcatcacatttggagaaaagcgctgtctcggcccgtccccgtcgcgaagaaattcgcagtggagatggtatctcggactcgcctgtaaatccttctgtctcggcagggcagcccgttctcagccctaccatccctcagataactacatcagaatcgagtttacttgcaccgcaaaccaggccgtctgcacggcccatgactcggcgtccggccatcattgaccgtatcagtcagtctcggggatcagggagtctttcaaggtcttcctccctttcgcgagggactgccgagccaagtcccatcaacacctctgttcatgctcatcataatgttcgccatgaatccttcggtctgggcggccaacacgagcgaacccagtctggggactaccgcatccccggaacgacaatggatgagggtgctcccgaggccgtcaatgcgaagctcgagtcaatgcggaagcaagtactcagcaagcagttctggatgtccgacgaaacctgcaaagaatgctttctatgtggctcaccattcacggcttttcgtcggaagcatcattgtagaacttgcggctgcatatttgacagccggtgcacgtcgataatttcgggtcagcggtttggtgtacaaggtactcttcgcgtctgcaagacctgcctgggcatcattctacaaagacaggatgggaatgtgtcagacgaatcggcagacgatactttcttgccaatgttccgccctaatcagcctcgaccaaccacgtcctcgtcgggactgaagcacgtccgtgatgagggtccccccgaacgagcaagtgagactaacgaccacaatcgatctatgatcactccgatgatggccattcctgcaacaaagaggattggagaatcgtccaatcgtaattccgcgattcttgaaatcgaaacgccacagcttagccgaccaagctcttcaagatccttgcgatctatcacatccggtcgcccacagtcgtcaggccataggcgtcagcattcgcagaaacacaatttatggaaccgtttaaaaccccccgctatcgaaagagcgccatttcgaaagtcggccacggaagaaagctccagaaagcctggcctctctgcctttcatgatgacaacgtcatagaccctgatttggccgcatacatgtcagatgagtcgagtgaggatgaacaaatgagtattatgggagtagttaccggaaatgagcatcctgcatcgaatattgagcaagaaaaatctaatttcggcccgtacctcggagcaggccggaggattcgcaacagggcgcaagcggacaagagcatcagcgggttcagctacaacagtcgtggcgttgatgagtaccatcctcgctcatcgagacgtcggaatctcagcacaactacaagtggacaacaggtctaccacatgcgctcaccccgcccgaggactgcgaccatgaaaggaggaccgtctgggtcaaacgagacgcttccctactttgattcgatcgtagcgtctagcgctcctcgcatgacgcgaagctcgtctatgaggggtgcaaaagagcctcgcctggagttgaatccggccagcatgatgcacgtccgcaaactcctccatcaactacttcttgattccgaaattccgcatgtcaatgcctgggaaaaggctttgatccccattttactcaagtgcacatcgtcagtagatcccgatattgaccgcggtgatgacatagatattcgacattatgtcaaattaaagaaaattcccggcggaaaaccaagtgatacaagctatgtccctggagtcattttcaccaaaaagctagcattgaaaagcatgccacgccgaatgagcaacccacgagttgttattatctcatttccaatagaatatcaacggcaccagcaccatttcatgagtcttcaaccagtcatcgagcaagaaaaggagtaccttaaacaattggtgaaccggcttattgcgctacgtcctcagctgctattgacggaaaagagtgtgtctggtgttgcacttcaaatgctatccgacgcgaagattgcagtagcatacaacgtgaaaccatccgtgctctcagctgtatcaagatgcttggaaacagagatcatctcgtctgtggatatgctggccctccctcctcaccagttccagaccggcaagagtactggatttgaagtgaagactttcgtcaacgaaagcattcctggccgaaagaagacttacatcttcttatctagcaatcaagaagagctcggttgtaccatcgctctccgcggagcaccgactgcagtccttgcgaggttgaagcatattactgaattcatggtgtacgtggtatacaacttgaaactagaatcatgcttgatgcgagattctttcatccaacttccaacaagcgaggacttgagcagaaactcaacccagcccttcgaggagaatgggccgatcaacggactcacgggtattgatacagcagaacagcgccagagaacattctctaccatgacgctagacgaccaacctgctgaagaatcggcgcagtcaagaccggaaattggtgagactagagagcaccaggcacaacttgttgatcctcagaagagactcatctcgctacatgagactcacgcgtcacatgacagcctcagtccaggagatgatgcgcctatgccaacgttctacagtgacatggtagccaagtacgaaacaaaggtcctatctgcttcgccatttgtcaaatttgctcagccttacctactcatgaaggcgagagagcaagaacgcaggcttggtcacttgaaacgacttcgagaccaggatatcatcgaagaacgggatgaagatgagaagccgaagccccagaaatttcaattaatcaaaccagaaatggtgcatcagactggccagaaggccccacgacaaattatggaagtgctacacgctgtccatgacgctgagtacgacaaagccctctacatctatcagacgcaaacaaagtcgtgggaaaactatattcaagggaacctagacttgtttgatccctatgcacaccagaatattgtcgttttacactcagtaatatgcacggaaacgaagataccttgcgtcgaaccccagctcattgctcttgggttctatgacgagcatacggatcataataacgagatggatccagactgtactctggggcaatatatagaagatgtctgttatggcgcagattctctgtgtacggcgaacagctgtgacagaaagatgcacgagcatcatcggacctacgttcatggcgaagctcggataacgattttcatcgagcttgaagctaagagtaaagctcggaatgatggtatcatgatgtggagctattgcaagctgtgccaacgtgaaacaagcgagatggaaatgtcacgtgcaacttggaaatattcgttcggcaaataccttgaactttcgttctggagcagaggcactcatcttatcagggacgaaagcctgggtggctggaattgccctcacgaccatcatcgagatcatatcagatatttcggcctcggcgacaagatcataagaattcactacgaccctattgacctattggaaatcattgtaccccgtgccaggatcacatggaaagtcgagcatgatctgaatatgaaaaatgccatctttacacattgccaagacagatggacaagatttacggcttctgtgaaagccaggctaaaagcaatcaaattagacaatatcgctccggaaaaggcggactcttgcaaaacggaaatcgaacgtctgaacaagaaaatacaagacgaacacacttcccttgtccgaaaacttcaagagaaatacatgagctcgagatactacgaggtcatacctttcaacattgtccttcgtgagatgctagtcaaggtcgctgagtgggatgttgcgtttacaaaattcgaagccgacttcatgccgactgacaaagatctccgtcgaatcacaatgattcaactgcgcaagatgttcacggacgagtcgaaagaatctttgtctagcatcgaaacttccacggaggcatctacaactcaagaaaaggacagccagcagacgctttcggagggtgattctaaagaagaaattcagctcaccgaggtcacacctgacatttcacagccagactcggtgggggaaaagctcacgcgtgttatttcacctcaggaagcgactctcgcctctgcgcccgaagcaactctggaacgagtcgaaccattggatctagccacttctcagtcacctagtgtagctgccacaccgttcgatcaagttcgagagcttgtgccaaatcccgtaccattctcgcaacctgagagtactttagagtcccctgtcaccccggggccgggaaatatcagcccagtgatcagcagaaactcgcagatgtctatttcagagcacgtggaacagcttcaccgtcggcaaaacagtatgaatgcagaaaattttggtcgtcctgttagtcaagagaccacggaccatggagccgattctcccggctctccgaaggtggttattgagcgcggttcttctcgtagggcgggattgaacgtctcgccacctatgattcgtgctatctcaactccggcgaaccacttaccaactttgccacgtactaactctgcaattggcaagaaggcttttgttctaaataaggatagggataaaaccccaaccgtagaaacaccgtcgggtagtgaccttcgaaaggcgcccacaaacgaatcaattaagagtgacaagaagctttttagcctcaaaaatcgcaaagggactgcgtcttcaattcctgttttcgtgggaaagaaagagtcgagagtttcaagagtctctacaattcgcaaacattttgaacaactaagccgtgagttcgagaaggaacgcgaaaaggacaggaaaaagcgtgcagcgaaaatgaccaattctcggcccttcctacagcattcgagaaccaaggccattgtggaagtctaccaggatattcgtgatgcagtgcaagagcccagtcctgtcgaagatgagccagcagtcgacaaggatataggcgccgtgagttcacccgccgcagtcggcccaggttcgactacagtcaaagaggccgagattccacaggagccaccgcacacacctcgatcaccagttgagacgcaagatcgcagcaaagaagccgctgagcctgaaacggacgaccaaaccctgaccaccagtgttggtgctactgatgacgagcaaggcgatagtgatacggagaattctctacttgatggcagtacccttgaagaaatcgctgattctctaggctcaagcacggagattccactagaacttcctaaacatgatagaatgaattttatgaaggcgctgtccaatttttggaatgaacgctcagcaagtcaatggccgcccttagactatcccctgggtccctcagatcacatcttcattgactctgatatcatcgttcgcgaagatgaacctagctcggtcatcgctttcgcattaagttccgaggattacaagcagaaacttcgacgattccaccgcagaaagcctggccagatgacgcagccttcttcagacactgaagatcacgttatgactgacagtaatccatacttatctgaagaccagatcactgaagatcgacttgagaccagcctagttcacaccacgagcagccactataaatatcagtttagcgaaggttcggctagaatgctcgttaagatcttctatgcagagcagttcgacgcgctccgacggaaatgcggagtgtctgatcgcatcattgaatcgttatcccgttgtgttccatgggactcaaaaggcggaaagacaaaatcagtgttccttaagacacaagacgaccgcttagtgatgaaatcactgtcacagattgagactcaggcattcttgaaattcgccccggcgtattttagtataatggctgaggcgctgttccatgatttaccttctgttatcgcgaagatgcttgggttcttccaggttgtcatcaaaaatccattgacaaatacggaaatcaggctcgatctcctcttgatggaaaatctgttctatgatcgcgaacccacgcgcatttttgacctcaagggctccatgaggaatcgaaaaatccagtcgacaggcgagcaaaatgaggttctgctggatgagaacatggttgagtacatctacgaatctccattgttcgcaagggaacattcgaagaagctactgagggcgtcagtctttaacgatacactattcttggcgcgacaaaacgtaatggactactctctcatgatcgctgttgacgaggcaaagaaagagctcgtggtgggcataatcgactgcattcgcacctacacatgggacaagaagcttgagagttggatcaaggatcgcggatttgccggcggcaatagaaatagaccgactgtaactagtccgaaggaatacaagtcgcgatttcgcgaggctatggcaagatacattctccaagcgccaaattgctggaaccaattcaatgcatctctcttagctggccgtcgcgacgctggcgacgatactatgatcacggagaatgctctgtaaatataaattatcacgaccatattcgacgacatgaatgatgtgctgctgcaaacactcaaaagatgcgatgagaggaaagatgggcgtacatagctggctggactgtccagcgggccacggttgctacgcagactacggtcgtatgcatgacttactcatgattagatagatacccaatggagttattttctatgatttgttcgattgcgct

SEQ ID NO: 38829 - DNA, 2061 bp, Muscodor strobelii
  misc_feature: SGI cDNA ID NO. 573501
  misc_feature: Encodes the peptide sequence at SEQ ID NO 38830
atggcagactctcacatttccaagtccacaccaaattcctcgccttcggatttgttcggtgacatcaagttttcccgctcacttgtcaagatcgcgagtgagcaaaagaagcttctggatcgctctgactcctgggccaacatcctaggccggagacctaatggctttatcaacgtgcctcctgacgtgctggaacgaatcaaacagtcccatgccaatcgggaagggactcaggaatcagtgactgaacctcacccagcatcccccatgttgggagctgcggttgagccagaattaccagaccaccacccatcgtcgcctcatggacctgagccccaagcagaagacagcgagggtgaagaatccaaccaagggggcacaatctcctggccttcgagtcctgaacgtcacatgagaccacccagccaaccatctatcagtcaaccattcctcacccagctaccggaacagtcaccagtacaggccactatcctgacctcaccagtccaccggccaatacctgagtttccacagagtagcctgggaccagaagaggagcttgagctagaggtcccggccgccctcccgggcaatgttattcctgtgaataaatctgcgctacctatgatgacacctccttctgcccaaattgtcccatgcaccatagagcaatctagcaagaccgcgtcaaccaattcggagctcaagccgcagccaaaaccaagacaaattcggtatgcggccgtacagtggccagacaagcaatcggtcgcatcaactcgttcgagtgcctatcctggcggcgccaaagcaaggacactcagccatcacatcgaagaggttgatagctcattatctacggcaaatacttcatcttcagtcgtgccgtccactagtatagaccacattaatgggagtaatctgccagtatcatcttgggatatcccagcagcccagccatcggcaaccacagctagcacgaattctgagcacccgccgactccctcaatgcctcgcccacattctccgatattcaaccctccgtctcgacaacctgcggaacttgcacaggccgcagctcaggaaaacgtcgaatcaaaagcctgggcagccccatttgattattttactacgaaatatccaaactacaaagggacaatacgagattttatagcggcatgttactatatttcacttcagtatcgacgaatccatacatttctgtacgacgatttcattcgcgcatggcatgaggggttcgtgccatacgtccgagattgcgataaggctcagccaaaggtcgaagccttaagagctctggactggtactatgatttctgtggtagacaattgtatactgctggtgtagtaaaccgagataatctgcaggatattctcgatttttataaggaggagttgccagtggcagagaaaagatccggcatctctaccaatagagctgcaagtaaaacaacgacggtcgatgaccgcacacagcaacacgatcaaaacatggtggccctgaatggtgtttctcccgtcgcacaagaacccaaagggaagatccccgtcggagaaatgatcaagcccgtggcgccggcagtaaagctacccactccactccttgataccaccaacgtagctccaactcataagtcattcaacaatcttgggacccggcgggaggagtcaaagggtcctggtctcacacgatccttgtccgaatctgcctcgcacaagagaaaagtcgaaggcgaaacttccgccgacccgccaaaacgccgggtttccggtttcacaacggcgattactgaccgatctatgatgtctgattcttgcagtaccaccagcgaacaatccgtgcgatctagggtcaccaatcggagtgctgttgtggtggactctagtaccggcaggaaaaagaagagagatgcagaaaacccagaagaaagaagacgtcgcaagctagcgaagcacttcgctaagcaaaaggcagagagggaccgcatcatgagctcttcggccccggtcagaaatacacctacctcagggcagaggtaa

SEQ ID NO: 38830 - protein, 686 aa, Muscodor strobelii
  misc_feature: SGI Peptide ID NO. 573501
  misc_feature (14)..(469): NCBI GI: 85111770 Blast Desc: NCU02101 [Neurospora crassa OR74A] gi|28925861|gb|EAA34859.1| [Neurospora crassa OR74A]
  misc_feature (13)..(473): NCBI GI: 256734817 Blast Desc: NECHADRAFT_75464 [Nectria haematococca mpVI 77-13-4]
  misc_feature (133)..(432): NCBI GI: 261355331 Blast Desc: conserved [Verticillium albo-atrum VaMs.102]
  misc_feature (368)..(472): NCBI GI: 116182102 Blast Desc: CHGG_01679 [Chaetomium globosum CBS 148.51] gi|88185976|gb|EAQ93444.1| CHGG_01679 [Chaetomium globosum CBS 148.51]
  misc_feature (341)..(473): NCBI GI: 46105322 Blast Desc: FG00289.1 [Gibberella zeae PH-1]
  misc_feature (22)..(226): NCBI GI: 46105322 Blast Desc: FG00289.1 [Gibberella zeae PH-1]
  misc_feature (26)..(72): NCBI GI: 39953871 Blast Desc: [Magnaporthe grisea 70-15] gi|145021188|gb|EDK05317.1| [Magnaporthe grisea 70-15]
MADSHISKSTPNSSPSDLFGDIKFSRSLVKIASEQKKLLDRSDSWANILGRRPNGFINVPPDVLERIKQSHANREGTQESVTEPHPASPMLGAAVEPELPDHHPSSPHGPEPQAEDSEGEESNQGGTISWPSSPERHMRPPSQPSISQPFLTQLPEQSPVQATILTSPVHRPIPEFPQSSLGPEEELELEVPAALPGNVIPVNKSALPMMTPPSAQIVPCTIEQSSKTASTNSELKPQPKPRQIRYAAVQWPDKQSVASTRSSAYPGGAKARTLSHHIEEVDSSLSTANTSSSVVPSTSIDHINGSNLPVSSWDIPAAQPSATTASTNSEHPPTPSMPRPHSPIFNPPSRQPAELAQAAAQENVESKAWAAPFDYFTTKYPNYKGTIRDFIAACYYISLQYRRIHTFLYDDFIRAWHEGFVPYVRDCDKAQPKVEALRALDWYYDFCGRQLYTAGVVNRDNLQDILDFYKEELPVAEKRSGISTNRAASKTTTVDDRTQQHDQNMVALNGVSPVAQEPKGKIPVGEMIKPVAPAVKLPTPLLDTTNVAPTHKSFNNLGTRREESKGPGLTRSLSESASHKRKVEGETSADPPKRRVSGFTTAITDRSMMSDSCSTTSEQSVRSRVTNRSAVVVDSSTGRKKKRDAENPEERRRRKLAKHFAKQKAERDRIMSSSAPVRNTPTSGQR

SEQ ID NO: 38831 - DNA, 14584 bp, Muscodor strobelii
  misc_feature: SGI EST ID NO. CUFF.93620.3
  misc_feature: Variant of the nucleotide sequence at SEQ ID NO 38829
actttcatcactaagcggtcgtcttgtgtcttaaggaacactgattttgtctttccgccttttgagtcccatggaacacaacgggataacgattcaatgatgcgatcagacactccgcatttccgtcggagcgcgtcgaactgctctgcatagaagatcttaacgagcattctagccgaaccttcgctaaactgatatttatagtggctgctcgtggtgtgaactaggctggtctcaagtcgatcttcagtgatctggtcttcagataagtatggattactgtcagtcataacgtgatcttcagtgtctgaagaaggctgcgtcatctggccaggctttctgcggtggaatcgtcgaagtttctgcttgtaatcctcggaacttaatgcgaaagcgatgaccgagctaggttcatcttcgcgaacgatgatatcagagtcaatgaagatgtgatctgagggacccaggggatagtctaagggcggccattgacttgctgagcgttcattccaaaaattggacagcgccttcataaaattcattctatcatgtttaggaagttctagtggaatctccgtgcttgagcctagagaatcagcgatttcttcaagggtactgccatcaagtagagaattctccgtatcactatcgccttgctcgtcatcagtagcaccaacactggtggtcagggtttggtcgtccgtttcaggctcagcggcttctttgctgcgatcttgcgtctcaactggtgatcgaggtgtgtgcggtggctcctgtggaatctcggcctctttgactgtagtcgaacctgggccgactgcggcgggtgaactcacggcgcctatatccttgtcgactgctggctcatcttcgacaggactgggctcttgcactgcatcacgaatatcctggtagacttccacaatggccttggttctcgaatgctgtaggaagggccgagaattggtcattttcgctgcacgctttttcctgtccttttcgcgttccttctcgaactcacggcttagttgttcaaaatgtttgcgaattgtagagactcttgaaactctcgactctttctttcccacgaaaacaggaattgaagacgcagtccctttgcgatttttgaggctaaaaagcttcttgtcactcttaattgattcgtttgtgggcgcctttcgaaggtcactacccgacggtgtttctacggttggggttttatccctatccttatttagaacaaaagccttcttgccaattgcagagttagtacgtggcaaagttggtaagtggttcgccggagttgagatagcacgaatcataggtggcgagacgttcaatcccgccctacgagaagaaccgcgctcaataaccaccttcggagagccgggagaatcggctccatggtccgtggtctcttgactaacaggacgaccaaaattttctgcattcatactgttttgccgacggtgaagctgttccacgtgctctgaaatagacatctgcgagtttctgctgatcactgggctgatatttcccggccccggggtgacaggggactctaaagtactctcaggttgcgagaatggtacgggatttggcacaagctctcgaacttgatcgaacggtgtggcagctacactaggtgactgagaagtggctagatccaatggttcgactcgttccagagttgcttcgggcgcagaggcgagagtcgcttcctgaggtgaaataacacgcgtgagcttttcccccaccgagtctggctgtgaaatgtcaggtgtgacctcggtgagctgaatttcttctttagaatcaccctccgaaagcgtctgctggctgtccttttcttgagttgtagatgcctccgtggaagtttcgatgctagacaaagattctttcgactcgtccgtgaacatcttgcgcagttgaatcattgtgattcgacggagatctttgtcagtcggcatgaagtcggcttcgaattttgtaaacgcaacatcccactcagcgaccttgactagcatctcacgaaggacaatgttgaaaggtatgacctcgtagtatctcgagctcatgtatttctcttgaagttttcggacaagggaagtgtgttcgtcttgtattttcttgttcagacgttcgatttccgttttgcaagagtccgccttttccggagcgatattgtctaatttgattgcttttagcctggctttcacagaagccgtaaatcttgtccatctgtcttggcaatgtgtaaagatggcatttttcatattcagatcatgctcgactttccatgtgatcctggcacggggtacaatgatttccaataggtcaatagggtcgtagtgaattcttatgatcttgtcgccgaggccgaaatatctgatatgatctcgatgatggtcgtgagggcaattccagccacccaggctttcgtccctgataagatgagtgcctctgctccagaacgaaagttcaaggtatttgccgaacgaatatttccaagttgcacgtgacatttccatctcgcttgtttcacgttggcacagcttgcaatagctccacatcatgataccatcattccgagctttactcttagcttcaagctcgatgaaaatcgttatccgagcttcgccatgaacgtaggtccgatgatgctcgtgcatctttctgtcacagctgttcgccgtacacagagaatctgcgccataacagacatcttctatatattgccccagagtacagtctggatccatctcgttattatgatccgtatgctcgtcatagaacccaagagcaatgagctggggttcgacgcaaggtatcttcgtttccgtgcatattactgagtgtaaaacgacaatattctggtgtgcatagggatcaaacaagtctaggttcccttgaatatagttttcccacgactttgtttgcgtctgatagatgtagagggctttgtcgtactcagcgtcatggacagcgtgtagcacttccataatttgtcgtggggccttctggccagtctgatgcaccatttctggtttgattaattgaaatttctggggcttcggcttctcatcttcatcccgttcttcgatgatatcctggtctcgaagtcgtttcaagtgaccaagcctgcgttcttgctctctcgccttcatgagtaggtaaggctgagcaaatttgacaaatggcgaagcagataggacctttgtttcgtacttggctaccatgtcactgtagaacgttggcataggcgcatcatctcctggactgaggctgtcatgtgacgcgtgagtctcatgtagcgagatgagtctcttctgaggatcaacaagttgtgcctggtgctctctagtctcaccaatttccggtcttgactgcgccgattcttcagcaggttggtcgtctagcgtcatggtagagaatgttctctggcgctgttctgctgtatcaatacccgtgagtccgttgatcggcccattctcctcgaagggctgggttgagtttctgctcaagtcctcgcttgttggaagttggatgaaagaatctcgcatcaagcatgattctagtttcaagttgtataccacgtacaccatgaattcagtaatatgcttcaacctcgcaaggactgcagtcggtgctccgcggagagcgatggtacaaccgagctcttcttgattgctagataagaagatgtaagtcttctttcggccaggaatgctttcgttgacgaaagtcttcacttcaaatccagtactcttgccggtctggaactggtgaggagggagggccagcatatccacagacgagatgatctctgtttccaagcatcttgatacagctgagagcacggatggtttcacgttgtatgctactgcaatcttcgcgtcggatagcatttgaagtgcaacaccagacacactcttttccgtcaatagcagctgaggacgtagcgcaataagccggttcaccaattgtttaaggtactccttttcttgctcgatgactggttgaagactcatgaaatggtgctggtgccgttgatattctattggaaatgagataataacaactcgtgggttgctcattcggcgtggcatgcttttcaatgctagctttttggtgaaaatgactccagggacatagcttgtatcacttggttttccgccgggaattttctttaatttgacataatgtcgaatatctatgtcatcaccgcggtcaatatcgggatctactgacgatgtgcacttgagtaaaatggggatcaaagccttttcccaggcattgacatgcggaatttcggaatcaagaagtagttgatggaggagtttgcggacgtgcatcatgctggccggattcaactccaggcgaggctcttttgcacccctcatagacgagcttcgcgtcatgcgaggagcgctagacgctacgatcgaatcaaagtagggaagcgtctcgtttgacccagacggtcctcctttcatggtcgcagtcctcgggcggggtgagcgcatgtggtagacctgttgtccacttgtagttgtgctgagattccgacgtctcgatgagcgaggatggtactcatcaacgccacgactgttgtagctgaacccgctgatgctcttgtccgcttgcgccctgttgcgaatcctccggcctgctccgaggtacgggccgaaattagatttttcttgctcaatattcgatgcaggatgctcatttccggtaactactcccataatactcatttgttcatcctcactcgactcatctgacatgtatgcggccaaatcagggtctatgacgttgtcatcatgaaaggcagagaggccaggctttctggagctttcttccgtggccgactttcgaaatggcgctctttcgatagcggggggttttaaacggttccataaattgtgtttctgcgaatgctgacgcctatggcctgacgactgtgggcgaccggatgtgatagatcgcaaggatcttgaagagcttggtcggctaagctgtggcgtttcgatttcaagaatcgcggaattacgattggacgattctccaatcctctttgttgcaggaatggccatcatcggagtgatcatagatcgattgtggtcgttagtctcacttgctcgttcggggggaccctcatcacggacgtgcttcagtcccgacgaggacgtggttggtcgaggctgattagggcggaacattggcaagaaagtatcgtctgccgattcgtctgacacattcccatcctgtctttgtagaatgatgcccaggcaggtcttgcagacgcgaagagtaccttgtacaccaaaccgctgacccgaaattatcgacgtgcaccggctgtcaaatatgcagccgcaagttctacaatgatgcttccgacgaaaagccgtgaatggtgagccacatagaaagcattctttgcaggtttcgtcggacatccagaactgcttgctgagtacttgcttccgcattgactcgagcttcgcattgacggcctcgggagcaccctcatccattgtcgttccggggatgcggtagtccccagactgggttcgctcgtgttggccgcccagaccgaaggattcatggcgaacattatgatgagcatgaacagaggtgttgatgggacttggctcggcagtccctcgcgaaagggaggaagaccttgaaagactccctgatccccgagactgactgatacggtcaatgatggccggacgccgagtcatgggccgtgcagacggcctggtttgcggtgcaagtaaactcgattctgatgtagttatctgagggatggtagggctgagaacgggctgccctgccgagacagaaggatttacaggcgagtccgagataccatctccactgcgaatttcttcgcgacggggacgggccgagacagcgcttttctccaaatgtgatgaagccaagctctccccttggcctatgggtacgctagactgcccatctcctaatttgctgaaactctccctccgcgtacctcgaacagtgccaggcccagcttcgacgcgagaagagtttggccgagagttgtctctgaagacattgacactactaatgttggctgtggccagagaccctgttggctttatcattgcggggatgctttgtcggctggatgaagcagacttggaggaggcagtgctggccacgttggtggtggatgagggcttgttagaataggattgttgcatctgagtctcagtgcccaactgcgaggaagaggctgcgagggtagggacaataggatcggaggtggtcgactgcaacgtcgagtgtgttgcacccgtgtccaagcgaagtagcggggacacgacgccgccgagagacggtctcggggtggtgttcgcaggcttcttggacgccatgtctatggtagccgaggacgagctctccagactcggtggggcagcagctctctctttcccactcacacccactgcctccttgaacctggaatacaggccactgaagccattctggacgagatctccggcgaaccctttgccctcggtggcagcaacggaatcggggggcgggccgaggtcatggaaggtggtgagcacgctctgctctttggaggacgtatggatcttgtcgagggcttgggcgaggtgttccttgtcgacttggggcagttgggagctactagaggttgttgagagtcgccgctgcctgtctctgggcgagagcaggctcgcgggagacatgggagcaggagagtgcgtgttatccgacattttggcgagcgagcaggccagcgaaggcgatactagcgctatggtggtgtggtttggtcagaggcagtatgtctagccagtagagcaccagtgcagtaatatcgatgacatgattctagctagaggcaaggcgatggtgatggggatggtgctagcaatcgagtggtgttggcggaggtgtcaaagtagtaggcggaatgttgggttgtcgtggggtcacggacgatcacttagttcagaatcgcaacagaagagtcagaaacaaagcaatgatgatcttgtagcatatattcaagcggcacacgggtatcgatgctattggaagtaggtggaacctgggaaaagaatactgttgtggtgacaaagagtagaagactccgcgctgacaactttgtaggaggtggcgacctcaagccgctctcagaagcgatgagaggtgcctttgcacagcggcatgacgatgtgtgtgtgacagtcggcaaagaggcgtcctgcgcgatgaggttgtgttgcggctgcctacatgcacctcacggaagtgttttggcaggaccaccacggcgggagtgacgcagctggggtaagttccaagtgggattcaatccggaacttggaggctgatatcgcgactcgagtagatcttcagaagtcgctactttcccactaccaggccgttttaccagatcgccgggtactatctcgggccaggaaacctcggtcgagttaaggtgcgacagggatcatgtagcccgcagtacctgactcaggctctgaggtcggagctctatctcacgtgaatacgcatctgacctaagccccgcactgtcacccacaacgcgtcccagccgtcacaatcgcgtgtgcacacggactctaccaagaaagtgacttcttgatattggccatttccagaccaattccatgtaaaattgcgaacacgaatctacctgactatcagccatcactaaggtagtcaatcaattggtcggtcatacaattttttatattgttcgattcgactacaaaatctgtagcaagactacatgtgggatgagatgatcttctcaggtcgtcagccataagctaggagctacctgtttatcaccttgaacgagcctgaggcccatatcaaaattgtcaaatgcctaccgctcacacgtagacaattttcagagccaaaatggcagactctcacatttccaagtccacaccaaattcctcgccttcggatttgttcggtgacatcaagttttcccgctcacttgtcaagatcgcgagtgagcaaaagaagcttctggatcgctctgactcctgggccaacatcctaggccggagacctaatggctttatcaacgtgcctcctgacgtgctggaacgaatcaaacagtcccatgccaatcgggaagggactcaggaatcagtgactgaacctcacccagcatcccccatgttgggagctgcggttgagccagaattaccagaccaccacccatcgtcgcctcatggacctgagccccaagcagaagacagcgagggtgaagaatccaaccaagggggcacaatctcctggccttcgagtcctgaacgtcacatgagaccacccagccaaccatctatcagtcaaccattcctcacccagctaccggaacagtcaccagtacaggccactatcctgacctcaccagtccaccggccaatacctgagtttccacagagtagcctgggaccagaagaggagcttgagctagaggtcccggccgccctcccgggcaatgttattcctgtgaataaatctgcgctacctatgatgacacctccttctgcccaaattgtcccatgcaccatagagcaatctagcaagaccgcgtcaaccaattcggagctcaagccgcagccaaaaccaagacaaattcggtatgcggccgtacagtggccagacaagcaatcggtcgcatcaactcgttcgagtgcctatcctggcggcgccaaagcaaggacactcagccatcacatcgaagaggttgatagctcattatctacggcaaatacttcatcttcagtcgtgccgtccactagtatagaccacattaatgggagtaatctgccagtatcatcttgggatatcccagcagcccagccatcggcaaccacagctagcacgaattctgagcacccgccgactccctcaatgcctcgcccacattctccgatattcaaccctccgtctcgacaacctgcggaacttgcacaggccgcagctcaggaaaacgtcgaatcaaaagcctgggcagccccatttgattattttactacgaaatatccaaactacaaagggacaatacgagattttatagcggcatgttactatatttcacttcagtatcgacgaatccatacatttctgtacgacgatttcattcgcgcatggcatgaggggttcgtgccatacgtccgagattgcgataaggctcagccaaaggtcgaagccttaagagctctggactggtactatgatttctgtggtagacaattgtatactgctggtgtagtaaaccgagataatctgcaggatattctcgatttttataaggaggagttgccagtggcagagaaaagatccggcatctctaccaatagagctgcaagtaaaacaacgacggtcgatgaccgcacacagcaacacgatcaaaacatggtggccctgaatggtgtttctcccgtcgcacaagaacccaaagggaagatccccgtcggagaaatgatcaagcccgtggcgccggcagtaaagctacccactccactccttgataccaccaacgtagctccaactcataagtcattcaacaatcttgggacccggcgggaggagtcaaagggtcctggtctcacacgatccttgtccgaatctgcctcgcacaagagaaaagtcgaaggcgaaacttccgccgacccgccaaaacgccgggtttccggtttcacaacggcgattactgaccgatctatgatgtctgattcttgcagtaccaccagcgaacaatccgtgcgatctagggtcaccaatcggagtgctgttgtggtggactctagtaccggcaggaaaaagaagagagatgcagaaaacccagaagaaagaagacgtcgcaagctagcgaagcacttcgctaagcaaaaggcagagagggaccgcatcatgagctcttcggccccggtcagaaatacacctacctcagggcagaggtaatgaatcgtgccagaagggtgcgagtaacaataccaaagaactatagtattatgatgtaagagtacggattcttcgaggacatcatgaaagcgattgttaggactttgttcagagcgtcagataccctgcgtgtatggaaaggacacaaactcattacactaggtaccgttaataaataaaccgaaatcatgatttaacgatacatcacgtttattccacagacgtactcagtctacgtattttcgcgtacacacaatgctatcttacatcaacccccactcatatcctctcagcctatcttacaatcctcaactagacgtccacctgtttctcactacatctatgcattgctcgcttccttggctttctgcctctcctcctcctcgggcgtcatggtacggagttggagagcatgtataccaccttcagccgccatctcatccttgaacagtccgtagacaaggcgatgtctcgcgggctgcattttagactgaaaggcttctgaggttatgacgacgcggaaatgcgtctcgcctgatttgcttccttgcattggtttgtgatgcgcatcttataggtgttagtatgtgagatatatggcgtcatgggatgttaagtgtgagatatacgcttatgtgagtcgttgaagatttccaaccgtgatgggttgaatgcttctgtgatctgcgaaaagatgtgagtagctacacacacaaagagaggcgatataaaagacgaaccttcgttcggatcgcatcctctataggcgtttcagaagccatgtttgctgatgacagtgatcttgtagggaatacaaaagacctgatcggcacgcccggtgtgaaagcggcggctgcggcccggcgcaacatcaaatccagcagtgtgtccggaagggacgtcgaatagacagctcgggtgtggccgggaagctttggcaccgccgatctgatactatatcatcccctgcagatgaggctgaaatggttgggtttgcgagatcggtgcgagctgagatttattgttcgtgcagatactagcggtgtatttctcaacgaatcgaatctcgcatgtcaaaaaatcatggaaatactcgagtttgctaccaatcgagccagtgtgtgcaatcaaacagaaatcaacatgacatgtcgttggaccaccgcactagtgatcgacggatccctgtagtcccacgggtagccccattaccaaaactttcagtggattcgagggacatcttttaaggccgaagtggctttcccaggcgcaaatcttcaaccaaagcctccgtgcaaagaaacagcgcacgctacggcagaaaactcagcaccgacatatcgccttatcgaatgttggatctcaggttgcgaccgagctaccaaaaaaagattgatcgacttcaacatgacgggcctatgtcccaatctatctcaaactgcatgtttagagagatatgcgagaggataacactacttaccatcacgccagaccccatctgtttgacaaccatctttggaattacacgggccgatgtttcttgaagattgacttttgatggtcactggtcgcaaacccaggcacatcttgcgttgtgacgtgacaccacatctgccgggtattcatgaccgggcttgactttgcttcgggacgctagacgggagttatcatatcactctattaggcggtcggtgcatctccgacttcagccggcagataccactacatcatctctcccccaattcggtcgactctacatatcccccacgtatggccctctaaccattactcccacttcccgtcgaatacccctgggccgtgtcgtgtgtcgtgttcctgactaaactgcgcgacacccttggctcccgggatgcggctgtctggtgggggagggctgcgagtgactgttttctgctgtacttcgtcgtttccgtcactgttgctgacttctgccactacgatcgccgcgacctctccgttccatcatgcatttctccactccacgtccgctccttcacgcagtagtttcttaagtagtgccaccgccgctgctagtaatattgtcacgtccgtgtcccgtcgctcgttcgctacttattataagcccagaccgtcgttgtcatcccggacgtccaccaccacatgcacccctccaacccctcctgttgttgtgcggcatagagcatttcttcactccttcagaatggcgtcctctctgtctttacccaaattccccatcttcgaggccatatcgaaacacgacccccaatcgactgcggttgttcattgtctgtcgggccggtcgttcaaatatggcgagctgcttccggacgtctgtcgcgtgcgcgaccagatccacgctactgccggcaaatcggatatacgaggcgagcgcatagcatttctcattgagaacagctatgattatgttgtcacattccttgcgatcctcgcctgtcgcgcgattgcgctgccgctctcgcctccgtttcccgcgcctgaattacagtatattctatcgcaatctcaagcctcgctactgctccattcctccaagttcaccgcgaaggcgacagaagtcctcaccgctccatttcctgacccatcgccgaacaccgaccccgagttcaagccctcgataaaggctgtcgaattggtcaagcatgtcggcctcggcgtcgactcggatgctaccaaactcgagtcggtcaccatttcagacgatgacgacacagagggcgcgggtatgatgctctatacctcaggcacaacggcgcggccgaaaggcgttctcttgccggaaactgcgttgacggcgcaatgccgcgccctgatcgaggcctggaaatacacgcctacagacaggctactccatgttttacccctccatcacattcacggcaccgtcaatgcgacacttacgcctttattcgcgggcagtaccatcgaattcctgtttcccttcaatccggataccgtatggaggcgttttgcgactccgttcctggaatcttcaaagcacaatagcattatgaacactttcaccaacggtctctcccatccttcattaccgagcctgcccagcttccccatttcagaagcaagtagcacaggtttgacaacacctgtcagcgtggatctaccattatcgccggccgatacaagtagaatcagccaaattgccgccgagctgtacggaattattcgactagctgctggacccaacacatctcctgaggccacgggcgtcacattatcgcctcgggagacaaccagaatcagtcaactagctgttgatctgaacaatgtcgttcgcccaccagctgcgcgatccataccatactcaacaagcgcgagcgcagccaacgggatcctagaagagaaatacgcgaacatgtcaaaggagaaaataaccttcttcaccgtggtgcccacggtctatagccgtcttctctctacgcacaaaacattaccccccgagatattagaagcagcccgaacgggagcaagtccagaacatatgcgcgttgccatttccggatcagccgctctccctacgccagtaaagcgcgcatggaaagacatctcccgtggaaatgttctcctagagcgctacggaatgaccgaggtcggtatggcattgtcatgcggtctcgaatattccgatcgcgtagacgggagtgtgggttggccattaccaggcgtcgaagcacggctctgggacacggataccaatgaactcatccctgccgataacctcaaccactccggcgagattcagctccggggtgcgaacgttttccgcgagtactgggcaaatcccacggcaacggcaaaggaatttgtccaaggcgacgacggaaaaggcccctggttcaaaactggcgatgtcgccgagcgacgcgccggcccagaaaccgcaggctcagggtccagcggatcctgggccaaaggcccaatgttcttcatcctaggtcgtcaaagcgcagatataatcaaatcgggcggagaaaaagtgtccgcgctcgaagtcgagcgcgaactcctatctctccccgaagtgctagagacagccgtgatggccgttccatcagggaaatggggtcaaaaagtcggcgcggtcgtaatcttagatcgcacgatctgccccgagggctggaagccaatggatatgcgccgtgctcttagaggcagactggcgaattataagataccgcaggttctgaggatggtcgagcatataccgaggaatgctatggggaagattaataagaaggatttgttgagacaggtgtttttggatgattttagtggggatgaaatgtaagacgagggagaatcgagcatcgaaatagtacaaagcatctagacgatgttggggaaatgatgggaaggacgtttggaaagtgggatatttgcatgctagttagtgtggaccaaaagcatatttggacacatacctatagatgagttgggatcgcaacatagcgaatctcgtgtatatatagcataccatatagaagttcgcaaaatattcaaaatattcaacgacaat

SEQ ID NO: 38832 - DNA, 1053 bp, Muscodor strobelii
  misc_feature: SGI cDNA ID NO. 573502
  misc_feature: Encodes the peptide sequence at SEQ ID NO 38833
atgcctcgcccacattctccgatattcaaccctccgtctcgacaacctgcggaacttgcacaggccgcagctcaggaaaacgtcgaatcaaaagcctgggcagccccatttgattattttactacgaaatatccaaactacaaagggacaatacgagattttatagcggcatgttactatatttcacttcagtatcgacgaatccatacatttctgtacgacgatttcattcgcgcatggcatgaggggttcgtgccatacgtccgagattgcgataaggctcagccaaaggtcgaagccttaagagctctggactggtactatgatttctgtggtagacaattgtatactgctggtgtagtaaaccgagataatctgcaggatattctcgatttttataaggaggagttgccagtggcagagaaaagatccggcatctctaccaatagagctgcaagtaaaacaacgacggtcgatgaccgcacacagcaacacgatcaaaacatggtggccctgaatggtgtttctcccgtcgcacaagaacccaaagggaagatccccgtcggagaaatgatcaagcccgtggcgccggcagtaaagctacccactccactccttgataccaccaacgtagctccaactcataagtcattcaacaatcttgggacccggcgggaggagtcaaagggtcctggtctcacacgatccttgtccgaatctgcctcgcacaagagaaaagtcgaaggcgaaacttccgccgacccgccaaaacgccgggtttccggtttcacaacggcgattactgaccgatctatgatgtctgattcttgcagtaccaccagcgaacaatccgtgcgatctagggtcaccaatcggagtgctgttgtggtggactctagtaccggcaggaaaaagaagagagatgcagaaaacccagaagaaagaagacgtcgcaagctagcgaagcacttcgctaagcaaaaggcagagagggaccgcatcatgagctcttcggccccggtcagaaatacacctacctcagggcagaggtaa

SEQ ID NO: 38833 - protein, 350 aa, Muscodor strobelii
  misc_feature: SGI Peptide ID NO. 573502
  misc_feature (32)..(136): NCBI GI: 116182102 Blast Desc: CHGG_01679 [Chaetomium globosum CBS 148.51] gi|88185976|gb|EAQ93444.1| CHGG_01679 [Chaetomium globosum CBS 148.51]
  misc_feature (36)..(137): NCBI GI: 256734817 Blast Desc: NECHADRAFT_75464 [Nectria haematococca mpVI 77-13-4]
  misc_feature (35)..(133): NCBI GI: 85111770 Blast Desc: NCU02101 [Neurospora crassa OR74A] gi|28925861|gb|EAA34859.1| [Neurospora crassa OR74A]
  misc_feature (5)..(137): NCBI GI: 46105322 Blast Desc: FG00289.1 [Gibberella zeae PH-1]
  misc_feature (28)..(173): NCBI GI: 39953871 Blast Desc: [Magnaporthe grisea 70-15] gi|145021188|gb|EDK05317.1| [Magnaporthe grisea 70-15]
  misc_feature (36)..(144): NCBI GI: 171695086 Blast Desc: protein product [Podospora anserina] gi|170947785|emb|CAP59948.1| protein product [Podospora anserina]
  misc_feature (36)..(96): NCBI GI: 261355331 Blast Desc: conserved [Verticillium albo-atrum VaMs.102]
MPRPHSPIFNPPSRQPAELAQAAAQENVESKAWAAPFDYFTTKYPNYKGTIRDFIAACYYISLQYRRIHTFLYDDFIRAWHEGFVPYVRDCDKAQPKVEALRALDWYYDFCGRQLYTAGVVNRDNLQDILDFYKEELPVAEKRSGISTNRAASKTTTVDDRTQQHDQNMVALNGVSPVAQEPKGKIPVGEMIKPVAPAVKLPTPLLDTTNVAPTHKSFNNLGTRREESKGPGLTRSLSESASHKRKVEGETSADPPKRRVSGFTTAITDRSMMSDSCSTTSEQSVRSRVTNRSAVVVDSSTGRKKKRDAENPEERRRRKLAKHFAKQKAERDRIMSSSAPVRNTPTSGQR

SEQ ID NO: 38834 - DNA, 14584 bp, Muscodor strobelii; identical to SEQ ID NO: 38831
  misc_feature: SGI EST ID NO. CUFF.93620.3
  misc_feature: Variant of the nucleotide sequence at SEQ ID NO 38832

SEQ ID NO: 38835 - DNA, 327 bp, Muscodor strobelii
  misc_feature: SGI cDNA ID NO. 573503
  misc_feature: Reduced expression when VOC is produced
  misc_feature: Encodes the peptide sequence at SEQ ID NO 38836
atggcttctgaaacgcctatagaggatgcgatccgaacgaagatcacagaagcattcaacccatcacggttggaaatcttcaacgactcacataagcatgcgcatcacaaaccaatgcaaggaagcaaatcaggcgagacgcatttccgcgtcgtcataacctcagaagcctttcagtctaaaatgcagcccgcgagacatcgccttgtctacggactgttcaaggatgagatggcggctgaaggtggtatacatgctctccaactccgtaccatgacgcccgaggaggaggagaggcagaaagccaaggaagcgagcaatgcatag

SEQ ID NO: 38836 - protein, 108 aa, Muscodor strobelii
  misc_feature: SGI Peptide ID NO. 573503
  misc_feature (14)..(97): Pfam Id: PF01722 Pfam Desc: BolA-like protein
  misc_feature (1)..(105): NCBI GI: 116182100 Blast Desc: CHGG_01678 [Chaetomium globosum CBS 148.51] gi|88185975|gb|EAQ93443.1| CHGG_01678 [Chaetomium globosum CBS 148.51]
  misc_feature (1)..(108): NCBI GI: 39945326 Blast Desc: MGG_04645 [Magnaporthe grisea 70-15] gi|145021439|gb|EDK05568.1| MGG_04645 [Magnaporthe grisea 70-15]
  misc_feature (2)..(100): NCBI GI: 46105320 Blast Desc: FG00288.1 [Gibberella zeae PH-1]
  misc_feature (1)..(104): NCBI GI: 154323330 Blast Desc: BC1G_00064 [Botryotinia fuckeliana B05.10] gi|150842293|gb|EDN17486.1| BC1G_00064 [Botryotinia fuckeliana B05.10]
  misc_feature (2)..(107): NCBI GI: 212532621 Blast Desc: BolA domain protein [Penicillium marneffei ATCC 18224] gi|210071831|gb|EEA25920.1| BolA domain protein [Penicillium marneffei ATCC 18224]
  misc_feature (2)..(108): NCBI GI: 121709355 Blast Desc: BolA domain protein [Aspergillus clavatus NRRL 1] gi|119400544|gb|EAW10969.1| BolA domain protein [Aspergillus clavatus NRRL 1]
  misc_feature (6)..(104): NCBI GI: 242776049 Blast Desc: BolA domain protein [Talaromyces stipitatus ATCC 10500] gi|218722383|gb|EED21801.1| BolA domain protein [Talaromyces stipitatus ATCC 10500]
  misc_feature (2)..(104): NCBI GI: 85111784 Blast Desc: NCU02108 [Neurospora crassa OR74A] gi|28925868|gb|EAA34866.1| conserved [Neurospora crassa OR74A]
  misc_feature (15)..(107): NCBI GI: 171695084 Blast Desc: protein product [Podospora anserina] gi|170947784|emb|CAP59947.1| protein product [Podospora anserina]
  misc_feature (1)..(101): NCBI GI: 261355332 Blast Desc: BolA domain-containing protein [Verticillium albo-atrum VaMs.102]
  misc_feature: Useful for introducing or modulating the production of volatile compounds
MASETPIEDAIRTKITEAFNPSRLEIFNDSHKHAHHKPMQGSKSGETHFRVVITSEAFQSKMQPARHRLVYGLFKDEMAAEGGIHALQLRTMTPEEEERQKAKEASNA

SEQ ID NO: 38837 - DNA, 15501 bp, Muscodor strobelii; identical to SEQ ID NO: 38828
  misc_feature: SGI EST ID NO. CUFF.93621.2
  misc_feature: Variant of the nucleotide sequence at SEQ ID NO 38835

SEQ ID NO: 38838 - DNA, 2124 bp, Muscodor strobelii
  misc_feature: SGI cDNA ID NO. 573504
  misc_feature: Reduced expression when VOC is produced
  misc_feature: Encodes the peptide sequence at SEQ ID NO 38839
atggcgtcctctctgtctttacccaaattccccatcttcgaggccatatcgaaacacgacccccaatcgactgcggttgttcattgtctgtcgggccggtcgttcaaatatggcgagctgcttccggacgtctgtcgcgtgcgcgaccagatccacgctactgccggcaaatcggatatacgaggcgagcgcatagcatttctcattgagaacagctatgattatgttgtcacattccttgcgatcctcgcctgtcgcgcgattgcgctgccgctctcgcctccgtttcccgcgcctgaattacagtatattctatcgcaatctcaagcctcgctactgctccattcctccaagttcaccgcgaaggcgacagaagtcctcaccgctccatttcctgacccatcgccgaacaccgaccccgagttcaagccctcgataaaggctgtcgaattggtcaagcatgtcggcctcggcgtcgactcggatgctaccaaactcgagtcggtcaccatttcagacgatgacgacacagagggcgcgggtatgatgctctatacctcaggcacaacggcgcggccgaaaggcgttctcttgccggaaactgcgttgacggcgcaatgccgcgccctgatcgaggcctggaaatacacgcctacagacaggctactccatgttttacccctccatcacattcacggcaccgtcaatgcgacacttacgcctttattcgcgggcagtaccatcgaattcctgtttcccttcaatccggataccgtatggaggcgttttgcgactccgttcctggaatcttcaaagcacaatagcattatgaacactttcaccaacggtctctcccatccttcattaccgagcctgcccagcttccccatttcagaagcaagtagcacaggtttgacaacacctgtcagcgtggatctaccattatcgccggccgatacaagtagaatcagccaaattgccgccgagctgtacggaattattcgactagctgctggacccaacacatctcctgaggccacgggcgtcacattatcgcctcgggagacaaccagaatcagtcaactagctgttgatctgaacaatgtcgttcgcccaccagctgcgcgatccataccatactcaacaagcgcgagcgcagccaacgggatcctagaagagaaatacgcgaacatgtcaaaggagaaaataaccttcttcaccgtggtgcccacggtctatagccgtcttctctctacgcacaaaacattaccccccgagatattagaagcagcccgaacgggagcaagtccagaacatatgcgcgttgccatttccggatcagccgctctccctacgccagtaaagcgcgcatggaaagacatctcccgtggaaatgttctcctagagcgctacggaatgaccgaggtcggtatggcattgtcatgcggtctcgaatattccgatcgcgtagacgggagtgtgggttggccattaccaggcgtcgaagcacggctctgggacacggataccaatgaactcatccctgccgataacctcaaccactccggcgagattcagctccggggtgcgaacgttttccgcgagtactgggcaaatcccacggcaacggcaaaggaatttgtccaaggcgacgacggaaaaggcccctggttcaaaactggcgatgtcgccgagcgacgcgccggcccagaaaccgcaggctcagggtccagcggatcctgggccaaaggcccaatgttcttcatcctaggtcgtcaaagcgcagatataatcaaatcgggcggagaaaaagtgtccgcgctcgaagtcgagcgcgaactcctatctctccccgaagtgctagagacagccgtgatggccgttccatcagggaaatggggtcaaaaagtcggcgcggtcgtaatcttagatcgcacgatctgccccgagggctggaagccaatggatatgcgccgtgctcttagaggcagactggcgaattataagataccgcaggttctgaggatggtcgagcatataccgaggaatgctatggggaagattaataagaaggatttgttgagacaggtgtttttggatgattttagtggggatgaaatgtaa

SEQ ID NO: 38839 - protein, 707 aa, Muscodor strobelii
  misc_feature: SGI Peptide ID NO. 573504
  misc_feature (37)..(625): Pfam Id: PF00501 Pfam Desc: AMP-binding enzyme
  misc_feature (398)..(625): Pfam Id: PF00501 Pfam Desc: AMP-binding enzyme
  misc_feature (61)..(261): Pfam Id: PF00501 Pfam Desc: AMP-binding enzyme
  misc_feature (396)..(706): NCBI GI: 46105318 Blast Desc: FG00287.1 [Gibberella zeae PH-1]
  misc_feature (402)..(707): NCBI GI: 171695082 Blast Desc: protein product [Podospora anserina] gi|170947783|emb|CAP59946.1| protein product [Podospora anserina]
  misc_feature (400)..(707): NCBI GI: 85111782 Blast Desc: NCU02107 [Neurospora crassa OR74A] gi|28925867|gb|EAA34865.1| NCU02107 [Neurospora crassa OR74A]
  misc_feature (402)..(707): NCBI GI: 116182098 Blast Desc: CHGG_01677 [Chaetomium globosum CBS 148.51] gi|88185974|gb|EAQ93442.1| CHGG_01677 [Chaetomium globosum CBS 148.51]
  misc_feature (400)..(707): NCBI GI: 39945328 Blast Desc: MGG_04646 [Magnaporthe grisea 70-15] gi|145021438|gb|EDK05567.1| MGG_04646 [Magnaporthe grisea 70-15]
  misc_feature (384)..(706): NCBI GI: 256734818 Blast Desc: [Nectria haematococca mpVI 77-13-4]
  misc_feature (400)..(707): NCBI GI: 154323328 Blast Desc: BC1G_00063 [Botryotinia fuckeliana B05.10] gi|150842292|gb|EDN17485.1| BC1G_00063 [Botryotinia fuckeliana B05.10]
  misc_feature (399)..(707): NCBI GI: 156057953 Blast Desc: SS1G_04708 [Sclerotinia sclerotiorum 1980] gi|154702493|gb|EDO02232.1| SS1G_04708 [Sclerotinia sclerotiorum 1980]
  misc_feature (399)..(698): NCBI GI: 119488799 Blast Desc: AMP-binding enzyme, [Neosartorya fischeri NRRL 181] gi|119410947|gb|EAW20892.1| AMP-binding enzyme, [Neosartorya fischeri NRRL 181]
  misc_feature (366)..(698): NCBI GI: 70982502 Blast Desc: AMP-binding enzyme [Aspergillus fumigatus Af293] gi|66844403|gb|EAL84741.1| AMP-binding enzyme, [Aspergillus fumigatus Af293] gi|159122980|gb|EDP48100.1| AMP-binding enzyme,
  misc_feature: Useful for introducing or modulating the production of volatile compounds
MASSLSLPKFPIFEAISKHDPQSTAVVHCLSGRSFKYGELLPDVCRVRDQIHATAGKSDIRGERIAFLIENSYDYVVTFLAILACRAIALPLSPPFPAPELQYILSQSQASLLLHSSKFTAKATEVLTAPFPDPSPNTDPEFKPSIKAVELVKHVGLGVDSDATKLESVTISDDDDTEGAGMMLYTSGTTARPKGVLLPETALTAQCRALIEAWKYTPTDRLLHVLPLHHIHGTVNATLTPLFAGSTIEFLFPFNPDTVWRRFATPFLESSKHNSIMNTFTNGLSHPSLPSLPSFPISEASSTGLTTPVSVDLPLSPADTSRISQIAAELYGIIRLAAGPNTSPEATGVTLSPRETTRISQLAVDLNNVVRPPAARSIPYSTSASAANGILEEKYANMSKEKITFFTVVPTVYSRLLSTHKTLPPEILEAARTGASPEHMRVAISGSAALPTPVKRAWKDISRGNVLLERYGMTEVGMALSCGLEYSDRVDGSVGWPLPGVEARLWDTDTNELIPADNLNHSGEIQLRGANVFREYWANPTATAKEFVQGDDGKGPWFKTGDVAERRAGPETAGSGSSGSWAKGPMFFILGRQSADIIKSGGEKVSALEVERELLSLPEVLETAVMAVPSGKWGQKVGAVVILDRTICPEGWKPMDMRRALRGRLANYKIPQVLRMVEHIPRNAMGKINKKDLLRQVFLDDFSGDEM

SEQ ID NO: 38840 - DNA, 14584 bp, Muscodor strobelii; identical to SEQ ID NO: 38831
  misc_feature: SGI EST ID NO. CUFF.93620.3
  misc_feature: Variant of the nucleotide sequence at SEQ ID NO 38838

SEQ ID NO: 38841 - DNA, 780 bp, Muscodor strobelii
  misc_feature: SGI cDNA ID NO. 573505
  misc_feature: Reduced expression when VOC is produced
  misc_feature: Encodes the peptide sequence at SEQ ID NO 38842
atggctgaggaacaggtcgacctcaagacggtgcccatctcgcccaacggagacaagtcggaggagcctctgcccaccgacgctgagggcaagatcgtcacagtcttccacgacaaggacaacttcaacgtcctgcatcctctccagaaccgatggaccttttggtacacaaaacccgccagcggcaagggcgacaactggaacgagcttctgaaggaactttacacggtcaactcagttgaagagttctggggcgtctttaacaacatcaccaatgtctctcagctccccatgaagtccgactaccacctgttcaaggagggcgtgcgaccagagtgggaggacccccagaacaagcacggcggcagatggtcatacatgatcaaggacaagcggagcattgatattgacaagctctggatgtacacttgtgctattgccatcggtgagaatctggaggaggcccccgctggtgaggatcagggagaggtcatgggagtcgtcgtcaacgtgcgtaaggccttcttccgcatcagcgtttggacccgcaccgttggtaaggccatccctggtggtggcaacggtgatgtcgccggcggcaagggccgtccggaggagaaggccaaggcgatcctcaagggtgtcggagtgaacttcaagaagcttgctatccagcaggttgtcgatctacccgattccgagaaggctgttgagttcactggtcacaccgactcggctcactctggcagtacccgtgccaaacccaaggatatcgtttaa

SEQ ID NO: 38842 - protein, 259 aa, Muscodor strobelii
  misc_feature: SGI Peptide ID NO. 573505
  misc_feature (1)..(259): Pfam Id: PF01652 Pfam Desc: Eukaryotic initiation factor 4E
  misc_feature (1)..(184): Pfam Id: PF01652 Pfam Desc: Eukaryotic initiation factor 4E
  misc_feature (4)..(259): NCBI GI: 171695080 Blast Desc: protein product [Podospora anserina] gi|170947782|emb|CAP59945.1| protein product [Podospora anserina]
  misc_feature (2)..(259): NCBI GI: 261355334 Blast Desc: eukaryotic translation initiation factor 4E-1 [Verticillium albo-atrum VaMs.102]
  misc_feature (4)..(259): NCBI GI: 116182096 Blast Desc: CHGG_01676 [Chaetomium globosum CBS 148.51] gi|88185973|gb|EAQ93441.1| CHGG_01676 [Chaetomium globosum CBS 148.51]
  misc_feature (4)..(259): NCBI GI: 85113904 Blast Desc: eukaryotic translation initiation factor 4E [Neurospora crassa OR74A] gi|28926391|gb|EAA35367.1| eukaryotic translation initiation factor 4E [Neurospora crassa OR74A]
  misc_feature (5)..(259): NCBI GI: 39945330 Blast Desc: conserved [Magnaporthe grisea 70-15] gi|145021437|gb|EDK05566.1| conserved [Magnaporthe grisea 70-15]
  misc_feature (5)..(259): NCBI GI: 59802840 Blast Desc: eukaryotic translation initiation factor 4E-1-like protein [Magnaporthe grisea]
  misc_feature (4)..(259): NCBI GI: 154323326 Blast Desc: BC1G_00062 [Botryotinia fuckeliana B05.10] gi|150842291|gb|EDN17484.1| BC1G_00062 [Botryotinia fuckeliana B05.10]
  misc_feature (2)..(256): NCBI GI: 156057951 Blast Desc: translation Initiation Factor Eif4e [Sclerotinia sclerotiorum 1980] gi|154702492|gb|EDO02231.1| translation Initiation Factor Eif4e [Sclerotinia sclerotiorum 1980]
  misc_feature (3)..(256): NCBI GI: 189202914 Blast Desc: eukaryotic translation initiation factor 4E [Pyrenophora tritici-repentis Pt-1C-BFP] gi|187984892|gb|EDU50380.1| eukaryotic translation initiation 4E
  misc_feature (30)..(259): NCBI GI: 115402409 Blast Desc: eukaryotic translation initiation factor 4E-1 [Aspergillus terreus NIH2624] gi|114189127|gb|EAU30827.1| eukaryotic translation initiation factor 4E-1 [Aspergillus
  misc_feature: Useful for introducing or modulating the production of volatile compounds
MAEEQVDLKTVPISPNGDKSEEPLPTDAEGKIVTVFHDKDNFNVLHPLQNRWTFWYTKPASGKGDNWNELLKELYTVNSVEEFWGVFNNITNVSQLPMKSDYHLFKEGVRPEWEDPQNKHGGRWSYMIKDKRSIDIDKLWMYTCAIAIGENLEEAPAGEDQGEVMGVVVNVRKAFFRISVWTRTVGKAIPGGGNGDVAGGKGRPEEKAKAILKGVGVNFKKLAIQQVVDLPDSEKAVEFTGHTDSAHSGSTRAKPKDIV

SEQ ID NO: 38843 - DNA, 1683 bp, Muscodor strobelii
  misc_feature: SGI EST ID NO. CUFF.93455.0
  misc_feature: Variant of the nucleotide sequence at SEQ ID NO 38841
ctcgccctgaaaaaagtgcccaaaaagtgaccgacccaaaaatcctactcactgtgacttgcgagtacgtagacgaatcaacgcagaaacgatattgacgagacgacggaatacataccgaccgagactcgttgactgtgcctggtgcagagtcgcgattgattgttttcgcccggtctacgattttggcaagcagcgactgccccaggcgaccgcacccatcatcccgcttcgctctttcccgctgttgttacagtggcaactgcgacgaaactcctagcaaccacatccatcgccattgccgtcggcgcatcttaggaaagagatagccacagctcttccctaccccaccatcctcgatattcaatcgccgccttcttcaggaatccctccctcttcctgacgataccaaacaccacccctcttccccgccactccaccaagtcgcagcgagacgcacatcctttctcttacctaccaacctcgccgttgcaaactccctaataccaccctacgcgcacctcacgctctcgctcacactcaagatggctgaggaacaggtcgacctcaagacggtgcccatctcgcccaacggagacaagtcggaggagcctctgcccaccgacgctgagggcaagatcgtcacagtcttccacgacaaggacaacttcaacgtcctgcatcctctccagaaccgatggaccttttggtacacaaaacccgccagcggcaagggcgacaactggaacgagcttctgaaggaactttacacggtcaactcagttgaagagttctggggcgtctttaacaacatcaccaatgtctctcagctccccatgaagtccgactaccacctgttcaaggagggcgtgcgaccagagtgggaggacccccagaacaagcacggcggcagatggtcatacatgatcaaggacaagcggagcattgatattgacaagctctggatgtacacttgtgctattgccatcggtgagaatctggaggaggcccccgctggtgaggatcagggagaggtcatgggagtcgtcgtcaacgtgcgtaaggccttcttccgcatcagcgtttggacccgcaccgttggtaaggccatccctggtggtggcaacggtgatgtcgccggcggcaagggccgtccggaggagaaggccaaggcgatcctcaagggtgtcggagtgaacttcaagaagcttgctatccagcaggttgtcgatctacccgattccgagaaggctgttgagttcactggtcacaccgactcggctcactctggcagtacccgtgccaaacccaaggatatcgtttaaggcgtgcacaacagagtcatgcgggaggcgctatcaggatgcactatttttgctactacgttgctttcatggcggcagaatttcgacagaaaaagcacgacggaatccgggtagcattaggggtcgcgccggaaagcatatgctttgcctgtcaggtctgacgagagacgaacatctctaggttcagagtgtgtttcctgtaaagcaggctccatccagtgggcctcatacatatgtaggaacctgccaacaagctgaggcttgatgtaataggcagtgatggcgccgttttcgcaagccaacgaaaaaatataccaaaatagcttcttaataacccctctgccctttggtaaccttg

SEQ ID NO: 38844 - DNA, 798 bp, Muscodor strobelii
  misc_feature: SGI cDNA ID NO. 573506
  misc_feature: Encodes the peptide sequence at SEQ ID NO 38845
atggcttctcaacctgcccagaggcaaaagccccttttgagggaacgtagtcctaatgaccctcccattattaccacaccgattgacttcgcggcctcacctctagccaaggactacagctcattcttcgccatgactatagataatcttttgacattagaggaatgtgctgctttacaaggggccgccggagataattggaaagacttgagtaacggcgatgcatatcgcgaatgtcaacaaaatctcgtcttttcgcatgagtggtcatcggctctcttcgagcggatcgcgtcgtgtctgccagatgaggtcaaagtcttgaaaaaaggtgccgcgctcgcgcaaaccgtggctggctcctcgcacctcaaggcgaacttgggtgctagaaagacagtgtggcggctgaaagaagcaaatgagagactgagttttttgcgctaccacccgggccatttcttcaagccgcactgcgatgccttgtatgcgcgcgaagggaaggacgagaaaagttttcttacgtgccagatatatctgaacgacgcccccaatggcacctatccaagtactagcggaggcggcgagacgagattctgggctcctaagacacagaaaccgattgaaggagagaataacgagccgcaaagggcatttctggacgtggttcccaagatggggtcagcagtcgtgttccaacagcgcatgctctggcattcgggtcaagaggtattaaatggagagaagtatacggtacgtctggatttgatgtatgagcgacactttgaaagagtctga

SEQ ID NO: 38845 - protein, 265 aa, Muscodor strobelii
  misc_feature: SGI Peptide ID NO. 573506
  misc_feature (25)..(260): NCBI GI: 169857777 Blast Desc: CC1G_08045 [Coprinopsis cinerea okayama7#130] gi|116503426|gb|EAU86321.1| CC1G_08045 [Coprinopsis cinerea okayama7#130]
  misc_feature (26)..(260): NCBI GI: 170092066 Blast Desc: [Laccaria bicolor S238N-H82] gi|164648748|gb|EDR12991.1| [Laccaria bicolor S238N-H82]
  misc_feature (14)..(263): NCBI GI: 170111334 Blast Desc: [Laccaria bicolor S238N-H82] gi|164638229|gb|EDR02508.1| [Laccaria bicolor S238N-H82]
  misc_feature (2)..(258): NCBI GI: 169861887 Blast Desc: CC1G_08131 [Coprinopsis cinerea okayama7#130] gi|116501306|gb|EAU84201.1| CC1G_08131 [Coprinopsis cinerea okayama7#130]
  misc_feature (18)..(259): NCBI GI: 240105155 Blast Desc: CPC735_047180 [Coccidioides posadasii C735 delta SOWgp]
  misc_feature (18)..(259): NCBI GI: 119194795 Blast Desc: CIMG_01772 [Coccidioides immitis RS]
  misc_feature (21)..(258): NCBI GI: 189197411 Blast Desc: oxidoreductase domain containing protein [Pyrenophora tritici-repentis Pt-1C-BFP] gi|187980991|gb|EDU47617.1| oxidoreductase domain containing protein [Pyrenophora Pt-1C-BFP]
  misc_feature (17)..(259): NCBI GI: 256720706 Blast Desc: NECHADRAFT_96702 [Nectria haematococca mpVI 77-13-4]
  misc_feature (3)..(263): NCBI GI: 169861887 Blast Desc: CC1G_08131 [Coprinopsis cinerea okayama7#130] gi|116501306|gb|EAU84201.1| CC1G_08131 [Coprinopsis cinerea okayama7#130]
  misc_feature (28)..(260): NCBI GI: 225680807 Blast Desc: conserved [Paracoccidioides brasiliensis Pb03] gi|226292503|gb|EEH47923.1| conserved [Paracoccidioides brasiliensis Pb18]
MASQPAQRQKPLLRERSPNDPPIITTPIDFAASPLAKDYSSFFAMTIDNLLTLEECAALQGAAGDNWKDLSNGDAYRECQQNLVFSHEWSSALFERIASCLPDEVKVLKKGAALAQTVAGSSHLKANLGARKTVWRLKEANERLSFLRYHPGHFFKPHCDALYAREGKDEKSFLTCQIYLNDAPNGTYPSTSGGGETRFWAPKTQKPIEGENNEPQRAFLDVVPKMGSAVVFQQRMLWHSGQEVLNGEKYTVRLDLMYERHFERV

SEQ ID NO: 38846 - DNA, 2918 bp, Muscodor strobelii
  misc_feature: SGI EST ID NO. CUFF.93457.0
  misc_feature: Variant of the nucleotide sequence at SEQ ID NO 38844
actgcccctctgcgacttgagtcacacttgccacaaagctaagtcgcaaagctcctaccaaaaggcatattaaagaagcaagaaggcccccgagattacgcatctcttatattacttcctcttcttcctcgaatgacaatctagttcagaacgttgcttggatgctcagtactcacttgcactaatggccacctatcgcctctatcacgatggcttctcaacctgcccagaggcaaaagccccttttgagggaacgtagtcctaatgaccctcccattattaccacaccgattgacttcgcggcctcacctctagccaaggactacagctcattcttcgccatgactatagataatcttttgacattagaggaatgtgctgctttacaaggggccgccggagataattggaaagacttgagtaacggcgatgcatatcgcgaatgtcaacaaaatctcgtcttttcgcatgagtggtcatcggctctcttcgagcggatcgcgtcgtgtctgccagatgaggtcaaagtcttgaaaaaaggtgccgcgctcgcgcaaaccgtggctggctcctcgcacctcaaggcgaacttgggtgctagaaagacagtgtggcggctgaaagaagcaaatgagagactgagttttttgcgctaccacccgggccatttcttcaagccgcactgcgatgccttgtatgcgcgcgaagggaaggacgagaaaagttttcttacgtgccagatatatctgaacgacgcccccaatggcacctatccaagtactagcggaggcggcgagacgagattctgggctcctaagacacagaaaccgattgaaggagagaataacgagccgcaaagggcatttctggacgtggttcccaagatggggtcagcagtcgtgttccaacagcgcatgctctggcattcgggtcaagaggtattaaatggagagaagtatacggtacgtctggatttgatgtatgagcgacactttgaaagagtctgagatactactggctattggtgtttatccgatttatcctaacagaaagccaaacctcagttgttgtgatcatgggtgggtagcacagcactataacctacctagtcactcggctttgtttgtagaaaacatgactttcattaaatcattgtctggttcgcacaaagattactaagagagttatattgacggacagatcaacttgcacgaagcttgtctcgagctgaagatctgcgagtggttggtacatctaatcttgtcttaaatccggggataggactcggggaagggattgcttacccacgttcacgatagcttcatctccactggtctggacccgagtcagcgccccaccgccacgactcccaaaatcgcaactccctatcgcgacccacataatattattttcttcttttttttctgtattccgaaacatcgcgaagtcgtactgcacaaagagggcagtagccactcatgggccaggcgaggcgtctgctgcctccctcgggcagtctgcctggtttgcgcacccttaatcagctctcagagtcgtgcatctcatccgcgctgagcgatctttccgctctttactgtcccttaccgacttcacactcgtttcagacatgttctgcaccaagagattcattggccacagcagactctggctatgcgtctgacaacgaagacgatgacttaaacgtggcggaagacgcagtatttgaaataaaggacgacctccacgaacgcgcatttgcagagcgctggctgacgggattcctcggctgtgtggacgaactctcttgtttcgagagcgaggaatcacgggatcgtgctgtggagcgtgcgtcttgtgtcctcgcttcgttctacggtcaagacgagacagaggatgaacaaactgagattacgagggaatatcacttcaaactgaatgccggattcgtagacgccaaaactcaagagaactctccgatctgcgaaaatctcactgtacagctcaccgacggcttagcagggagagacagcacagaccacacagatgtcggcctacagagctggggcgctgcattcatgttcagcgagttgatgtgcgcgtcgccaggaagattcaacttttccgaagctgcactgggctctgcgccacggatcattgagctcggagcaggcacgggtctagttggcatcgcactggggaaaattctgccgcgtcttggtgtgacacagtcaacgatcatagcgacggactttcacccaactattctcgccaatctgcagaccaacgtagacagaaacttcacgacgcaaggcagcgcaacaaaaccagcgatcaaagttgcacccctggattgggaaactccggatctctctgcgccacttgacagagccgccgacctgctagtcgcgacagatgtgatctatgacccggagcacgcagtctggctacgcgattgcgcggcacagatgctcaagccaaatggcgtcttctggttgatgttgaccgtacgaacgacgggcaagttcgagggcatcgcgagtacggcacgtgcggccttcaacggacgtgatggactgaagaacgctgaagggcaggcacttacaatccttgacgaggagcggtttgcaaggccaaatggcattggacgaggcgatgagagcgagtatagactttttagaatcggctgggcttgagaccggaagcatatagacggttagacaactggaaatcggagcttagatgtgaatggcattatagacacgcgatagacgatagatgatacatgatagagaagcacatagatgagcattttcacgcctctacttcctactgagagctaagttctagtaccgttttcgagacacattggtttcatgactcgtttgtttcagaaggcctctgacaaagtggcatttgcc

SEQ ID NO: 38847 - DNA, 1215 bp, Muscodor strobelii
  misc_feature: SGI cDNA ID NO. 573507
  misc_feature: Encodes the peptide sequence at SEQ ID NO 38848
atgggccaggcgaggcgtctgctgcctccctcgggcagtctgcctggtttgcgcacccttaatcagctctcagagtcgtgcatctcatccgcgctgagcgatctttccgctctttactgtcccttaccgacttcacactcgtttcagacatgttctgcaccaagagattcattggccacagcagactctggctatgcgtctgacaacgaagacgatgacttaaacgtggcggaagacgcagtatttgaaataaaggacgacctccacgaacgcgcatttgcagagcgctggctgacgggattcctcggctgtgtggacgaactctcttgtttcgagagcgaggaatcacgggatcgtgctgtggagcgtgcgtcttgtgtcctcgcttcgttctacggtcaagacgagacagaggatgaacaaactgagattacgagggaatatcacttcaaactgaatgccggattcgtagacgccaaaactcaagagaactctccgatctgcgaaaatctcactgtacagctcaccgacggcttagcagggagagacagcacagaccacacagatgtcggcctacagagctggggcgctgcattcatgttcagcgagttgatgtgcgcgtcgccaggaagattcaacttttccgaagctgcactgggctctgcgccacggatcattgagctcggagcaggcacgggtctagttggcatcgcactggggaaaattctgccgcgtcttggtgtgacacagtcaacgatcatagcgacggactttcacccaactattctcgccaatctgcagaccaacgtagacagaaacttcacgacgcaaggcagcgcaacaaaaccagcgatcaaagttgcacccctggattgggaaactccggatctctctgcgccacttgacagagccgccgacctgctagtcgcgacagatgtgatctatgacccggagcacgcagtctggctacgcgattgcgcggcacagatgctcaagccaaatggcgtcttctggttgatgttgaccgtacgaacgacgggcaagttcgagggcatcgcgagtacggcacgtgcggccttcaacggacgtgatggactgaagaacgctgaagggcaggcacttacaatccttgacgaggagcggtttgcaaggccaaatggcattggacgaggcgatgagagcgagtatagactttttagaatcggctgggcttga

SEQ ID NO: 38848 - protein, 404 aa, Muscodor strobelii
  misc_feature: SGI Peptide ID NO. 573507
  misc_feature (226)..(337): Pfam Id: PF08242 Pfam Desc: Methyltransferase domain
  misc_feature (1)..(404): NCBI GI: 256731614 Blast Desc: NECHADRAFT_48542 [Nectria haematococca mpVI 77-13-4]
  misc_feature (8)..(404): NCBI GI: 261361371 Blast Desc: conserved [Verticillium albo-atrum VaMs.102]
  misc_feature (1)..(404): NCBI GI: 46122915 Blast Desc: FG05835.1 [Gibberella zeae PH-1]
  misc_feature (8)..(404): NCBI GI: 189197075 Blast Desc: conserved [Pyrenophora tritici-repentis Pt-1C-BFP] gi|187980823|gb|EDU47449.1| conserved [Pyrenophora tritici-repentis Pt-1C-BFP]
  misc_feature (8)..(404): NCBI GI: 39976295 Blast Desc: MGG_05926 [Magnaporthe grisea 70-15] gi|145011812|gb|EDJ96468.1| MGG_05926 [Magnaporthe grisea 70-15]
  misc_feature (74)..(404): NCBI GI: 169621925 Blast Desc: SNOG_14175 [Phaeosphaeria nodorum SN15] gi|111057292|gb|EAT78412.1| SNOG_14175 [Phaeosphaeria nodorum SN15]
  misc_feature (10)..(404): NCBI GI: 169845587 Blast Desc: CC1G_00692 [Coprinopsis cinerea okayama7#130] gi|116509578|gb|EAU92473.1| CC1G_00692 [Coprinopsis cinerea okayama7#130]
  misc_feature (7)..(403): NCBI GI: 170106794 Blast Desc: [Laccaria bicolor S238N-H82] gi|164640519|gb|EDR04784.1| [Laccaria bicolor S238N-H82]
  misc_feature (7)..(363): NCBI GI: 71006750 Blast Desc: UM01893.1 [Ustilago maydis 521] gi|46097541|gb|EAK82774.1| UM01893.1 [Ustilago maydis 521]
  misc_feature (168)..(350): NCBI GI: 169843014 Blast Desc: CC1G_02819 [Coprinopsis cinerea okayama7#130] gi|116510694|gb|EAU93589.1| CC1G_02819 [Coprinopsis cinerea okayama7#130]
MGQARRLLPPSGSLPGLRTLNQLSESCISSALSDLSALYCPLPTSHSFQTCSAPRDSLATADSGYASDNEDDDLNVAEDAVFEIKDDLHERAFAERWLTGFLGCVDELSCFESEESRDRAVERASCVLASFYGQDETEDEQTEITREYHFKLNAGFVDAKTQENSPICENLTVQLTDGLAGRDSTDHTDVGLQSWGAAFMFSELMCASPGRFNFSEAALGSAPRIIELGAGTGLVGIALGKILPRLGVTQSTIIATDFHPTILANLQTNVDRNFTTQGSATKPAIKVAPLDWETPDLSAPLDRAADLLVATDVIYDPEHAVWLRDCAAQMLKPNGVFWLMLTVRTTGKFEGIASTARAAFNGRDGLKNAEGQALTILDEERFARPNGIGRGDESEYRLFRIGWA

SEQ ID NO: 38849 - DNA, 2918 bp, Muscodor strobelii; identical to SEQ ID NO: 38846
  misc_feature: SGI EST ID NO. CUFF.93457.0
  misc_feature: Variant of the nucleotide sequence at SEQ ID NO 38847

SEQ ID NO: 38850 - DNA, 294 bp, Muscodor strobelii
  misc_feature: SGI cDNA ID NO. 573508
  misc_feature: Encodes the peptide sequence at SEQ ID NO 38851
atgcatgtcatgaggactctcatacgatttgtagagattctcagcatctatgccgatggcacaccgccagatattgaggaaatcgaaaggaatatgtttggtgggcagttggctctgtggaccggtcgtcgcgtcattcaaaactatgtcgagctgccacaactattcatcggtatccagaaagatggccctcctggtgatgcgaccagaacgtacgtgcgctcagaagatatcgtgaagaagatcgcccttgtgcctgactctaaagacggttcgttcctcgctaggttttag

SEQ ID NO: 38851 - protein, 97 aa, Muscodor strobelii
  misc_feature: SGI Peptide ID NO. 573508
MHVMRTLIRFVEILSIYADGTPPDIEEIERNMFGGQLALWTGRRVIQNYVELPQLFIGIQKDGPPGDATRTYVRSEDIVKKIALVPDSKDGSFLARF

SEQ ID NO: 38852 - DNA, 996 bp, Muscodor strobelii
  misc_feature: SGI cDNA ID NO. 573509
  misc_feature: Elevated expression when VOC is produced
  misc_feature: Encodes the peptide sequence at SEQ ID NO 38853
atgaccagtaaagcgcgagcgacaactggaacctatgatgtctccggcaggactgcgatcgtgactggagctggctcaggcattaactacgaattcgctgtccttctactgtctttgaactgcaatgttgtcctggcagacattgctttgcggcctgaagcagaccaactgatcaagaaatacggcggttcaaaatcatccccaagggccgtcttcgtgaagacagatgtctcaaaatggaccgacttatcgcgcatgtttgcgacaactcttgatgaatttagtgactttgatatcgtgtgtccgggagctggtgtctacgagcctttttggtcgagcttttggcaccctcctggatctccgaatagccgcgatgggtccgagatggaccggtatgcccttctagatatcaacctgactcatccaatacgtgtaactcaaatggcactttccctttggcttcacccgagatccggtctagatgggtcgagtgaaaagcttgataaggcacctgatctgagctcaaaacgcattgtgcacatcggttcggtcgcgggctacgttgtgaatctaaatgcacctatctatggagcaacgaaatttggcatcaccgggtttgtcagatgccttgcgcctctcgaagccgcaatcggagtgcgcgtgaatgccgttgcgccaggtgtagtgcgtacgccgctatgggtcgagcacccagagaagctacgctatgtaaagcagagcacagacacttgggtcacgcctgaagaggtggcgcatgcaatgttacgatgtgtcacagagccggacttggtcggaggtacaattctcgaagtcgggaagaagacaaggagggtcccggccttcaatgatccagggccggacatgaatcccgctgcaggcataattgcaagtcatgctgctagcaaaggcattgaggatatcatggggtggctgaaagatgtcgatatctggggacgtagggattcaaagctatga

SEQ ID NO: 38853 - protein, 331 aa, Muscodor strobelii
  misc_feature: SGI Peptide ID NO. 573509
  misc_feature (17)..(215): Pfam Id: PF00106 Pfam Desc: short chain dehydrogenase
  misc_feature (12)..(327): NCBI GI: 256726653 Blast Desc: NECHADRAFT_33164 [Nectria haematococca mpVI 77-13-4]
  misc_feature (12)..(325): NCBI GI: 145256358 Blast Desc: An19g00290 [Aspergillus niger CBS 513.88] gi|134084764|emb|CAK47352.1| protein product [Aspergillus niger]
  misc_feature (1)..(327): NCBI GI: 46110771 Blast Desc: FG02267.1 [Gibberella zeae PH-1]
  misc_feature (33)..(325): NCBI GI: 145236821 Blast Desc: An06g02360 [Aspergillus niger] gi|134075519|emb|CAK48080.1| protein product [Aspergillus niger]
  misc_feature (27)..(325): NCBI GI: 169613110 Blast Desc: SNOG_09685 [Phaeosphaeria nodorum SN15] gi|160702650|gb|EAT82950.2| SNOG_09685 [Phaeosphaeria nodorum SN15]
  misc_feature (11)..(326): NCBI GI: 242790432 Blast Desc: short chain dehydrogenase/reductase family oxidoreductase, [Talaromyces stipitatus ATCC 10500] gi|218718143|gb|EED17563.1| short chain dehydrogenase/reductase
  misc_feature (11)..(293): NCBI GI: 238505068 Blast Desc: short chain dehydrogenase/reductase family oxidoreductase, [Aspergillus flavus NRRL3357] gi|220689877|gb|EED46227.1| short chain dehydrogenase/reductase
  misc_feature (12)..(293): NCBI GI: 70997956 Blast Desc: short chain dehydrogenase/reductase family oxidoreductase, [Aspergillus fumigatus Af293] gi|66851346|gb|EAL91672.1| short chain dehydrogenase/reductase
  misc_feature (12)..(293): NCBI GI: 159126556 Blast Desc: NAD-dependent 15-hydroxyprostaglandin dehydrogenase [Aspergillus fumigatus A1163]
  misc_feature (12)..(293): NCBI GI: 119479465 Blast Desc: NAD-dependent 15-hydroxyprostaglandin dehydrogenase [Neosartorya fischeri NRRL 181] gi|119407915|gb|EAW17864.1| NAD-dependent 15-hydroxyprostaglandin dehydrogenase [Neosartorya
  misc_feature (14)..(278): SWISSPROT Homolog: EC 1.1.1.141 15-hydroxyprostaglandin dehydrogenase (NAD(+))
  misc_feature: Useful for introducing or modulating the production of volatile compounds
MTSKARATTGTYDVSGRTAIVTGAGSGINYEFAVLLLSLNCNVVLADIALRPEADQLIKKYGGSKSSPRAVFVKTDVSKWTDLSRMFATTLDEFSDFDIVCPGAGVYEPFWSSFWHPPGSPNSRDGSEMDRYALLDINLTHPIRVTQMALSLWLHPRSGLDGSSEKLDKAPDLSSKRIVHIGSVAGYVVNLNAPIYGATKFGITGFVRCLAPLEAAIGVRVNAVAPGVVRTPLWVEHPEKLRYVKQSTDTWVTPEEVAHAMLRCVTEPDLVGGTILEVGKKTRRVPAFNDPGPDMNPAAGIIASHAASKGIEDIMGWLKDVDIWGRRDSKL

SEQ ID NO: 38854 - DNA, 1158 bp, Muscodor strobelii
  misc_feature: SGI EST ID NO. CUFF.93403.0
  misc_feature: Variant of the nucleotide sequence at SEQ ID NO 38852
ggatcatgaaaacatcagttttcttactttttcacgaaccagtacttcatattattgaacataacttcttacgcgatgaccagtaaagcgcgagcgacaactggaacctatgatgtctccggcaggactgcgatcgtgactggagctggctcaggcattaactacgaattcgctgtccttctactgtctttgaactgcaatgttgtcctggcagacattgctttgcggcctgaagcagaccaactgatcaagaaatacggcggttcaaaatcatccccaagggccgtcttcgtgaagacagatgtctcaaaatggaccgacttatcgcgcatgtttgcgacaactcttgatgaatttagtgactttgatatcgtgtgtccgggagctggtgtctacgagcctttttggtcgagcttttggcaccctcctggatctccgaatagccgcgatgggtccgagatggaccggtatgcccttctagatatcaacctgactcatccaatacgtgtaactcaaatggcactttccctttggcttcacccgagatccggtctagatgggtcgagtgaaaagcttgataaggcacctgatctgagctcaaaacgcattgtgcacatcggttcggtcgcgggctacgttgtgaatctaaatgcacctatctatggagcaacgaaatttggcatcaccgggtttgtcagatgccttgcgcctctcgaagccgcaatcggagtgcgcgtgaatgccgttgcgccaggtgtagtgcgtacgccgctatgggtcgagcacccagagaagctacgctatgtaaagcagagcacagacacttgggtcacgcctgaagaggtggcgcatgcaatgttacgatgtgtcacagagccggacttggtcggaggtacaattctcgaagtcgggaagaagacaaggagggtcccggccttcaatgatccagggccggacatgaatcccgctgcaggcataattgcaagtcatgctgctagcaaaggcattgaggatatcatggggtggctgaaagatgtcgatatctggggacgtagggattcaaagctatgattgtgatactagataattcgaattgaaaagcgttttgcaagagaaagctcgcatatctgcaattgctttgatgagtaataatcaaag

SEQ ID NO: 38855 - DNA, 1140 bp, Muscodor strobelii
  misc_feature: SGI cDNA ID NO. 573510
  misc_feature: Encodes the peptide sequence at SEQ ID NO 38856
atgcattactatgagacaccgagccacaacatcgccgcggcggtagctctgtcagtggctgacattattgccgtgagcttacgattctgggtgcggacgaggcagaggcaaccactgaaggcggacgattggctcatgatacctgctctattcctcacggtaggaatcgcaatagccattctatacggcgtttcgcaagaggccgttgcctatcctctacaacttccagaaggctatactggtagtccctatctaatatacacacgtcaactagagctgtcgggccaggttgaatgggcattcaatctaatgttccccttggcccttggttgcacgaaagctagccttctgtttttctacctcagggttttttcggtggaaaagtggaacaaacgaacaattttcatcaagggcgtgattatcttcgttgccctatgggcaatagcttttttctttgcagtgctcttcgcctgcggcacacatatcgatgctatatggggcccaactcagaatctatacaccatctgcaccaatacacttcacaggcttgtgtcgttgtgctttaccgatttcttcgctgatatagtaatcatcctcatcccagtcccaattatctggcgcttaaatctcaccagagggagaaagattgctatatcggcggtgttcctccttggagtagtttccatcgctgcttcgctaactcgcttgatcattgtctccaatacagtcttcatcggattcgccccatctaatgatgagattctcggtgtgacattggttatatattggggcctgatagaacttggtatcggtgttattgtcgcatgtctaccttcccttgtcttccttctcaaagacatctcgtgggagagggcaacctctagcgccaggagcctagtacgtactagacactggggatcgtcgtatacacagcacgatgagcatcctgcgataccgagtcgcatgtacgacgtggaatctggaaaagagagaagcggatctgttcgcggaagctcttcttaccatgtccgaaggcaaatcagccatgacccgatgcccgccgggagcgtcaaaattgctcgcccaactcaaattcgagaatcgagaagctatgacacgaatatcgccggaccaagatag

SEQ ID NO: 38856 - protein, 379 aa, Muscodor strobelii
  misc_feature: SGI Peptide ID NO. 573510
  misc_feature (8)..(366): NCBI GI: 242784989 Blast Desc: conserved [Talaromyces stipitatus ATCC 10500] gi|218720648|gb|EED20067.1| conserved [Talaromyces stipitatus ATCC 10500]
  misc_feature (25)..(298): NCBI GI: 156057509 Blast Desc: [Sclerotinia sclerotiorum 1980] gi|154702271|gb|EDO02010.1| [Sclerotinia sclerotiorum 1980]
  misc_feature (12)..(342): NCBI GI: 242816288 Blast Desc: conserved [Talaromyces stipitatus ATCC 10500] gi|218715084|gb|EED14507.1| conserved [Talaromyces stipitatus ATCC 10500]
  misc_feature (11)..(369): NCBI GI: 242809618 Blast Desc: conserved [Talaromyces stipitatus ATCC 10500] gi|218716033|gb|EED15455.1| conserved [Talaromyces stipitatus ATCC 10500]
  misc_feature (5)..(303): NCBI GI: 169596951 Blast Desc: SNOG_01252 [Phaeosphaeria nodorum SN15] gi|160707409|gb|EAT90901.2| SNOG_01252 [Phaeosphaeria nodorum SN15]
  misc_feature (4)..(288): NCBI GI: 242818742 Blast Desc: conserved [Talaromyces stipitatus ATCC 10500] gi|218713643|gb|EED13067.1| conserved [Talaromyces stipitatus ATCC 10500]
  misc_feature (6)..(278): NCBI GI: 212534488 Blast Desc: conserved [Penicillium marneffei ATCC 18224] gi|210069799|gb|EEA23889.1| conserved [Penicillium marneffei ATCC 18224]
  misc_feature (4)..(286): NCBI GI: 145249196 Blast Desc: An14g03120 [Aspergillus niger] gi|134081615|emb|CAK46549.1| protein product [Aspergillus niger]
  misc_feature (4)..(345): NCBI GI: 85092407 Blast Desc: NCU04931 [Neurospora crassa OR74A] gi|28920784|gb|EAA30143.1| [Neurospora crassa OR74A]
  misc_feature (6)..(333): NCBI GI: 242800335 Blast Desc: conserved [Talaromyces stipitatus ATCC 10500] gi|218716911|gb|EED16332.1| conserved [Talaromyces stipitatus ATCC 10500]
MHYYETPSHNIAAAVALSVADIIAVSLRFWVRTRQRQPLKADDWLMIPALFLTVGIAIAILYGVSQEAVAYPLQLPEGYTGSPYLIYTRQLELSGQVEWAFNLMFPLALGCTKASLLFFYLRVFSVEKWNKRTIFIKGVIIFVALWAIAFFFAVLFACGTHIDAIWGPTQNLYTICTNTLHRLVSLCFTDFFADIVIILIPVPIIWRLNLTRGRKIAISAVFLLGVVSIAASLTRLIIVSNTVFIGFAPSNDEILGVTLVIYWGLIELGIGVIVACLPSLVFLLKDISWERATSSARSLVRTRHWGSSYTQHDEHPAIPSRMYDVESGKERSGSVRGSSSYHVRRQISHDPMPAGSVKIARPTQIRESRSYDTNIAGPR

SEQ ID NO: 38857 - DNA, 237 bp, Muscodor strobelii
  misc_feature: SGI EST ID NO. CUFF.93400.0
  misc_feature: Variant of the nucleotide sequence at SEQ ID NO 38855
cagaatctatacaccatctgcaccaatacacttcacaggcttgtgtcgttgtgctttaccgatttcttcgctgatatagtaatcatcctcatcccagtcccaattatctggcgcttaaatctcaccagagggagaaagattgctatatcggcggtgttcctccttggagtagtttccatcgctgcttcgctaactcgcttgatcattgtctccaatacagtcttcatcggattcgcc

SEQ ID NO: 38858 - DNA, 1278 bp, Muscodor strobelii
  misc_feature: SGI cDNA ID NO. 573511
  misc_feature: Encodes the peptide sequence at SEQ ID NO 38859
atgcctagtaccttacccatcaagcttgtcatcattggcggtggactcgctggagtgacattagccaatgcacttgctcaacacggccacatcttagtccatgtctacgagtcggcaccgcaattttccgagcgcggtgcagctgtaggcttggctgtcaatgcacagaatgctctacatcgcatccttccccaggccagacagttgctagagaatgcgggaggggttcctatgagttccacacgagtaatggtcggcgcaggcacatacatgaaccaacttgcccgggaccacacagggaccaaagagggtctcgtatttcaccgcgcctctcttcttagagaacttctttgttatctcccagacgaaagacttcacgccaacaagaaactcaccagcatatgcgaaagggacgggaaagtagaaataacattcagcgacaacaccagcacgacctgcgatgcacttgttggggccgatggcatatttagtactgtgcgtgattacgtccttcgcgatgtacaagatagtcagaatgatttcaaagcatcgggtgctggcttttgggattgcaggaatctagtaccttttgaaagggcaaaggcaaccttgggggagcagtatttcggcacacatcgtcagtatgtatgggtcaacgacggggcggtctctgctcatgatgtcctcgagaatggaaacacagtgcattgtttcatcagtgctatagagagcgatccaccgagggatcgatcgcggcctttgacgaaggagctcttagaaacggcactggaaagttccttagaccgtgcacatacccaagggatgattgagcttcttctcgatcagccttctccgaagatttattcagagtgggagcacaagacgacgcctacgtatgcttccggtcgggtctgcgtcacaggcgatgcagcgcatgcgactacaccctggcagggctctggtgccgggcttgcaatagaagatgccatggtcctcgctgcactcctgggtcgcactcgctcggcgaacgaggttgacgcagcattccatgccttcagcgaggtgagactacctagatgtcagaaagtcattgactcgagtcgagagacaggtaccattttctgcggtaggcatccgatgatcggtctaaatccggagaggttgaatgaagcgctagcgacgaaatggcagcatatccataacctagatcatgacacgcatatttccgaagctctggcaaaattcgaatcatacagagaggccgtacgaacgcgatga

SEQ ID NO: 38859 - protein, 425 aa, Muscodor strobelii
  misc_feature: SGI Peptide ID NO. 573511
  misc_feature (6)..(367): Pfam Id: PF01494 Pfam Desc: FAD binding domain
  misc_feature (299)..(333): Pfam Id: PF01494 Pfam Desc: FAD binding domain
  misc_feature (8)..(54): Pfam Id: PF07992 Pfam Desc: Pyridine nucleotide-disulphide oxidoreductase
  misc_feature (25)..(416): NCBI GI: 169610297 Blast Desc: SNOG_08247 [Phaeosphaeria nodorum SN15] gi|160702028|gb|EAT84523.2| SNOG_08247 [Phaeosphaeria nodorum SN15]
  misc_feature (6)..(412): NCBI GI: 240274173 Blast Desc: salicylate hydroxylase [Ajellomyces capsulatus H143]
  misc_feature (7)..(412): NCBI GI: 225557710 Blast Desc: salicylate hydroxylase [Ajellomyces capsulatus G186AR]
  misc_feature (16)..(412): NCBI GI: 154288340 Blast Desc: [Ajellomyces capsulatus NAm1] gi|150408606|gb|EDN04147.1| [Ajellomyces capsulatus NAm1]
  misc_feature (1)..(417): NCBI GI: 171682930 Blast Desc: protein product [Podospora anserina] gi|170941424|emb|CAP67075.1| protein product [Podospora anserina]
  misc_feature (3)..(368): NCBI GI: 239609275 Blast Desc: FAD binding domain-containing protein [Ajellomyces dermatitidis ER-3]
  misc_feature (1)..(421): NCBI GI: 46137629 Blast Desc: FG10330.1 [Gibberella zeae PH-1]
  misc_feature (19)..(420): NCBI GI: 115399700 Blast Desc: conserved [Aspergillus terreus NIH2624] gi|114191116|gb|EAU32816.1| conserved [Aspergillus terreus NIH2624]
  misc_feature (6)..(411): NCBI GI: 169624993 Blast Desc: mannitol 1-phosphate dehydrogenase [Phaeosphaeria nodorum SN15] gi|50841431|gb|AAT84078.1| mannitol 1-phosphate dehydrogenase [Phaeosphaeria nodorum] gi|111055738|gb|EAT76858.1|
  misc_feature (6)..(411): NCBI GI: 205364084 Blast Desc: mannitol 1-phosphate dehydrogenase 2 [Phaeosphaeria nodorum] gi|205364086|gb|ACI04507.1| mannitol 1-phosphate dehydrogenase 2 [Phaeosphaeria nodorum]
  misc_feature (7)..(411): SWISSPROT Homolog: EC 1.14.13.1 Salicylate 1-monooxygenase
MPSTLPIKLVIIGGGLAGVTLANALAQHGHILVHVYESAPQFSERGAAVGLAVNAQNALHRILPQARQLLENAGGVPMSSTRVMVGAGTYMNQLARDHTGTKEGLVFHRASLLRELLCYLPDERLHANKKLTSICERDGKVEITFSDNTSTTCDALVGADGIFSTVRDYVLRDVQDSQNDFKASGAGFWDCRNLVPFERAKATLGEQYFGTHRQYVWVNDGAVSAHDVLENGNTVHCFISAIESDPPRDRSRPLTKELLETALESSLDRAHTQGMIELLLDQPSPKIYSEWEHKTTPTYASGRVCVTGDAAHATTPWQGSGAGLAIEDAMVLAALLGRTRSANEVDAAFHAFSEVRLPRCQKVIDSSRETGTIFCGRHPMIGLNPERLNEALATKWQHIHNLDHDTHISEALAKFESYREAVRTR

SEQ ID NO: 38860 - DNA, 1392 bp, Muscodor strobelii
  misc_feature: SGI cDNA ID NO. 573512
  misc_feature: Encodes the peptide sequence at SEQ ID NO 38861
atgaatgctttcatatggttcgccgttagcagattcttcatgggtctgggaattggcgcagagtatccagtttctgcagcgatatgcactgaatgggcttcgacacaggcccgagcgagaaccatggcggctgtgtttatgatgcagcctttgggccaacttatatcgcagctagttggtctcgtggttcttgttggatataaaaacatgtaccattttgaaaaatgcactgagccggaagtctgtggcaagtatatcgattcaatatggagatgggtgacaggcgtaggtgctattcccgctctggtcgccatatatttcagatttagaataccagatcctgggctatatgaactcgatgtcaacaatgccggcgacctagctgtcaggaacaccatggacgtatatcggcctatcattaacaatgtagatgataactcgttagagatgcaccacatgatggtcgagagcgaccttgagcaggatgatagagatcccgatgtccatagcccgttaccagaacaattctctagggcagacattcatgagtacttctttgtgcaaggcaattggcgaagtcttgcgggaacatctctttgttggttctttctcgatttagcattttacggtcttgggatgaacaacccaagaacgattgccaaaatttgggcttggcaaccagttcccaatgatacacctttcttggcctgggagagcatgccatcttcaagtcgtggtcaatccatttacaaagtactgcacgataatgctgtagagaatcttgtcacagtttgcacgggttctctcattggcagcctacttctcctacgtattatcgattacataccgcgcaaagaattcctgacctactcgtttttgtggcttgccgccctctttatcgtgactggaggcactttcttcaaggtgttcgcgcaagaatcgcatgctattactatcgtcttgatcgttctctgtcatatttccttcaatcttgggcctaacacacttacctttattatacctgcggagattttccctacacgttatcgagcaacatgtcatggtatttctgcggcggccggaaagcttggatcaatcatcgttacggccagcctaccaaacttgccatctgccgatccaaacaacccaagtcttggtggggtgtttatcttttttggcttcgtcatggcattagggtcaatcttttcttgggcttgggtaccatcagttcagacagtacgagagggacataggggactcaagatccccagtaagactctcgaagaactggctgaaggccttgagagggtcaagagaaatggcgagccggtgggatttcgaaatcgtttgaaagccactctagacagctggaaagcagacaggaccttctag

SEQ ID NO: 38861 - protein, 463 aa, Muscodor strobelii
  misc_feature: SGI Peptide ID NO. 573512
  misc_feature (275)..(408): Pfam Id: PF00083 Pfam Desc: Sugar (and other) transporter
  misc_feature (1)..(452): NCBI GI: 46108826 Blast Desc: FG01295.1 [Gibberella zeae PH-1]
  misc_feature (7)..(456): NCBI GI: 171680281 Blast Desc: protein product [Podospora anserina] gi|170939767|emb|CAP64993.1| protein product [Podospora anserina]
  misc_feature (42)..(454): NCBI GI: 116206930 Blast Desc: CHGG_02758 [Chaetomium globosum CBS 148.51] gi|88183355|gb|EAQ90823.1| CHGG_02758 [Chaetomium globosum CBS 148.51]
  misc_feature (1)..(452): NCBI GI: 121707375 Blast Desc: phosphate transporter [Aspergillus clavatus NRRL 1] gi|119399962|gb|EAW10388.1| phosphate transporter [Aspergillus clavatus NRRL 1]
  misc_feature (1)..(433): NCBI GI: 146323771 Blast Desc: phosphate transporter [Aspergillus fumigatus Af293] gi|129557544|gb|EAL89866.2| phosphate transporter [Aspergillus fumigatus Af293]
  misc_feature (1)..(449): NCBI GI: 255942873 Blast Desc: Pc18g03670 [Penicillium chrysogenum Wisconsin 54-1255] gi|211586938|emb|CAP94591.1| Pc18g03670 [Penicillium chrysogenum Wisconsin 54-1255]
  misc_feature (6)..(436): NCBI GI: 189193525 Blast Desc: inorganic phosphate transporter 1-4 /Pi cotransporter [Pyrenophora tritici-repentis Pt-1C-BFP] gi|187978665|gb|EDU45291.1| inorganic phosphate transporter 1-4
  misc_feature (1)..(449): NCBI GI: 145257593 Blast Desc: An04g04240 [Aspergillus niger] gi|134058705|emb|CAK38689.1| protein product [Aspergillus niger]
  misc_feature (1)..(433): NCBI GI: 238491346 Blast Desc: phosphate transporter [Aspergillus flavus NRRL3357] gi|220697323|gb|EED53664.1| phosphate transporter [Aspergillus flavus NRRL3357]
  misc_feature (1)..(461): NCBI GI: 242778834 Blast Desc: phosphate transporter [Talaromyces stipitatus ATCC 10500] gi|218722938|gb|EED22356.1| phosphate transporter [Talaromyces stipitatus ATCC 10500]
MNAFIWFAVSRFFMGLGIGAEYPVSAAICTEWASTQARARTMAAVFMMQPLGQLISQLVGLVVLVGYKNMYHFEKCTEPEVCGKYIDSIWRWVTGVGAIPALVAIYFRFRIPDPGLYELDVNNAGDLAVRNTMDVYRPIINNVDDNSLEMHHMMVESDLEQDDRDPDVHSPLPEQFSRADIHEYFFVQGNWRSLAGTSLCWFFLDLAFYGLGMNNPRTIAKIWAWQPVPNDTPFLAWESMPSSSRGQSIYKVLHDNAVENLVTVCTGSLIGSLLLLRIIDYIPRKEFLTYSFLWLAALFIVTGGTFFKVFAQESHAITIVLIVLCHISFNLGPNTLTFIIPAEIFPTRYRATCHGISAAAGKLGSIIVTASLPNLPSADPNNPSLGGVFIFFGFVMALGSIFSWAWVPSVQTVREGHRGLKIPSKTLEELAEGLERVKRNGEPVGFRNRLKATLDSWKADRTF

SEQ ID NO: 38862 - DNA, 535 bp, Muscodor strobelii
  misc_feature: SGI EST ID NO. CUFF.93433.0
  misc_feature: Variant of the nucleotide sequence at SEQ ID NO 38860
ttcaatcttgggcctaacacacttacctttattatacctgcggagattttccctacacgttatcgagcaacatgtcatggtatttctgcggcggccggaaagcttggatcaatcatcgttacggccagcctaccaaacttgccatctgccgatccaaacaacccaagtcttggtggggtgtttatcttttttggcttcgtcatggcattagggtcaatcttttcttgggcttgggtaccatcagttcagacagtacgagagggacataggggactcaagatccccagtaagactctcgaagaactggctgaaggccttgagagggtcaagagaaatggcgagccggtgggatttcgaaatcgtttgaaagccactctagacagctggaaagcagacaggaccttctagctaaacaattccgctcggggggtagtaataagtcttcatatagcgctttcaaacgaaatgaggataaaaagagaccgaacctgatttctctcacagagatgctagcaggttgatctcagtccctgaa

SEQ ID NO: 38863 - DNA, 1572 bp, Muscodor strobelii
  misc_feature: SGI cDNA ID NO. 573513
  misc_feature: Elevated expression when VOC is produced
  misc_feature: Encodes the peptide sequence at SEQ ID NO 38864
atgaagttggctagccctcttgctgtcctcccactcatgggcatcgcgcttgcagattgcggcgttgatggaggcacgattacaattgctaatcctgactacgacatcttgggcgaactcgaagcctgcgagactatttacggagatattctgatcgacccggcctatgtatacttcatactagatggcggccctttcgaaataaccgggacgatcattgctcataataatgagatactaaaagccgtgcgtcttcaaaacgctactcgcctcgggggattttcgtttttagatcctgaaattgacggaaatgtcgactttccagagatgggattcatcggggacatggagtggaggcttactcgggcggacttttcctggaacgcgcctaagctcacaggtattggtaatctcaacatccatcaaacccttcttagtgggttcacagcaggcccagaggattatgaagaggtttactatgggtttggaggtctagatgctcttcaaactgctaacagcgttcgcctcgtggacaatgtcccaatggacgaggttgtactaaatggtcttaagacagtgaacaatgccttgattgtgggtgataacaacaactactaccaaggccaggacccttggaatgcgtgggatccgaaacccctacttgtctcctttcctgccctggagtccgcagggagcgtcgctgtttacgatctatcggtgtctagccgcgaatacaacaacggaaaggtcgactttcctagcctaggacatgttgcgggcaatttcgagatcacggatatcaagggacttactgaattgtcagtgcctgttttgacaggcatcgatggagggctcaagataacactgaatctagcacttaaaaacatcgagtttccagagctaaggaatgtcgaccatgttgaaattgttgcggatactagtgtagggtttgacaaagtatcttttcccgtcctcgagacagttggaagtttctacctgaattcggcgaatgacttcgattgctcaagccttgactccgttcgggcaatcgcgagcgacttcacatgtattactaataacgattctggcaacttggaaacgccgcctcctactaccgagtctccaccaagccaaagcagccctgaagcttcatcaactggtgagacactgcatgtttcttcctcgtcccttacctattcgccagtcccagcctcgtctacacacacaacattcgtaccattccacccaacgcctgcatcgacattgacgttcactacagaagcaacatacaatgagcaaacaaccaagacggagaacctaacatcagtttctactccaacatcgagctctagtccaactactagctctggcctgacattagggtctagtctgagtgcaagttctagctcaacatcagacgcgagtccaacatcagaggccacgacgacggagtctgcaaatagcactccgacccctacgaacagtgttccagccagtggagccgcatccagtctgagatcgcccatggggatggtgatcatattactcgggcattggttgtcattgtattag

SEQ ID NO: 38864 - protein, 523 aa, Muscodor strobelii
  misc_feature: SGI Peptide ID NO. 573513
  misc_feature (19)..(356): NCBI GI: 242765844 Blast Desc: GPI-anchored cell wall organization protein Ecm33 [Talaromyces stipitatus ATCC 10500] gi|218724252|gb|EED23669.1| GPI-anchored cell wall organization protein Ecm33 [Talaromyces
  misc_feature (19)..(356): NCBI GI: 212528644 Blast Desc: GPI-anchored cell wall organization protein Ecm33 [Penicillium marneffei ATCC 18224] gi|210073877|gb|EEA27964.1| GPI-anchored cell wall organization protein Ecm33 [Penicillium
  misc_feature (1)..(390): NCBI GI: 169604612 Blast Desc: SNOG_05320 [Phaeosphaeria nodorum SN15] gi|160706607|gb|EAT87711.2| SNOG_05320 [Phaeosphaeria nodorum SN15]
  misc_feature (19)..(372): NCBI GI: 67528384 Blast Desc: AN4390.2 [Aspergillus nidulans FGSC A4] gi|40741117|gb|EAA60307.1| AN4390.2 [Aspergillus nidulans FGSC A4] gi|259482799|tpe|CBF77624.1| TPA: GPI-anchored cell wall FGSC
  misc_feature (9)..(360): NCBI GI: 255949858 Blast Desc: Pc22g17870 [Penicillium chrysogenum Wisconsin 54-1255] gi|211592713|emb|CAP99075.1| Pc22g17870 [Penicillium chrysogenum Wisconsin 54-1255]
  misc_feature (1)..(373): NCBI GI: 115398271 Blast Desc: conserved [Aspergillus terreus NIH2624] gi|114192918|gb|EAU34618.1| conserved [Aspergillus terreus NIH2624]
  misc_feature (20)..(404): NCBI GI: 121706618 Blast Desc: GPI-anchored cell wall organization protein Ecm33 [Aspergillus clavatus NRRL 1] gi|119399719|gb|EAW10145.1| GPI-anchored cell wall organization protein Ecm33 [Aspergillus 1]
  misc_feature (260)..(356): NCBI GI: 145256696 Blast Desc: An04g01230 [Aspergillus niger] gi|134058395|emb|CAK38580.1| protein product [Aspergillus niger]
  misc_feature (19)..(373): NCBI GI: 159124941 Blast Desc: GPI-anchored cell wall organization protein Ecm33 [Aspergillus fumigatus A1163]
  misc_feature (19)..(373): NCBI GI: 70994734 Blast Desc: GPI-anchored cell wall organization protein Ecm33 [Aspergillus fumigatus Af293] gi|74671175|sp|Q4WNS8.1|ECM33_ASPFU RecName: Full=Protein ecm33; Flags: Precursor GPI-anchored cell
  misc_feature: Useful for introducing or modulating the production of volatile compounds
MKLASPLAVLPLMGIALADCGVDGGTITIANPDYDILGELEACETIYGDILIDPAYVYFILDGGPFEITGTIIAHNNEILKAVRLQNATRLGGFSFLDPEIDGNVDFPEMGFIGDMEWRLTRADFSWNAPKLTGIGNLNIHQTLLSGFTAGPEDYEEVYYGFGGLDALQTANSVRLVDNVPMDEVVLNGLKTVNNALIVGDNNNYYQGQDPWNAWDPKPLLVSFPALESAGSVAVYDLSVSSREYNNGKVDFPSLGHVAGNFEITDIKGLTELSVPVLTGIDGGLKITLNLALKNIEFPELRNVDHVEIVADTSVGFDKVSFPVLETVGSFYLNSANDFDCSSLDSVRAIASDFTCITNNDSGNLETPPPTTESPPSQSSPEASSTGETLHVSSSSLTYSPVPASSTHTTFVPFHPTPASTLTFTTEATYNEQTTKTENLTSVSTPTSSSSPTTSSGLTLGSSLSASSSSTSDASPTSEATTTESANSTPTPTNSVPASGAASSLRSPMGMVIILLGHWLSLY

SEQ ID NO: 38865 - DNA, 1855 bp, Muscodor strobelii
  misc_feature: SGI EST ID NO. CUFF.93436.0
  misc_feature: Variant of the nucleotide sequence at SEQ ID NO 38863
gatagagtcacattatcgagaactagagcgagaccgtatccagaatgattgagttcttttgcattgcagttccctgcatcattcagtcgctccaacaactgcctgctgtatcggataatgtacatgaggcacagctcaacagacactattgtgggagttggcgggaaattaacatgtggctacgtttttaagtgcatataaaggcacatcgcagcccttccacagaattataccaaccggccaatcacttctcctctacctcaacttagtagtcttgcgcctttgactcggatcttgcgatgaagttggctagccctcttgctgtcctcccactcatgggcatcgcgcttgcagattgcggcgttgatggaggcacgattacaattgctaatcctgactacgacatcttgggcgaactcgaagcctgcgagactatttacggagatattctgatcgacccggcctatgtatacttcatactagatggcggccctttcgaaataaccgggacgatcattgctcataataatgagatactaaaagccgtgcgtcttcaaaacgctactcgcctcgggggattttcgtttttagatcctgaaattgacggaaatgtcgactttccagagatgggattcatcggggacatggagtggaggcttactcgggcggacttttcctggaacgcgcctaagctcacaggtattggtaatctcaacatccatcaaacccttcttagtgggttcacagcaggcccagaggattatgaagaggtttactatgggtttggaggtctagatgctcttcaaactgctaacagcgttcgcctcgtggacaatgtcccaatggacgaggttgtactaaatggtcttaagacagtgaacaatgccttgattgtgggtgataacaacaactactaccaaggccaggacccttggaatgcgtgggatccgaaacccctacttgtctcctttcctgccctggagtccgcagggagcgtcgctgtttacgatctatcggtgtctagccgcgaatacaacaacggaaaggtcgactttcctagcctaggacatgttgcgggcaatttcgagatcacggatatcaagggacttactgaattgtcagtgcctgttttgacaggcatcgatggagggctcaagataacactgaatctagcacttaaaaacatcgagtttccagagctaaggaatgtcgaccatgttgaaattgttgcggatactagtgtagggtttgacaaagtatcttttcccgtcctcgagacagttggaagtttctacctgaattcggcgaatgacttcgattgctcaagccttgactccgttcgggcaatcgcgagcgacttcacatgtattactaataacgattctggcaacttggaaacgccgcctcctactaccgagtctccaccaagccaaagcagccctgaagcttcatcaactgaagcaacatacaatgagcaaacaaccaagacggagaacctaacatcagtttctactccaacatcgagctctagtccaactactagctctggcctgacattagggtctagtctgagtgcaagttctagctcaacatcagacgcgagtccaacatcagaggccacgacgacggagtctgcaaatagcactccgacccctacgaacagtgttccagccagtggagccgcatccagtctgagatcgcccatggggatggtgatcatattactcgggcattggttgtcattgtattaggctgctcgactctgaaatatctaggcatcaaatagaatctctgataattaactgctagatttctagcatagcatatagaagtacgagtaatgactagatgatga

SEQ ID NO: 38866 - DNA, 2136 bp, Muscodor strobelii
  misc_feature: SGI cDNA ID NO. 573514
  misc_feature: Encodes the peptide sequence at SEQ ID NO 38867
atggccgacagcaacaacagatccgatggcactttcgacctaaagcattcgcaatggccaatgtcctatgcaatgacgccgcagcccgacagtgctggctctcggcgcttctttcattacttttattatcgcggtccttccggccacaaagtccaggtgcaatatagccagagcaagtcacattccgaagcgatagccaagacttttgtcaatgaacctatactgggattcgatatggaatggccgtgggacagcgacaagcgttcaaatatcaaggagaaagtggcactgattcagctagcaagtgagcgtagagttggtctctttcacattgctctacatgctggaaacacgacggaagagctcattccccccacgctccggatgatcatcgaatctcctcatatattgaaaactggcgtagctataatgaacgccgacttcaagcgcctcaaagctaatttcggtctcgagccaaagggtgcatttgagctgagccatctgcacaatctcgtcgttcatggagcgtcgagtcccgagcaatgtacaacaaaactacgatccttatcttctcaggttgaaacccaccttggaatgcctctttggaagggaaacacgcggactagcgactggagtaggccactgaatcctagtcaaattcagtatgctgctgatgatgcctacgccgggttcatgctttttcactgcatgaatgcaaagcgctgcagcatggatcccgttccacctcttccaagacgtgccgaaacgtatctgcccttttcgatgtccaaaactgtaccaattcaacttgaaacggtagacgggaaaggggaggcttgtattatcactgcaccgaagttctttgaggtttctgcggtcgagggtaagaccgtggaagaagagatcgaaggtcaagacactaggcacgagcagtccgttgattgcaagacagaaaaagaggataagacatttgtcaatcacattttgatcacgcttggtcatgaacctggatcttctatgggtaccgatcatccttacccgtctttgcctcgtcctaaaaaacgaagtaagcctgaacgggaaccaatggatgagcctacagaggccctgtttacccgtttggttgtgcatcgcaaaggcgttgcagcctcaaaaatgatccctccattctgcgtcgcccacgaccgtcatcttcaagatatcgctacccgccgtccacgaactccagaacagctccttcttgtacacggtattggtaaggccaagcttgcagactatggcgccgcttggcttgagatcattgcgaaatttgtggccgagaggaagcagctggactattgtgactctgaaaagactgcagggggaaagctcaatcgcgaacctgcagacgaacatgtttgtctcaagccttgcaagattggttacgtcggcaggtctagagagttgatagttccgtcagacacacctccacgcttgagcactgggttatcgtttgatttcagtaggacgacccttgaaactgatgacgaccaaacacaacacccgagcgaagatcagagcaacgtcaacaatgactcagaagatggcttgctgtttgcaccacctatagagctgccttcgccatcacagctgaagcgaaagcgagccttcacgttaccctccgaatccgagagcgatgatcagccagtcaaagaagcagtgctgttgtctgcaacaaaagtcacagatgaaatcaagcgtatggtgcaatgtacaccacctcctacgcaacctgacggagcaaatcatgagtcgaagccgtcccctgcaatggcctcaacgcctgtaaagagccccatcccgcaaacccccagtagatcgagcgatttcgaacgagctttgttacgcaagaagctcgaggcatacatcaaaggcgtcgtttctgtgatgcagacaaaaccgaccagccccctggtatccgaacacactttgcagtgcctagtctcgacgattccccgtacagaagaggaatttcaccgagtgccgggaatcggcgtcctgctccacgcttgcatgactgcgaaaagggatatctggcgcagcttcgagatgtggacacggggtcctgctttcgcgaccgctaggcaaacaatgtga

SEQ ID NO: 38867 - protein, 711 aa, Muscodor strobelii
  misc_feature: SGI Peptide ID NO. 573514
  misc_feature (53)..(241): Pfam Id: PF01612 Pfam Desc: 3'-5' exonuclease
  misc_feature (367)..(436): Pfam Id: PF00570 Pfam Desc: HRDC domain
  misc_feature (37)..(695): NCBI GI: 169615583 Blast Desc: SNOG_10950 [Phaeosphaeria nodorum SN15] gi|111060329|gb|EAT81449.1| SNOG_10950 [Phaeosphaeria nodorum SN15]
  misc_feature (28)..(271): NCBI GI: 121711303 Blast Desc: 3'-5' exonuclease/helicase (Wrn), [Aspergillus clavatus NRRL 1] gi|119401418|gb|EAW11841.1| 3'-5' exonuclease/helicase (Wrn), [Aspergillus clavatus NRRL 1]
  misc_feature (36)..(264): NCBI GI: 212532415 Blast Desc: 3'-5' exonuclease/helicase (Wrn), [Penicillium marneffei ATCC 18224] gi|210071728|gb|EEA25817.1| 3'-5' exonuclease/helicase (Wrn), [Penicillium marneffei ATCC 18224]
  misc_feature (27)..(262): NCBI GI: 242775502 Blast Desc: 3'-5' exonuclease/helicase (Wrn), [Talaromyces stipitatus ATCC 10500] gi|218722276|gb|EED21694.1| 3'-5' exonuclease/helicase (Wrn), [Talaromyces stipitatus ATCC 10500]
  misc_feature (24)..(273): NCBI GI: 145247947 Blast Desc: An13g00810 [Aspergillus niger] gi|134080969|emb|CAK41483.1| protein product [Aspergillus niger]
  misc_feature (36)..(271): NCBI GI: 115395196 Blast Desc: [Aspergillus terreus NIH2624] gi|114193054|gb|EAU34754.1| [Aspergillus terreus NIH2624]
  misc_feature (36)..(262): NCBI GI: 119482642 Blast Desc: 3'-5' exonuclease/helicase (Wrn), [Neosartorya fischeri NRRL 181] gi|119409504|gb|EAW19452.1| 3'-5' exonuclease/helicase (Wrn), [Neosartorya fischeri NRRL 181]
  misc_feature (17)..(269): NCBI GI: 70987206 Blast Desc: 3'-5' exonuclease/helicase (Wrn) [Aspergillus fumigatus Af293] gi|66846712|gb|EAL87044.1| 3'-5' exonuclease/helicase (Wrn), [Aspergillus fumigatus Af293] 3'-5'
  misc_feature (35)..(361): NCBI GI: 12718307 Blast Desc: related to WERNER SYNDROME HELICASE [Neurospora crassa]
  misc_feature (35)..(361): NCBI GI: 85101232 Blast Desc: NCU03765 [Neurospora crassa OR74A] gi|28922651|gb|EAA31876.1| NCU03765 [Neurospora crassa OR74A]
MADSNNRSDGTFDLKHSQWPMSYAMTPQPDSAGSRRFFHYFYYRGPSGHKVQVQYSQSKSHSEAIAKTFVNEPILGFDMEWPWDSDKRSNIKEKVALIQLASERRVGLFHIALHAGNTTEELIPPTLRMIIESPHILKTGVAIMNADFKRLKANFGLEPKGAFELSHLHNLVVHGASSPEQCTTKLRSLSSQVETHLGMPLWKGNTRTSDWSRPLNPSQIQYAADDAYAGFMLFHCMNAKRCSMDPVPPLPRRAETYLPFSMSKTVPIQLETVDGKGEACIITAPKFFEVSAVEGKTVEEEIEGQDTRHEQSVDCKTEKEDKTFVNHILITLGHEPGSSMGTDHPYPSLPRPKKRSKPEREPMDEPTEALFTRLVVHRKGVAASKMIPPFCVAHDRHLQDIATRRPRTPEQLLLVHGIGKAKLADYGAAWLEIIAKFVAERKQLDYCDSEKTAGGKLNREPADEHVCLKPCKIGYVGRSRELIVPSDTPPRLSTGLSFDFSRTTLETDDDQTQHPSEDQSNVNNDSEDGLLFAPPIELPSPSQLKRKRAFTLPSESESDDQPVKEAVLLSATKVTDEIKRMVQCTPPPTQPDGANHESKPSPAMASTPVKSPIPQTPSRSSDFERALLRKKLEAYIKGVVSVMQTKPTSPLVSEHTLQCLVSTIPRTEEEFHRVPGIGVLLHACMTAKRDIWRSFEMWTRGPAFATARQTM

SEQ ID NO: 38868 - DNA, 3043 bp, Muscodor strobelii
  misc_feature: SGI EST ID NO. CUFF.93439.0
  misc_feature: Variant of the nucleotide sequence at SEQ ID NO 38866
aaattctcggcaccatctcaaaataggtcaattccagaccctattcattgtgagccctctgaagtttgaatacatcgatttggaaatgaaaatgccaccgcgccgtcttctatgagaggcgcttgtttgaatcgcgtagaaccgcgtcgcacgcggagcgtccaaccaccatagtccagcccgcggtcttactctacagtaagctgttgcgacgtctattcgatggccgacagcaacaacagatccgatggcactttcgacctaaagcattcgcaatggccaatgtcctatgcaatgacgccgcagcccgacagtgctggctctcggcgcttctttcattacttttattatcgcggtccttccggccacaaagtccaggtgcaatatagccagagcaagtcacattccgaagcgatagccaagacttttgtcaatgaacctatactgggattcgatatggaatggccgtgggacagcgacaagcgttcaaatatcaaggagaaagtggcactgattcagctagcaagtgagcgtagagttggtctctttcacattgctctacatgctggaaacacgacggaagagctcattccccccacgctccggatgatcatcgaatctcctcatatattgaaaactggcgtagctataatgaacgccgacttcaagcgcctcaaagctaatttcggtctcgagccaaagggtgcatttgagctgagccatctgcacaatctcgtcgttcatggagcgtcgagtcccgagcaatgtacaacaaaactacgatccttatcttctcaggttgaaacccaccttggaatgcctctttggaagggaaacacgcggactagcgactggagtaggccactgaatcctagtcaaattcagtatgctgctgatgatgcctacgccgggttcatgctttttcactgcatgaatgcaaagcgctgcagcatggatcccgttccacctcttccaagacgtgccgaaacgtatctgcccttttcgatgtccaaaactgtaccaattcaacttgaaacggtagacgggaaaggggaggcttgtattatcactgcaccgaagttctttgaggtttctgcggtcgagggtaagaccgtggaagaagagatcgaaggtcaagacactaggcacgagcagtccgttgattgcaagacagaaaaagaggataagacatttgtcaatcacattttgatcacgcttggtcatgaacctggatcttctatgggtaccgatcatccttacccgtctttgcctcgtcctaaaaaacgaagtaagcctgaacgggaaccaatggatgagcctacagaggccctgtttacccgtttggttgtgcatcgcaaaggcgttgcagcctcaaaaatgatccctccattctgcgtcgcccacgaccgtcatcttcaagatatcgctacccgccgtccacgaactccagaacagctccttcttgtacacggtattggtaaggccaagcttgcagactatggcgccgcttggcttgagatcattgcgaaatttgtggccgagaggaagcagctggactattgtgactctgaaaagactgcagggggaaagctcaatcgcgaacctgcagacgaacatgtttgtctcaagccttgcaagattggttacgtcggcaggtctagagagttgatagttccgtcagacacacctccacgcttgagcactgggttatcgtttgatttcagtaggacgacccttgaaactgatgacgaccaaacacaacacccgagcgaagatcagagcaacgtcaacaatgactcagaagatggcttgctgtttgcaccacctatagagctgccttcgccatcacagctgaagcgaaagcgagccttcacgttaccctccgaatccgagagcgatgatcagccagtcaaagaagcagtgctgttgtctgcaacaaaagtcacagatgaaatcaagcgtatggtgcaatgtacaccacctcctacgcaacctgacggagcaaatcatgagtcgaagccgtcccctgcaatggcctcaacgcctgtaaagagccccatcccgcaaacccccagtagatcgagcgatttcgaacgagctttgttacgcaagaagctcgaggcatacatcaaaggcgtcgtttctgtgatgcagacaaaaccgaccagccccctggtatccgaacacactttgcagtgcctagtctcgacgattccccgtacagaagaggaatttcaccgagtgccgggaatcggcgtcctgctccacgcttgcatgactgcgaaaagggatatctggcgcagcttcgagatgtggacacggggtcctgctttcgcgaccgctaggcaaacaatgtgatatcaaatttggaatcgggtaggatatacttcacactggaaagaggagaatgcatatttcacctggagagacgtgtatgatgtacatagttgtcgctggcgtttgtgtgggatcttcattataggagtacgtggcacgaatcggatgatttcgtgtaggtgtgctgtgtacacctcaagctttaggtacgaagccagtggtggtcttctaccgtatataaatgacgatacgatttatgattctgctctgtggcccttttcctggcgctgtggtattgcagcggttgcgtgtctgacgtgaggattttgttttggcgccttacgcacttcgtgagcagattttaccagactatcttgccattatttcatgaaacttggtagacgccagtggcgattgtagtgcttccgtgttccattcacttctgcataagagtcgactctggctcgtgaacgattatggaatgcacagtctgttgcagcagctgagctcaataagcattgtcgcattgggattttggtacatattatcagaagacccttctgaactgcatgtatgccgatatgtctgaaatttccaggctttgcaagatcagcggccagttgtactatttctaggcggcaatcacgtgcaagacgtccggtccaaactgtgaacaccacacgcatgataaagtactatgattcaa

SEQ ID NO: 38869 - DNA, 1902 bp, Muscodor strobelii
  misc_feature: SGI cDNA ID NO. 573515
  misc_feature: Encodes the peptide sequence at SEQ ID NO 38870
atggaatggccgtgggacagcgacaagcgttcaaatatcaaggagaaagtggcactgattcagctagcaagtgagcgtagagttggtctctttcacattgctctacatgctggaaacacgacggaagagctcattccccccacgctccggatgatcatcgaatctcctcatatattgaaaactggcgtagctataatgaacgccgacttcaagcgcctcaaagctaatttcggtctcgagccaaagggtgcatttgagctgagccatctgcacaatctcgtcgttcatggagcgtcgagtcccgagcaatgtacaacaaaactacgatccttatcttctcaggttgaaacccaccttggaatgcctctttggaagggaaacacgcggactagcgactggagtaggccactgaatcctagtcaaattcagtatgctgctgatgatgcctacgccgggttcatgctttttcactgcatgaatgcaaagcgctgcagcatggatcccgttccacctcttccaagacgtgccgaaacgtatctgcccttttcgatgtccaaaactgtaccaattcaacttgaaacggtagacgggaaaggggaggcttgtattatcactgcaccgaagttctttgaggtttctgcggtcgagggtaagaccgtggaagaagagatcgaaggtcaagacactaggcacgagcagtccgttgattgcaagacagaaaaagaggataagacatttgtcaatcacattttgatcacgcttggtcatgaacctggatcttctatgggtaccgatcatccttacccgtctttgcctcgtcctaaaaaacgaagtaagcctgaacgggaaccaatggatgagcctacagaggccctgtttacccgtttggttgtgcatcgcaaaggcgttgcagcctcaaaaatgatccctccattctgcgtcgcccacgaccgtcatcttcaagatatcgctacccgccgtccacgaactccagaacagctccttcttgtacacggtattggtaaggccaagcttgcagactatggcgccgcttggcttgagatcattgcgaaatttgtggccgagaggaagcagctggactattgtgactctgaaaagactgcagggggaaagctcaatcgcgaacctgcagacgaacatgtttgtctcaagccttgcaagattggttacgtcggcaggtctagagagttgatagttccgtcagacacacctccacgcttgagcactgggttatcgtttgatttcagtaggacgacccttgaaactgatgacgaccaaacacaacacccgagcgaagatcagagcaacgtcaacaatgactcagaagatggcttgctgtttgcaccacctatagagctgccttcgccatcacagctgaagcgaaagcgagccttcacgttaccctccgaatccgagagcgatgatcagccagtcaaagaagcagtgctgttgtctgcaacaaaagtcacagatgaaatcaagcgtatggtgcaatgtacaccacctcctacgcaacctgacggagcaaatcatgagtcgaagccgtcccctgcaatggcctcaacgcctgtaaagagccccatcccgcaaacccccagtagatcgagcgatttcgaacgagctttgttacgcaagaagctcgaggcatacatcaaaggcgtcgtttctgtgatgcagacaaaaccgaccagccccctggtatccgaacacactttgcagtgcctagtctcgacgattccccgtacagaagaggaatttcaccgagtgccgggaatcggcgtcctgctccacgcttgcatgactgcgaaaagggatatctggcgcagcttcgagatgtggacacggggtcctgctttcgcgaccgctaggcaaacaatgtga

SEQ ID NO: 38870 - protein, 633 aa, Muscodor strobelii
  misc_feature: SGI Peptide ID NO. 573515
  misc_feature (1)..(163): Pfam Id: PF01612 Pfam Desc: 3'-5' exonuclease
  misc_feature (289)..(358): Pfam Id: PF00570 Pfam Desc: HRDC domain
  misc_feature (16)..(163): Pfam Id: PF01612 Pfam Desc: 3'-5' exonuclease
  misc_feature (1)..(616): NCBI GI: 169615583 Blast Desc: SNOG_10950 [Phaeosphaeria nodorum SN15] gi|111060329|gb|EAT81449.1| SNOG_10950 [Phaeosphaeria nodorum SN15]
  misc_feature (1)..(193): NCBI GI: 121711303 Blast Desc: 3'-5' exonuclease/helicase (Wrn), [Aspergillus clavatus NRRL 1] gi|119401418|gb|EAW11841.1| 3'-5' exonuclease/helicase (Wrn), [Aspergillus clavatus NRRL 1]
  misc_feature (1)..(186): NCBI GI: 212532415 Blast Desc: 3'-5' exonuclease/helicase (Wrn), [Penicillium marneffei ATCC 18224] gi|210071728|gb|EEA25817.1| 3'-5' exonuclease/helicase (Wrn), [Penicillium marneffei ATCC 18224]
  misc_feature (1)..(184): NCBI GI: 242775502 Blast Desc: 3'-5' exonuclease/helicase (Wrn), [Talaromyces stipitatus ATCC 10500] gi|218722276|gb|EED21694.1| 3'-5' exonuclease/helicase (Wrn), [Talaromyces stipitatus ATCC 10500]
  misc_feature (1)..(193): NCBI GI: 115395196 Blast Desc: [Aspergillus terreus NIH2624] gi|114193054|gb|EAU34754.1| [Aspergillus terreus NIH2624]
  misc_feature (1)..(195): NCBI GI: 145247947 Blast Desc: An13g00810 [Aspergillus niger] gi|134080969|emb|CAK41483.1| protein product [Aspergillus niger]
  misc_feature (1)..(184): NCBI GI: 119482642 Blast Desc: 3'-5' exonuclease/helicase (Wrn), [Neosartorya fischeri NRRL 181] gi|119409504|gb|EAW19452.1| 3'-5' exonuclease/helicase (Wrn), [Neosartorya fischeri NRRL 181]
  misc_feature (1)..(191): NCBI GI: 154303273 Blast Desc: BC1G_09385 [Botryotinia fuckeliana B05.10] gi|150854948|gb|EDN30140.1| BC1G_09385 [Botryotinia fuckeliana B05.10]
  misc_feature (1)..(189): NCBI GI: 156053686 Blast Desc: SS1G_05690 [Sclerotinia sclerotiorum 1980] gi|154703471|gb|EDO03210.1| SS1G_05690 [Sclerotinia sclerotiorum 1980]
  misc_feature (1)..(283): NCBI GI: 12718307 Blast Desc: related to WERNER SYNDROME HELICASE [Neurospora crassa]
MEWPWDSDKRSNIKEKVALIQLASERRVGLFHIALHAGNTTEELIPPTLRMIIESPHILKTGVAIMNADFKRLKANFGLEPKGAFELSHLHNLVVHGASSPEQCTTKLRSLSSQVETHLGMPLWKGNTRTSDWSRPLNPSQIQYAADDAYAGFMLFHCMNAKRCSMDPVPPLPRRAETYLPFSMSKTVPIQLETVDGKGEACIITAPKFFEVSAVEGKTVEEEIEGQDTRHEQSVDCKTEKEDKTFVNHILITLGHEPGSSMGTDHPYPSLPRPKKRSKPEREPMDEPTEALFTRLVVHRKGVAASKMIPPFCVAHDRHLQDIATRRPRTPEQLLLVHGIGKAKLADYGAAWLEIIAKFVAERKQLDYCDSEKTAGGKLNREPADEHVCLKPCKIGYVGRSRELIVPSDTPPRLSTGLSFDFSRTTLETDDDQTQHPSEDQSNVNNDSEDGLLFAPPIELPSPSQLKRKRAFTLPSESESDDQPVKEAVLLSATKVTDEIKRMVQCTPPPTQPDGANHESKPSPAMASTPVKSPIPQTPSRSSDFERALLRKKLEAYIKGVVSVMQTKPTSPLVSEHTLQCLVSTIPRTEEEFHRVPGIGVLLHACMTAKRDIWRSFEMWTRGPAFATARQTM

SEQ ID NO: 38871 - DNA, 3043 bp, Muscodor strobelii; identical to SEQ ID NO: 38868
  misc_feature: SGI EST ID NO. CUFF.93439.0
  misc_feature: Variant of the nucleotide sequence at SEQ ID NO 38869

SEQ ID NO: 38872 - DNA, 1407 bp, Muscodor strobelii
  misc_feature: SGI cDNA ID NO. 573516
  misc_feature: Elevated expression when VOC is produced
  misc_feature: Encodes the peptide sequence at SEQ ID NO 38873
atggatcccgttccacctcttccaagacgtgccgaaacgtatctgcccttttcgatgtccaaaactgtaccaattcaacttgaaacggtagacgggaaaggggaggcttgtattatcactgcaccgaagttctttgaggtttctgcggtcgagggtaagaccgtggaagaagagatcgaaggtcaagacactaggcacgagcagtccgttgattgcaagacagaaaaagaggataagacatttgtcaatcacattttgatcacgcttggtcatgaacctggatcttctatgggtaccgatcatccttacccgtctttgcctcgtcctaaaaaacgaagtaagcctgaacgggaaccaatggatgagcctacagaggccctgtttacccgtttggttgtgcatcgcaaaggcgttgcagcctcaaaaatgatccctccattctgcgtcgcccacgaccgtcatcttcaagatatcgctacccgccgtccacgaactccagaacagctccttcttgtacacggtattggtaaggccaagcttgcagactatggcgccgcttggcttgagatcattgcgaaatttgtggccgagaggaagcagctggactattgtgactctgaaaagactgcagggggaaagctcaatcgcgaacctgcagacgaacatgtttgtctcaagccttgcaagattggttacgtcggcaggtctagagagttgatagttccgtcagacacacctccacgcttgagcactgggttatcgtttgatttcagtaggacgacccttgaaactgatgacgaccaaacacaacacccgagcgaagatcagagcaacgtcaacaatgactcagaagatggcttgctgtttgcaccacctatagagctgccttcgccatcacagctgaagcgaaagcgagccttcacgttaccctccgaatccgagagcgatgatcagccagtcaaagaagcagtgctgttgtctgcaacaaaagtcacagatgaaatcaagcgtatggtgcaatgtacaccacctcctacgcaacctgacggagcaaatcatgagtcgaagccgtcccctgcaatggcctcaacgcctgtaaagagccccatcccgcaaacccccagtagatcgagcgatttcgaacgagctttgttacgcaagaagctcgaggcatacatcaaaggcgtcgtttctgtgatgcagacaaaaccgaccagccccctggtatccgaacacactttgcagtgcctagtctcgacgattccccgtacagaagaggaatttcaccgagtgccgggaatcggcgtcctgctccacgcttgcatgactgcgaaaagggatatctggcgcagcttcgagatgtggacacggggtcctgctttcgcgaccgctaggcaaacaatgtga

SEQ ID NO: 38873 - protein, 468 aa, Muscodor strobelii
  misc_feature: SGI Peptide ID NO. 573516
  misc_feature (124)..(193): Pfam Id: PF00570 Pfam Desc: HRDC domain
  misc_feature (1)..(451): NCBI GI: 169615583 Blast Desc: SNOG_10950 [Phaeosphaeria nodorum SN15] gi|111060329|gb|EAT81449.1| SNOG_10950 [Phaeosphaeria nodorum SN15]
  misc_feature (107)..(194): NCBI GI: 104773884 Blast Desc: ATP-dependent DNA helicase RecQ [Lactobacillus delbrueckii subsp. bulgaricus ATCC 11842] gi|103422965|emb|CAI97636.1| ATP-dependent DNA helicase RecQ ATCC
  misc_feature (49)..(194): NCBI GI: 116513890 Blast Desc: superfamily II DNA helicase [Lactobacillus delbrueckii subsp. bulgaricus ATCC BAA-365] gi|116093205|gb|ABJ58358.1| ATP-dependent DNA helicase RecQ [Lactobacillus delbrueckii subsp.
  misc_feature (92)..(195): NCBI GI: 259504244 Blast Desc: ATP-dependent DNA helicase RecQ [Erysipelothrix rhusiopathiae ATCC 19414] gi|259171684|gb|EEW56179.1| ATP-dependent DNA helicase RecQ [Erysipelothrix rhusiopathiae
  misc_feature (108)..(194): NCBI GI: 33321971 Blast Desc: AF496047_1 ATP-dependent DNA helicase recQ [Lactobacillus delbrueckii subsp. lactis]
  misc_feature (110)..(197): NCBI GI: 238922686 Blast Desc: EUBREC_0261 [Eubacterium rectale ATCC 33656] gi|238874358|gb|ACR74065.1| EUBREC_0261 [Eubacterium rectale ATCC 33656]
  misc_feature (108)..(194): NCBI GI: 197106822 Blast Desc: ATP-dependent DNA helicase RecQ [Phenylobacterium zucineum HLK1] gi|196480242|gb|ACG79770.1| ATP-dependent DNA helicase RecQ [Phenylobacterium zucineum HLK1]
  misc_feature (108)..(199): NCBI GI: 150392373 Blast Desc: ATP-dependent DNA helicase RecQ [Alkaliphilus metalliredigens QYMF] gi|149952235|gb|ABR50763.1| ATP-dependent DNA helicase RecQ [Alkaliphilus metalliredigens QYMF]
  misc_feature (121)..(194): NCBI GI: 224283468 Blast Desc: ATP-dependent DNA helicase RecQ [Bifidobacterium bifidum NCIMB 41171]
  misc_feature (111)..(192): NCBI GI: 152993842 Blast Desc: ATP-dependent DNA helicase RecQ [Sulfurovum sp. NBC37-1] gi|151425703|dbj|BAF73206.1| ATP-dependent DNA helicase RecQ [Sulfurovum sp. NBC37-1]
  misc_feature: Useful for introducing or modulating the production of volatile compounds
MDPVPPLPRRAETYLPFSMSKTVPIQLETVDGKGEACIITAPKFFEVSAVEGKTVEEEIEGQDTRHEQSVDCKTEKEDKTFVNHILITLGHEPGSSMGTDHPYPSLPRPKKRSKPEREPMDEPTEALFTRLVVHRKGVAASKMIPPFCVAHDRHLQDIATRRPRTPEQLLLVHGIGKAKLADYGAAWLEIIAKFVAERKQLDYCDSEKTAGGKLNREPADEHVCLKPCKIGYVGRSRELIVPSDTPPRLSTGLSFDFSRTTLETDDDQTQHPSEDQSNVNNDSEDGLLFAPPIELPSPSQLKRKRAFTLPSESESDDQPVKEAVLLSATKVTDEIKRMVQCTPPPTQPDGANHESKPSPAMASTPVKSPIPQTPSRSSDFERALLRKKLEAYIKGVVSVMQTKPTSPLVSEHTLQCLVSTIPRTEEEFHRVPGIGVLLHACMTAKRDIWRSFEMWTRGPAFATARQTM

SEQ ID NO: 38874 - DNA, 3043 bp, Muscodor strobelii; identical to SEQ ID NO: 38868
  misc_feature: SGI EST ID NO. CUFF.93439.0
  misc_feature: Variant of the nucleotide sequence at SEQ ID NO 38872

SEQ ID NO: 38875 - DNA, 906 bp, Muscodor strobelii
  misc_feature: SGI cDNA ID NO. 573517
  misc_feature: Encodes the peptide sequence at SEQ ID NO 38876
atggcaaccccagttgacgtcaacagcatatttcgggtcgatggcattgttgctgtcattaccggaggaggaacaggaatcggccttattatggctcgatcacttgctgcgaacggtgccaaaagggtctatatccttggacgacgttttgaagtgcttgaggccgccgccaaagagcatgaaagtcttgtgccattgaagtgcgacgtgacatcaaaggatgacctccaacaggcggtcgagtttgtcgaaaaagatgtcgggtatgtaaatctcgtagtcgccaactcgggaatagttggtagagcacctagtttcgatccacaggcgaccctgcccgagttgcgccaacgctttttcgctaattcgacaatggacattatgaacgagccactgagcactaatgtcacatctgcattctttactatgacagcgtttgtcgaactcctcgattctgggaacaaacaggctctgaatggtggttttggtagacccactaaacagggcattgatgtcccttccatccagagtcaagtcatcttcaccgctagcatttcgggcttcagccgacactgggtgtcatcacctgcatatttggcaagcaaggctgctgttatacagctgaccaagttttccagcacccagctagccaggttcgggattcgtgtaaatgctcttgcgccgggcgtatacccctccgctatgactggaaagttgtcgaacggccgaaagccagaagaagaacccgtcgatcatccaagattcatccctgctcgaagatttggaggggaagaggaaatggcgggcgcgattctgtacttggcaagccgatctggaagctattccaatggatcagtccttcttaccgacggcggtagactggcagtaatggagtctacatattaa

SEQ ID NO: 38876 - protein, 301 aa, Muscodor strobelii
  misc_feature: SGI Peptide ID NO. 573517
  misc_feature (16)..(217): Pfam Id: PF00106 Pfam Desc: short chain dehydrogenase
  misc_feature (17)..(214): Pfam Id: PF08659 Pfam Desc: KR domain
  misc_feature (16)..(104): Pfam Id: PF00106 Pfam Desc: short chain dehydrogenase
  misc_feature (17)..(81): Pfam Id: PF08659 Pfam Desc: KR domain
  misc_feature (1)..(301): NCBI GI: 116179138 Blast Desc: CHGG_00197 [Chaetomium globosum CBS 148.51] gi|88184494|gb|EAQ91962.1| CHGG_00197 [Chaetomium globosum CBS 148.51]
  misc_feature (9)..(301): NCBI GI: 171684627 Blast Desc: protein product [Podospora anserina] gi|170942274|emb|CAP67926.1| protein product [Podospora anserina]
  misc_feature (7)..(301): NCBI GI: 85083242 Blast Desc: NCU05094 [Neurospora crassa OR74A] gi|28881379|emb|CAD70420.1| related to gluconate 5-dehydrogenase [Neurospora crassa] gi|28918165|gb|EAA27844.1| conserved crassa
  misc_feature (10)..(301): NCBI GI: 39942668 Blast Desc: MGG_03414 [Magnaporthe grisea 70-15] gi|145010047|gb|EDJ94703.1| MGG_03414 [Magnaporthe grisea 70-15]
  misc_feature (2)..(301): NCBI GI: 169765484 Blast Desc: [Aspergillus oryzae RIB40] gi|83765068|dbj|BAE55211.1| protein product [Aspergillus oryzae]
  misc_feature (1)..(301): NCBI GI: 256729314 Blast Desc: NECHADRAFT_95809 [Nectria haematococca mpVI 77-13-4]
  misc_feature (1)..(301): NCBI GI: 256722810 Blast Desc: NECHADRAFT_97506 [Nectria haematococca mpVI 77-13-4]
  misc_feature (5)..(301): NCBI GI: 189205264 Blast Desc: short chain dehydrogenase/reductase [Pyrenophora tritici-repentis Pt-1C-BFP] gi|187986066|gb|EDU51554.1| short chain dehydrogenase/reductase [Pyrenophora tritici-repentis
  misc_feature (9)..(301): NCBI GI: 154312001 Blast Desc: BC1G_06034 [Botryotinia fuckeliana B05.10] gi|150850684|gb|EDN25877.1| BC1G_06034 [Botryotinia fuckeliana B05.10]
  misc_feature (10)..(301): NCBI GI: 115387385 Blast Desc: conserved [Aspergillus terreus NIH2624] gi|114195282|gb|EAU36982.1| conserved [Aspergillus terreus NIH2624]
  misc_feature (29)..(292): SWISSPROT Homolog: EC 1.1.1.69 Gluconate 5-dehydrogenase
MATPVDVNSIFRVDGIVAVITGGGTGIGLIMARSLAANGAKRVYILGRRFEVLEAAAKEHESLVPLKCDVTSKDDLQQAVEFVEKDVGYVNLVVANSGIVGRAPSFDPQATLPELRQRFFANSTMDIMNEPLSTNVTSAFFTMTAFVELLDSGNKQALNGGFGRPTKQGIDVPSIQSQVIFTASISGFSRHWVSSPAYLASKAAVIQLTKFSSTQLARFGIRVNALAPGVYPSAMTGKLSNGRKPEEEPVDHPRFIPARRFGGEEEMAGAILYLASRSGSYSNGSVLLTDGGRLAVMESTY

SEQ ID NO: 38877 - DNA, 1308 bp, Muscodor strobelii
  misc_feature: SGI EST ID NO. CUFF.93446.0
  misc_feature: Variant of the nucleotide sequence at SEQ ID NO 38875
aaattccgttcggtattcgcgaattgacacatagaaggacttaacatttactctaagtccgagtatggaatcttgaataatgatctcatgaaaataaacataacgattgatgagtgcatcagtatctgcgtggatcatgtatatatagcaacctgccaaacagaaactttttaattacctcttttcaatcactttgctgtatatctctagacacatgagttctttgcaatagccgtatcgccatcatctctcgattgaacattcaacagcaataacaatggcaaccccagttgacgtcaacagcatatttcgggtcgatggcattgttgctgtcattaccggaggaggaacaggaatcggccttattatggctcgatcacttgctgcgaacggtgccaaaagggtctatatccttggacgacgttttgaagtgcttgaggccgccgccaaagagcatgaaagtcttgtgccattgaagtgcgacgtgacatcaaaggatgacctccaacaggcggtcgagtttgtcgaaaaagatgtcgggtatgtaaatctcgtagtcgccaactcgggaatagttggtagagcacctagtttcgatccacaggcgaccctgcccgagttgcgccaacgctttttcgctaattcgacaatggacattatgaacgagccactgagcactaatgtcacatctgcattctttactatgacagcgtttgtcgaactcctcgattctgggaacaaacaggctctgaatggtggttttggtagacccactaaacagggcattgatgtcccttccatccagagtcaagtcatcttcaccgctagcatttcgggcttcagccgacactgggtgtcatcacctgcatatttggcaagcaaggctgctgttatacagctgaccaagttttccagcacccagctagccaggttcgggattcgtgtaaatgctcttgcgccgggcgtatacccctccgctatgactggaaagttgtcgaacggccgaaagccagaagaagaacccgtcgatcatccaagattcatccctgctcgaagatttggaggggaagaggaaatggcgggcgcgattctgtacttggcaagccgatctggaagctattccaatggatcagtccttcttaccgacggcggtagactggcagtaatggagtctacatattaaccagggcccagtcagctgtgctcgaaatggtagtagcagttttcgtatatcgatagctctatgcaagataattattaagccatattttaacgcctaatttaggcatagtagttgtaatgactaag

SEQ ID NO: 38878 - DNA, 2625 bp, Muscodor strobelii
  misc_feature: SGI cDNA ID NO. 573518
  misc_feature: Encodes the peptide sequence at SEQ ID NO 38879
atggttcggctcagcagcattgcggctttgctgtcaaccgccggccctctggtccgggcagcctccaataagcttgaaggcacatatctggtcgaggtcgaagatggcacagatcttcggggcttcattagctcactgggaagcaaagtcacaatgcgtcaagagctcaattataagctttggcaaggcgtatcttttcggtttaacgatttaaacgacgtgatcgaccaagttgccgaagtggccgctatgccgagtgtaaaaagcattcacccagtcacgacgcatgcattgcctagacatagcggacactcgggactagcagttgagtcgctcgccaaacgcgacttgtccgacactgcgactggccctgatacctggtcaacacatgtcatgacccaagtgaacaaattgcatgcccaaggtattaccggggaaggtatcaagattgccgtcatcgatgtcggggtagattataggcacccggctctcggtggctgtttcggcgaggatgaccaatgcgtggtccaattcggatacgatctggttggcgatgacccgaactataactctcaggatcccttctcggttccaaagcctgatgacgaccctcttgacaccattgtcggccacggaacacatgtatctggcattatcgcagctcaaagcaatgctgagtacggagtgatcggcgctgcgccgggcgtgaagctgggacaatataaagttgccgatgttgagggttactatacaagcgacattatcattgccggattcaatatggcatacgagtccggcgcggatatcatcagtgcttctgttggcgatcccaatggatggtctgaagaccctcaggctgtagctctccagcgaattgtcgacgctggtactatcgtggtcacatccgcagccaaccaggggctgaaaggtttatttttcggttcgacgcctgctactggcattggtcttgctgtagctggctcctctgacaacgatcgttacctactgtggttgaacgaagcgagctacgatgtaaacggagcaaaccagtcgttcggcctcacatttggatcgccaaaggcttggccaactagtagcctgcctatattccatgttggagaagcatgttctgcgctgaattccgcaggaatacccgacttgtctacttacgctgttctgattgctgcaagccaggcttgttcatatcagactcaggtcgataacgttgctgccttcggtggccaatacatccttttctccaactatgtccgaggcaccagtgtcgtctcggtcgataacgcgactgcagttggtatggtcactcagtctcaaggcgaaacctgggtctctcttctcgagcaagatgaagttgtctccgtatacatggcagacccgagcttgaatcccagctttctttctaatgaaacaaatactattaccccaggcgccgccagcaaaactacttcatggggtccgtctttcgaattggacatgatcacgagtgtcatggttcccggcgcatacgtcctttctttatttcctatcaatctaggttcgtattatgtcctgagcggtacgtcaatggctgcaccattgctcgcatcgatctatgccctcgtcatgcaagcttctggcgtgaaggacattacaactcttcacaccatgatctctggcaccgcgaaggcggccctttggaataatggcaatacgtactacgactatctggccccaactccgcaacagggagctggtcttgttcaggcttatgacgccgcgtactcaacctctgctctcgaccgaagcaggatgcagttcaatgatacagagttcttcaatggtactcagacatttactttgtctaataacggcgatgcgtccgtgacgtataaaatcagcaatgttggtgcaccgaccgtctacacgtttcctaatgataccgctataacacccatgtcgttccctaatgattttgaccaaactcacgcgtctctctcgttctcttcctctgaacttagcattgacagcggtagctctgagacgataaccgtgacggccgttcaacctgatgtcgactctggccgtctaccggtctggtccggattcatcaccatcaacggcacagatggctcgaacttgacccttccctatctaggggtcgcagctagaatgcgcgatgttaccgttctagatgctcaaaacacgacagtcgtcagctccctagacgcatcgtacaagcccgtggccgcaaactactcattcgtgctcccccctgcgggagaaataaatgacactgcctatagcaattcgaccaatctgccgcgcttatacatccagatggcattcggcagccgactgattgaggccttcgtgctgactgctgatggtattgaactaggcagtattcccaacttccctcagacgtaccaatcgcgcatttcgctttccgactctcagggcactgcgtactttcctatctgggatggaagcttgaagaatggaacatatctgtctgctggtagctataagttcaaagtcaaggctctccatgttttcggtgacgagagcgtggacacggattgggatgagaccgagactgtgccttttagcattgattacctatcttag

SEQ ID NO: 38879 - protein, 874 aa, Muscodor strobelii
  misc_feature: SGI Peptide ID NO. 573518
  misc_feature (128)..(568): Pfam Id: PF00082 Pfam Desc: Subtilase family
  misc_feature (128)..(307): Pfam Id: PF00082 Pfam Desc: Subtilase family
  misc_feature (1)..(872): NCBI GI: 85086707 Blast Desc: NCU00263 [Neurospora crassa OR74A] gi|28918829|gb|EAA28498.1| conserved [Neurospora crassa OR74A]
  misc_feature (38)..(873): NCBI GI: 116208730 Blast Desc: CHGG_03658 [Chaetomium globosum CBS 148.51] gi|88184255|gb|EAQ91723.1| CHGG_03658 [Chaetomium globosum CBS 148.51]
  misc_feature (25)..(874): NCBI GI: 171685226 Blast Desc: protein product [Podospora anserina] gi|170942574|emb|CAP68226.1| protein product [Podospora anserina]
  misc_feature (1)..(874): NCBI GI: 145608997 Blast Desc: MGG_09073 [Magnaporthe grisea 70-15] gi|145016463|gb|EDK00893.1| MGG_09073 [Magnaporthe grisea 70-15]
  misc_feature (24)..(872): NCBI GI: 46124389 Blast Desc: FG06572.1 [Gibberella zeae PH-1]
  misc_feature (2)..(872): NCBI GI: 256726389 Blast Desc: NECHADRAFT_39203 [Nectria haematococca mpVI 77-13-4]
  misc_feature (25)..(872): NCBI GI: 46139915 Blast Desc: FG11472.1 [Gibberella zeae PH-1]
  misc_feature (16)..(872): NCBI GI: 170674476 Blast Desc: subtilisin-like protease [Epichloe festucae]
  misc_feature (55)..(872): NCBI GI: 16973362 Blast Desc: subtilisin-like serine protease PR1C [Metarhizium anisopliae var. anisopliae]
  misc_feature (1)..(872): NCBI GI: 145583581 Blast Desc: serin endopeptidase [Hypocrea lixii]
  misc_feature (145)..(871): SWISSPROT Homolog: EC 3.4.21.96 Lactocepin
MVRLSSIAALLSTAGPLVRAASNKLEGTYLVEVEDGTDLRGFISSLGSKVTMRQELNYKLWQGVSFRFNDLNDVIDQVAEVAAMPSVKSIHPVTTHALPRHSGHSGLAVESLAKRDLSDTATGPDTWSTHVMTQVNKLHAQGITGEGIKIAVIDVGVDYRHPALGGCFGEDDQCVVQFGYDLVGDDPNYNSQDPFSVPKPDDDPLDTIVGHGTHVSGIIAAQSNAEYGVIGAAPGVKLGQYKVADVEGYYTSDIIIAGFNMAYESGADIISASVGDPNGWSEDPQAVALQRIVDAGTIVVTSAANQGLKGLFFGSTPATGIGLAVAGSSDNDRYLLWLNEASYDVNGANQSFGLTFGSPKAWPTSSLPIFHVGEACSALNSAGIPDLSTYAVLIAASQACSYQTQVDNVAAFGGQYILFSNYVRGTSVVSVDNATAVGMVTQSQGETWVSLLEQDEVVSVYMADPSLNPSFLSNETNTITPGAASKTTSWGPSFELDMITSVMVPGAYVLSLFPINLGSYYVLSGTSMAAPLLASIYALVMQASGVKDITTLHTMISGTAKAALWNNGNTYYDYLAPTPQQGAGLVQAYDAAYSTSALDRSRMQFNDTEFFNGTQTFTLSNNGDASVTYKISNVGAPTVYTFPNDTAITPMSFPNDFDQTHASLSFSSSELSIDSGSSETITVTAVQPDVDSGRLPVWSGFITINGTDGSNLTLPYLGVAARMRDVTVLDAQNTTVVSSLDASYKPVAANYSFVLPPAGEINDTAYSNSTNLPRLYIQMAFGSRLIEAFVLTADGIELGSIPNFPQTYQSRISLSDSQGTAYFPIWDGSLKNGTYLSAGSYKFKVKALHVFGDESVDTDWDETETVPFSIDYLS

SEQ ID NO: 38880 - DNA, 1464 bp, Muscodor strobelii
  misc_feature: SGI cDNA ID NO. 573519
  misc_feature: Encodes the peptide sequence at SEQ ID NO 38881
atggctcctaagctggcaaacattgtcgctgccgccacggtgttggcaagcagccgcctcgcccaggcccagaatcctgacgacaccaaagaggcacccccagcactgaccacctacaagtgcacgactgcgggaggatgtgtcgctcaggatacttctgtggttatcgactggaactaccattggattcacacttcggattatttgtcttgtacaacctcgagtgggatcaatgctactctctgtcccgacgaagctacctgcgcagataactgtttcattgccggcgatacgaattacacggcaaatggcgtcacaacttccggggatagcctgactatgtatcagtatgtgacaggtactgatggaactccatcaaatgcatcaccgcgtctttatcttcttggcagcgatggagactatgaggatttgcagttgttgggccaagaactcaccttcacggttgatttatcaactcttccatgtggtgaaaatggagctttatatttgagtgagatggatgtaagtagcatgacgggcggccggaatgccgacaatacgggaggtgccagctacggatcgggttattgtgatgctcagtgtcccgtccagacctggaagaatggaactctgaacactagtggtgctggctactgctgcaatgagatggacattctggaggctaactcccgagcaattgcattcacgccacacccctgtactgaggcggattgtgaccgtaatggatgcggattcaacccgtatgcccagggaaaaacgaattactacggtcctggtggcacagttgatacctctaagccatttacagtcgtcacgcaattcatcactaacgatggcacgacgtctggaacacttaccaaagtcaaccgaaagtatattcagaacggtgtcgtcgttgccagcgcagtatctggcggagacttccttacaacggattcatgcaactctctcgacccgacagctgcatcatttggtggcttgacgggcatgggtgaagctctaggtcgtggcatggttttgatcttctctatctggaacgacgcaactggatacatgaactggctggattcgggtagcaatggaccttgcgacgccactgagggaaatccaactctcattattaagaataaccctacgacacatgttattttcagtgcaatcaagtggggagatatcggttcgacatttaaggactctggatcgagcaccacgactagcaaagctacaaccacaactaaagctacaacgactaccaaaaaaacaacaactactactaaagctaccactaccactaagagctctgccacaactaccacaacctcaacaggtgcaacgcagactcactacggacaatgcggtggtattggctttacaggcccaaaggcctgtgcaagcccgtataagtgcacatactcgaatgactactactcccagtgtttgtag

SEQ ID NO: 38881 - protein, 487 aa, Muscodor strobelii
  misc_feature: SGI Peptide ID NO. 573519
  misc_feature (455)..(483): Pfam Id: PF00734 Pfam Desc: Fungal cellulose binding domain
  misc_feature (25)..(405): Pfam Id: PF00840 Pfam Desc: Glycosyl hydrolase family 7
  misc_feature (8)..(487): NCBI GI: 119467101 Blast Desc: endoglucanase, [Neosartorya fischeri NRRL 181] gi|119405509|gb|EAW15460.1| endoglucanase, [Neosartorya fischeri NRRL 181]
  misc_feature (10)..(487): NCBI GI: 70984781 Blast Desc: endoglucanase [Aspergillus fumigatus Af293] gi|66845524|gb|EAL85859.1| endoglucanase, [Aspergillus fumigatus Af293]
  misc_feature (10)..(487): NCBI GI: 159122681 Blast Desc: endoglucanase, [Aspergillus fumigatus A1163]
  misc_feature (8)..(487): NCBI GI: 115402429 Blast Desc: endoglucanase EG-1 precursor [Aspergillus terreus NIH2624] gi|114189137|gb|EAU30837.1| endoglucanase EG-1 precursor [Aspergillus terreus NIH2624]
  misc_feature (24)..(487): NCBI GI: 211998851 Blast Desc: endoglucanase I [Penicillium decumbens]
  misc_feature (24)..(487): NCBI GI: 121704228 Blast Desc: endoglucanase, [Aspergillus clavatus NRRL 1] gi|119398522|gb|EAW08952.1| endoglucanase, [Aspergillus clavatus NRRL 1]
  misc_feature (32)..(487): NCBI GI: 164451746 Blast Desc: endoglucanase I [Penicillium decumbens]
  misc_feature (32)..(487): NCBI GI: 239909307 Blast Desc: endoglucanase I [Penicillium oxalicum]
  misc_feature (1)..(487): NCBI GI: 124108997 Blast Desc: endoglucanase I [Hypocrea pseudokoningii]
  misc_feature (1)..(487): NCBI GI: 269308684 Blast Desc: endoglucanase I [Trichoderma longibrachiatum]
  misc_feature (1)..(487): SWISSPROT Homolog: EC 3.2.1.4 Cellulase
MAPKLANIVAAATVLASSRLAQAQNPDDTKEAPPALTTYKCTTAGGCVAQDTSVVIDWNYHWIHTSDYLSCTTSSGINATLCPDEATCADNCFIAGDTNYTANGVTTSGDSLTMYQYVTGTDGTPSNASPRLYLLGSDGDYEDLQLLGQELTFTVDLSTLPCGENGALYLSEMDVSSMTGGRNADNTGGASYGSGYCDAQCPVQTWKNGTLNTSGAGYCCNEMDILEANSRAIAFTPHPCTEADCDRNGCGFNPYAQGKTNYYGPGGTVDTSKPFTVVTQFITNDGTTSGTLTKVNRKYIQNGVVVASAVSGGDFLTTDSCNSLDPTAASFGGLTGMGEALGRGMVLIFSIWNDATGYMNWLDSGSNGPCDATEGNPTLIIKNNPTTHVIFSAIKWGDIGSTFKDSGSSTTTSKATTTTKATTTTKKTTTTTKATTTTKSSATTTTTSTGATQTHYGQCGGIGFTGPKACASPYKCTYSNDYYSQCL

SEQ ID NO: 38882 - DNA, 680 bp, Muscodor strobelii
  misc_feature: SGI EST ID NO. CUFF.93484.0
  misc_feature: Variant of the nucleotide sequence at SEQ ID NO 38880
ggcggccggaatgccgacaatacgggaggtgccagctacggatcgggttattgtgatgctcagtgtcccgtccagacctggaagaatggaactctgaacactagtggtgctggctactgctgcaatgagatggacattctggaggctaactcccgagcaattgcattcacgccacacccctgtactgaggcggattgtgaccgtaatggatgcggattcaacccgtatgcccagggaaaaacgaattactacggtcctggtggcacagttgatacctctaagccatttacagtcgtcacgcaattcatcactaacgatggcacgacgtctggaacacttaccaaagtcaaccgaaagtatattcagaacggtgtcgtcgttgccagcgcagtatctggcggagacttccttacaacggattcatgcaactctctcgacccgacagctgcatcatttggtggcttgacgggcatgggtgaagctctaggtcgtggcatggttttgatcttctctatctggaacgacgcaactggatacatgaactggctggattcgggtagcaatggaccttgcgacgccactgagggaaatccaactctcattattaagaataaccctacgacacatgttattttcagtgcaatcaagtggggagatatcggttcgacatttaaggactc

SEQ ID NO: 38883 - DNA, 978 bp, Muscodor strobelii
  misc_feature: SGI cDNA ID NO. 573520
  misc_feature: Reduced expression when VOC is produced
  misc_feature: Encodes the peptide sequence at SEQ ID NO 38884
atgggcaagaagaagcgcggtcaccccgatgtcgaggagctcctcagtcgcgcctggtgctactactgcgaaagagacttcgaggatctgaagctgttgatttcccaccagaaggccaagcatttcaagtgcgacagatgtggccgccgactcaacaccgcaggaggtctctccgtccacatgaaccaagtccacaaggagtcgctgtcctcggtcgagaatgcattgcccaaccgccagggcctggacgtcgagatcttcggtatggagggtatacccgaggacatcgtccagcaacacaaccagcgcatcatccagacattctaccaagcacaggcagagcgatacgctgctaccggcaacccacctcccggccagaatgccaacagacccgccaagaagattaaggtcgagacccctgacgagatcaagaaccgcctagccgagcaccgagcccgcctggctgcccagaaggcgaacggaggaagtgccactcacaccccaacccaggcacttcccgacggacacagtcctgcccagaacccctcaccgggtgctttcaactctccattccaaccccccggagcacagtaccccgggttccctcctcagcaacagtacccctacgctgcctcaaatctcccctcgcggccgggaggcaacgttccgcccgccactggcctcccgcctcgtcctggccagccaggctggcaaggtggctcgactatcgacgagcttgtgtcaggcgctgccgctcagcaaggtgacgacatcgatgcgatcatacgaatggctgaagctggcatcaagcccccgaagaaacctgagacaccgaccgaagagcctgtgcccgagaagaagtccaagaaggagaaggacaagaacgtgcagatgatatacgaagacgatctcagtcccgaggagagaatggccatgatgccgagatacgcctttgctccggaagctgctgctgcctag

SEQ ID NO: 38884 - protein, 325 aa, Muscodor strobelii
  misc_feature: SGI Peptide ID NO. 573520
  misc_feature (1)..(324): NCBI GI: 171681545 Blast Desc: protein product [Podospora anserina] gi|170940731|emb|CAP65959.1| protein product [Podospora anserina]
  misc_feature (1)..(319): NCBI GI: 85095038 Blast Desc: NCU06145 [Neurospora crassa OR74A] gi|28921465|gb|EAA30771.1| [Neurospora crassa OR74A]
  misc_feature (1)..(311): NCBI GI: 145612005 Blast Desc: MGG_08015 [Magnaporthe grisea 70-15] gi|145019249|gb|EDK03477.1| MGG_08015 [Magnaporthe grisea 70-15]
  misc_feature (1)..(319): NCBI GI: 116203915 Blast Desc: CHGG_09841 [Chaetomium globosum CBS 148.51] gi|88175969|gb|EAQ83437.1| CHGG_09841 [Chaetomium globosum CBS 148.51]
  misc_feature (1)..(324): NCBI GI: 256722647 Blast Desc: NECHADRAFT_101763 [Nectria haematococca mpVI 77-13-4]
  misc_feature (1)..(324): NCBI GI: 110617784 Blast Desc: RING-6 [Gibberella zeae]
  misc_feature (1)..(302): NCBI GI: 46120484 Blast Desc: FG04889.1 [Gibberella zeae PH-1]
  misc_feature (1)..(321): NCBI GI: 239609573 Blast Desc: C2H2 finger domain-containing protein [Ajellomyces dermatitidis ER-3]
  misc_feature (1)..(321): NCBI GI: 261196692 Blast Desc: C2H2 finger domain-containing protein [Ajellomyces dermatitidis SLH14081] gi|239595994|gb|EEQ78575.1| C2H2 finger domain-containing protein [Ajellomyces dermatitidis SLH14081]
  misc_feature (1)..(321): NCBI GI: 226279147 Blast Desc: conserved [Paracoccidioides brasiliensis Pb01]
  misc_feature: Useful for introducing or modulating the production of volatile compounds
MGKKKRGHPDVEELLSRAWCYYCERDFEDLKLLISHQKAKHFKCDRCGRRLNTAGGLSVHMNQVHKESLSSVENALPNRQGLDVEIFGMEGIPEDIVQQHNQRIIQTFYQAQAERYAATGNPPPGQNANRPAKKIKVETPDEIKNRLAEHRARLAAQKANGGSATHTPTQALPDGHSPAQNPSPGAFNSPFQPPGAQYPGFPPQQQYPYAASNLPSRPGGNVPPATGLPPRPGQPGWQGGSTIDELVSGAAAQQGDDIDAIIRMAEAGIKPPKKPETPTEEPVPEKKSKKEKDKNVQMIYEDDLSPEERMAMMPRYAFAPEAAAA

SEQ ID NO: 38885 - DNA, 1552 bp, Muscodor strobelii
  misc_feature: SGI EST ID NO. CUFF.93509.0
  misc_feature: Variant of the nucleotide sequence at SEQ ID NO 38883
tgaatctgcctccatccacagacaatcgtttaccatcgccttacctgcgacgtccttcctcgcgatcccgggcgcgcatcccttgaaaagtgtcaattctgcgcccgaccaactacatacagactcaaagtcgattgctcttcctacatctctgcgacaccagcgccaccatgggcaagaagaagcgcggtcaccccgatgtcgaggagctcctcagtcgcgcctggtgctactactgcgaaagagacttcgaggatctgaagctgttgatttcccaccagaaggccaagcatttcaagtgcgacagatgtggccgccgactcaacaccgcaggaggtctctccgtccacatgaaccaagtccacaaggagtcgctgtcctcggtcgagaatgcattgcccaaccgccagggcctggacgtcgagatcttcggtatggagggtatacccgaggacatcgtccagcaacacaaccagcgcatcatccagacattctaccaagcacaggcagagcgatacgctgctaccggcaacccacctcccggccagaatgccaacagacccgccaagaagattaaggtcgagacccctgacgagatcaagaaccgcctagccgagcaccgagcccgcctggctgcccagaaggcgaacggaggaagtgccactcacaccccaacccaggcacttcccgacggacacagtcctgcccagaacccctcaccgggtgctttcaactctccattccaaccccccggagcacagtaccccgggttccctcctcagcaacagtacccctacgctgcctcaaatctcccctcgcggccgggaggcaacgttccgcccgccactggcctcccgcctcgtcctggccagccaggctggcaaggtggctcgactatcgacgagcttgtgtcaggcgctgccgctcagcaaggtgacgacatcgatgcgatcatacgaatggctgaagctggcatcaagcccccgaagaaacctgagacaccgaccgaagagcctgtgcccgagaagaagtccaagaaggagaaggacaagaacgtgcagatgatatacgaagacgatctcagtcccgaggagagaatggccatgatgccgagatacgcctttgctccggaagctgctgctgcctaggtttgagctttaaggccatggcttcagaagcaagcagacaggagctcgactaggacaaagagagcgggaaagagaagtgaataggggatatgctgtaagcgagcggtatgggcgtatggaaaactgggttgttgtaggtatctaatgatcagaaccctatcccatcaagaatggcatggggttttatacgatggtgcctggtttatggctcactgaagtaaaacagcatgaaaattgtacattattgaaagcttcattacagactgcgccccagtaatgatgaacatgccatggtagctcgcaaaacatacgtatcaggtgatgcaactatagaaggggaatacccgccagaagccattgcacgcgatctaagtgtgcctatgtcgcccacaatagtcacgaat

SEQ ID NO: 38886 - DNA, 1740 bp, Muscodor strobelii
  misc_feature: SGI cDNA ID NO. 573521
  misc_feature: Encodes the peptide sequence at SEQ ID NO 38887
atgcccgttgacacgatcacgggcgccgacttcgccgccagcacctttgactacctcattgtgggcggcggtacggccgggctggtggttgctgctcgcctttccgaagatccatctttgactattggcttactggaagcaggcgaagcggcaccagatgaacctacaattaacgacccaggccgcatgttacagacactgggcacaaaatatgactggcagtttgagacagttccgcagcctggtcttggtggccgaaaggattcgtggccaaggggaaaagtcttaggcggctcaagtgctctaaacctcatgacatggaatcgcggaagcagggaagattacgatgcttgggaaaaattgggcaataagggatggggttggaatgatctgttgccgtttttcaagaagagcgaaaatttccatttgcctaacaaagacacccaactcgccaatcgcgagcattacgaccacgaagcaattggacgtgatggcgctgtcagcgtctcgtatgtgaagagctactccgcgacgcaccagctctgctatgatactcttttagcaatgggtgtgccggagaacactgcacatcactcgggctccaacgtaggagtatggacgaatcccgcttcggttcacccggataatggcacacgttcgtatgcggcgccggcatacttcacgccaagcgctgcgcggcctaatttcgtcgtgataacgggagcgactgttcaaaaattagtcttaagcaatagcgatggcaagtggactgccacaggagtcctattcgaacatgccggatccaattacagcgtatctgcagcacaagaagtcgtcttgagcgcaggtagcattcaatcccctcaacttctagagctctccggtgttggtaatccagccatcctcaaagaagccggaatcgaagtcaaggtccgaagccccagagtaggcgaaaacttgcaggatcacttgacaacaatgtcggttttcgaagtggacccgaacctggaggtgttgaacaagagcgcgccagcttctcctatttgctatctgccggtttgcgatgcaattggcaaggacgcattcagcgaaatagctcgccaggttgaagcgctggacctctcatcgtctacaaagagtgccattcaaaagcagagatttgagcctggttccaagctaggacaattcgagtacatcttcgatctggggaactatagcatgaacttcaagggggatagcggaaagatgtatgctagcatgtttcagatcttgcagtacccattctcgaagggcaacttgcatattcaacccaactcttcgatcaatgacaagcccatcatcaaccctgggtattatgatgggccacatggcgaagttgatctcgagatcacgacgcagtgcatcaagtttacggaccagttgctgagttccaagcccttgtctgacgtcgtccgggggcgggtttaccctgcaccttcagtggagacagacgaacagctcaaagaatgggtaagggaggatacgacgacagattggcaccccatcggcacttgcgcgatgggcggcaagggcggtatcgaggatggagtagtcgatgagagacttagagtgtatggtgtagagagactgagagtggtagatgcgagtattatgcctattcagattagcgcgcatctgcaagcaactgtttatgctattggtgagaaggcggcacagatgatactcgaagataggaaatag

SEQ ID NO: 38887 - protein, 579 aa, Muscodor strobelii
  misc_feature: SGI Peptide ID NO. 573521
  misc_feature (420)..(570): Pfam Id: PF05199 Pfam Desc: GMC oxidoreductase
  misc_feature (16)..(338): Pfam Id: PF00732 Pfam Desc: GMC oxidoreductase
  misc_feature (17)..(51): Pfam Id: PF01266 Pfam Desc: FAD dependent oxidoreductase
  misc_feature (16)..(144): Pfam Id: PF00732 Pfam Desc: GMC oxidoreductase
  misc_feature (215)..(338): Pfam Id: PF00732 Pfam Desc: GMC oxidoreductase
  misc_feature (17)..(49): Pfam Id: PF05834 Pfam Desc: Lycopene cyclase protein
  misc_feature (10)..(579): NCBI GI: 46115266 Blast Desc: FG03475.1 [Gibberella zeae PH-1]
  misc_feature (10)..(577): NCBI GI: 169766224 Blast Desc: [Aspergillus oryzae RIB40] gi|83765438|dbj|BAE55581.1| protein product [Aspergillus oryzae]
  misc_feature (10)..(577): NCBI GI: 238482923 Blast Desc: choline dehydrogenase, [Aspergillus flavus NRRL3357] gi|220700750|gb|EED57088.1| choline dehydrogenase, [Aspergillus flavus NRRL3357]
  misc_feature (5)..(579): NCBI GI: 256724099 Blast Desc: NECHADRAFT_86331 [Nectria haematococca mpVI 77-13-4]
  misc_feature (10)..(577): NCBI GI: 171691246 Blast Desc: protein product [Podospora anserina] gi|170945571|emb|CAP71684.1| protein product [Podospora anserina]
  misc_feature (10)..(579): NCBI GI: 240111847 Blast Desc: glucose-methanol-choline (gmc) oxidoreductase, [Coccidioides posadasii C735 delta SOWgp]
  misc_feature (10)..(579): NCBI GI: 119173504 Blast Desc: glucose oxidase precursor [Coccidioides immitis RS]
  misc_feature (10)..(563): NCBI GI: 116197320 Blast Desc: CHGG_05258 [Chaetomium globosum CBS 148.51] gi|88181171|gb|EAQ88639.1| CHGG_05258 [Chaetomium globosum CBS 148.51]
  misc_feature (6)..(577): NCBI GI: 71006384 Blast Desc: UM01711.1 [Ustilago maydis 521] gi|46097294|gb|EAK82527.1| UM01711.1 [Ustilago maydis 521]
  misc_feature (9)..(574): NCBI GI: 71019921 Blast Desc: UM04044.1 [Ustilago maydis 521] gi|46099908|gb|EAK85141.1| UM04044.1 [Ustilago maydis 521]
  misc_feature (15)..(574): SWISSPROT Homolog: EC 1.1.99.1 Choline dehydrogenase
MPVDTITGADFAASTFDYLIVGGGTAGLVVAARLSEDPSLTIGLLEAGEAAPDEPTINDPGRMLQTLGTKYDWQFETVPQPGLGGRKDSWPRGKVLGGSSALNLMTWNRGSREDYDAWEKLGNKGWGWNDLLPFFKKSENFHLPNKDTQLANREHYDHEAIGRDGAVSVSYVKSYSATHQLCYDTLLAMGVPENTAHHSGSNVGVWTNPASVHPDNGTRSYAAPAYFTPSAARPNFVVITGATVQKLVLSNSDGKWTATGVLFEHAGSNYSVSAAQEVVLSAGSIQSPQLLELSGVGNPAILKEAGIEVKVRSPRVGENLQDHLTTMSVFEVDPNLEVLNKSAPASPICYLPVCDAIGKDAFSEIARQVEALDLSSSTKSAIQKQRFEPGSKLGQFEYIFDLGNYSMNFKGDSGKMYASMFQILQYPFSKGNLHIQPNSSINDKPIINPGYYDGPHGEVDLEITTQCIKFTDQLLSSKPLSDVVRGRVYPAPSVETDEQLKEWVREDTTTDWHPIGTCAMGGKGGIEDGVVDERLRVYGVERLRVVDASIMPIQISAHLQATVYAIGEKAAQMILEDRK

SEQ ID NO: 38888 - DNA, 1825 bp, Muscodor strobelii
  misc_feature: SGI EST ID NO. CUFF.93506.0
  misc_feature: Variant of the nucleotide sequence at SEQ ID NO 38886
gccaatgcatgataggtgtatatagagcgataatatgcagattattctccagtagatgcgacatctgatttctcacctttatatatttaacctttgaaaatgcccgttgacacgatcacgggcgccgacttcgccgccagcacctttgactacctcattgtgggcggcggtacggccgggctggtggttgctgctcgcctttccgaagatccatctttgactattggcttactggaagcaggcgaagcggcaccagatgaacctacaattaacgacccaggccgcatgttacagacactgggcacaaaatatgactggcagtttgagacagttccgcagcctggtcttggtggccgaaaggattcgtggccaaggggaaaagtcttaggcggctcaagtgctctaaacctcatgacatggaatcgcggaagcagggaagattacgatgcttgggaaaaattgggcaataagggatggggttggaatgatctgttgccgtttttcaagaagagcgaaaatttccatttgcctaacaaagacacccaactcgccaatcgcgagcattacgaccacgaagcaattggacgtgatggcgctgtcagcgtctcgtatgtgaagagctactccgcgacgcaccagctctgctatgatactcttttagcaatgggtgtgccggagaacactgcacatcactcgggctccaacgtaggagtatggacgaatcccgcttcggttcacccggataatggcacacgttcgtatgcggcgccggcatacttcacgccaagcgctgcgcggcctaatttcgtcgtgataacgggagcgactgttcaaaaattagtcttaagcaatagcgatggcaagtggactgccacaggagtcctattcgaacatgccggatccaattacagcgtatctgcagcacaagaagtcgtcttgagcgcaggtagcattcaatcccctcaacttctagagctctccggtgttggtaatccagccatcctcaaagaagccggaatcgaagtcaaggtccgaagccccagagtaggcgaaaacttgcaggatcacttgacaacaatgtcggttttcgaagtggacccgaacctggaggtgttgaacaagagcgcgccagcttctcctatttgctatctgccggtttgcgatgcaattggcaaggacgcattcagcgaaatagctcgccaggttgaagcgctggacctctcatcgtctacaaagagtgccattcaaaagcagagatttgagcctggttccaagctaggacaattcgagtacatcttcgatctggggaactatagcatgaacttcaagggggatagcggaaagatgtatgctagcatgtttcagatcttgcagtacccattctcgaagggcaacttgcatattcaacccaactcttcgatcaatgacaagcccatcatcaaccctgggtattatgatgggccacatggcgaagttgatctcgagatcacgacgcagtgcatcaagtttacggaccagttgctgagttccaagcccttgtctgacgtcgtccgggggcgggtttaccctgcaccttcagtggagacagacgaacagctcaaagaatgggtaagggaggatacgacgacagattggcaccccatcggcacttgcgcgatgggcggcaagggcggtatcgaggatggagtagtcgatgagagacttagagtgtatggtgtagagagactgagagtggtagatgcgagtattatgcctattcagattagcgcgcatctgcaagcaactgtttatgctattggtgagaaggcggcacagatgatactcg

SEQ ID NO: 38889 - DNA, 945 bp, Muscodor strobelii
  misc_feature: SGI cDNA ID NO. 573522
  misc_feature: Encodes the peptide sequence at SEQ ID NO 38890
atgcctgttgttgcagttgcaggcggtacaagctccattgggcggtcaattgttgaagcgatcgtggagtctgggaaacatgaggtgattgtactatcgcgaaagccgaaccctgagctagaagatgtgctgaaggccaagttcataaccgtaaactacttcgaccacgagggtcttgtaaaatgtctcgaagacaacaagattaatactttgatctcggcaatgactttcaagccaactaacggtgcgattccggaaattcagctcgtgaaagcggccgacgcatcgaaggccacgaaacgatatgtctttaacaactggggctgcccgattgaggacggagacgagctgaggatgccggttcaggccttcaaagtcgaagccctaaaagcactacatcaaaccaaggacctagaacacacgcaattctatcccggtttcttcgcagactactggtgcatgccagccgtcaagacttacacagaggccgctgcgtgggttttcgatattccgaacaacacggctgtgatccctggtgacggtacaacgccagttgggttcactcataccatggatgttgcgaaatacgtcgctgccgcgctagacttggagaaatgggatcctgagtataatcttgttgcggataagaagacttggcatgagtttcttccattggttgaggatgcgcgcggagccaagttgaaagtcacttatgacagtgtcgagaagctgaaggccgggaagccaacacctcttccggcccaggaacaagctgggttgttcgctgaggggagcccattccctcagctcatgtgttttgggtgcctattgcttgttgacggaaagttcgacatcaaacgcggtcgcattgcgaaggaagtcttcccgaatatccatgctagaactgttaaggaattgctagatgcggcatggaagaagtcttga

SEQ ID NO: 38890 - protein, 314 aa, Muscodor strobelii
  misc_feature: SGI Peptide ID NO. 573522
  misc_feature (4)..(240): Pfam Id: PF05368 Pfam Desc: NmrA-like family
  misc_feature (4)..(46): Pfam Id: PF05368 Pfam Desc: NmrA-like family
  misc_feature (4)..(314): NCBI GI: 116204097 Blast Desc: CHGG_09932 [Chaetomium globosum CBS 148.51] gi|88176060|gb|EAQ83528.1| CHGG_09932 [Chaetomium globosum CBS 148.51]
  misc_feature (1)..(308): NCBI GI: 256725155 Blast Desc: NECHADRAFT_73228 [Nectria haematococca mpVI 77-13-4]
  misc_feature (3)..(312): NCBI GI: 256723616 Blast Desc: NECHADRAFT_52062 [Nectria haematococca mpVI 77-13-4]
  misc_feature (1)..(308): NCBI GI: 261357174 Blast Desc: conserved [Verticillium albo-atrum VaMs.102]
  misc_feature (4)..(313): NCBI GI: 256723448 Blast Desc: NECHADRAFT_42269 [Nectria haematococca mpVI 77-13-4]
  misc_feature (3)..(311): NCBI GI: 261353740 Blast Desc: conserved [Verticillium albo-atrum VaMs.102]
  misc_feature (1)..(312): NCBI GI: 256721577 Blast Desc: NECHADRAFT_92336 [Nectria haematococca mpVI 77-13-4]
  misc_feature (1)..(312): NCBI GI: 238492437 Blast Desc: conserved [Aspergillus flavus NRRL3357] gi|220695949|gb|EED52291.1| conserved [Aspergillus flavus NRRL3357]
  misc_feature (3)..(311): NCBI GI: 256725502 Blast Desc: NECHADRAFT_70763 [Nectria haematococca mpVI 77-13-4]
  misc_feature (15)..(312): NCBI GI: 256723537 Blast Desc: NECHADRAFT_42193 [Nectria haematococca mpVI 77-13-4]
MPVVAVAGGTSSIGRSIVEAIVESGKHEVIVLSRKPNPELEDVLKAKFITVNYFDHEGLVKCLEDNKINTLISAMTFKPTNGAIPEIQLVKAADASKATKRYVFNNWGCPIEDGDELRMPVQAFKVEALKALHQTKDLEHTQFYPGFFADYWCMPAVKTYTEAAAWVFDIPNNTAVIPGDGTTPVGFTHTMDVAKYVAAALDLEKWDPEYNLVADKKTWHEFLPLVEDARGAKLKVTYDSVEKLKAGKPTPLPAQEQAGLFAEGSPFPQLMCFGCLLLVDGKFDIKRGRIAKEVFPNIHARTVKELLDAAWKKS

SEQ ID NO: 38891 - DNA, 483 bp, Muscodor strobelii
  misc_feature: SGI cDNA ID NO. 573523
  misc_feature: Elevated expression when VOC is produced
  misc_feature: Encodes the peptide sequence at SEQ ID NO 38892
atgtttcgcctgcagagacccagacaggctccggcacaatcccgtgctacgaccgctcgtcaacaacgacaacctgcaggaggaattcagaagcccatcgcactccagccgaacttggcccgctcccgacagcccaatgtcgcgcaggccgtacggctcttcgcgtcacaacatcaaaacactggtaccgctgaactaacggcaaacagcgacgatgatatgatgttccccgagtctgcagagtccattgacgcgcagaccctcgctggccagatgacaagtctgacagaacagatggtccagatcaacaattctctaaacgagctaaaagagaccatagcgaaggagtttcagagccaacgggacgagtgggataggcgtctggacggccttcaggtcattctccaagagagtctcggatcgctcgcgaccacagaatgggtcgatcccagtttgctagcacacggtcaagagggtatgtag

SEQ ID NO: 38892 - protein, 160 aa, Muscodor strobelii
  misc_feature: SGI Peptide ID NO. 573523
  misc_feature: Useful for introducing or modulating the production of volatile compounds
MFRLQRPRQAPAQSRATTARQQRQPAGGIQKPIALQPNLARSRQPNVAQAVRLFASQHQNTGTAELTANSDDDMMFPESAESIDAQTLAGQMTSLTEQMVQINNSLNELKETIAKEFQSQRDEWDRRLDGLQVILQESLGSLATTEWVDPSLLAHGQEGM

SEQ ID NO: 38893 - DNA, 1938 bp, Muscodor strobelii
  misc_feature: SGI EST ID NO. CUFF.93663.3
  misc_feature: Variant of the nucleotide sequence at SEQ ID NO 38891
tcttcatgtggcctttgcatgtactgggctgaacttgatcgagtttgattatgctgtattcagtcccatcccatagcttgggaagcccgacgactatgtatcttcctgaccacacgatcacgaatgaatcgattattgctgcggtggtcgatattcattagaggcatgcccatcatgcttttcagcgcatactgtacatatctttacagtgcaagacactctattgcatgttcagggtgctcatcaaaggtccgaaacaggccggatggccgtttcttgatctctcaaaagaacagagcccagcgtgtcaatagtacagtcgatccagaagtcgcctgcatcatctactagaacggagtggtagcaggaatctacgccgctcttggaccttctactaacatccgaaaattgctcggatgtacagtaggatattagcctcagatacttcggccttgaacttctcttgtcagcaggccactttgtacgtcccatatatacctgcggccatagtttcggctgataagatcacacacgtcttaatttcaggcttcatcacgtttaaagagcaacaataccgacaatgtttcgcctgcagagacccagacaggctccggcacaatcccgtgctacgaccgctcgtcaacaacgacaacctgcaggaggaattcagaagcccatcgcactccagccgaacttggcccgctcccgacagcccaatgtcgcgcaggccgtacggctcttcgcgtcacaacatcaaaacactggtaccgctgaactaacggcaaacagcgacgatgatatgatgttccccgagtctgcagagtccattgacgcgcagaccctcgctggccagatgacaagtctgacagaacagatggtccagatcaacaattcgtgagaaccgtgtgatttcgctttcaatctcttccgctgattttcgaccctggcagtctaaacgagctgtatgtattaccctttatctatctcttgtgtagcaacggcgaagctgacagcagcatagaaaagagaccatagcgaaggagtaggtcatgaccgtcgaaggtaatgtacatcgactagaaagctaaaggcgaacaggtttcagagccaacgggacgagtgggataggcgtctggacggccttcaggtcattctccaagagagtctcggatcgctcgcgaccacagaatgggtcgatcccagtttgctagcacacggtcaagagggtatgtaggatggaggtattttgttatcgcggctgtcggactgcagaattgtcgaactgcaagcctgaagaggggtgtgatcaggcagggtagatcggtcggctcgttcgtaaagtcaccttctagtggaatgtcacgatttgaggataatactatacaatactaaacttattgattgatgacagagtgaggaatctgaccggctaattgacaagagaagagatttcggagagatccctgtcaagaacaagccctgtagtccgcttatcatcactaactagctacatacatccctcacggtcaggaacaataataaatcattcgattttatgccatcacggaggtcgcgtccaatacgaccgttctttcgggatggcacgttgcaaagacgtctcttgacctttacgcaaaccatagagacatctccgttccgcaaggtcctccttgtagtgacgctgtctggaaccgtcagcatcttggcggtagcgggtcgtgtggagtaggcccgacatgcaaggcagaggaatatgtatgaatgatgcagaagtggaccgttgagagagcgtctagagcaggccaacctcttgactacaaaaggcagacatgtccctcgattgctacggatcttggtcctgtttcctggcagagcatccgtctcccgtgtctcccgtaatgcttgagacctgtttcgagtgttctccaggttcaggag

SEQ ID NO: 38894 - DNA, 3942 bp, Muscodor strobelii
  misc_feature: SGI cDNA ID NO. 573524
  misc_feature: Encodes the peptide sequence at SEQ ID NO 38895
atgcgcgagatctcggagactgctcgcgcgcgggaagccctcaggtttgaagcatctgccattgcagtcactcaactttacgaagaatcccaaatcaggtcatcgccgcacaatgccaacttcaaggccgatcctgttttgacgtctctcgctcaactagctgctgtgagattcgatggcgatggcgcaattgtatcattatttgatgtgcataatcaatactttcttgcccacgccacgaggacgtctccaatcatccatgtcgaacatgatgacgaacaaggccggtgttacctgctcggcaaagcgatcccacgacctaatagctttggtgaagatgtgttgcttgaatctggtatcgatgagagcacgttgtcagaccaagacggatgtggccgacggctccctgtctctgtggtgccggatatcgcttcatcgcctcgctcctcgcgactcatcggcatacctggtcaccctaatgcgcgattctacgctgcggtgcctattagatcaccacgtgacataaacattggcgttcttactgtctatgggttagaagcaagaacagagatcgagcctcgcctaatctctttcttgcgagatttgtccgctacagtggcgggtcatttcaactcgacaaaatcgcgcctagacttgaggcgaagtgagcgcatggttcgggggctagggagctttgtcgaaggcaccgctggcatgtcatttggtcccaatacttcaaactttgactccttccgaaacgaaggtttggaagggacactcaactctgggcaacaagacattcagcaagcaaatagagaaagagagcagcagacaccatttttcgcaaacgaagactctacgtatcacgaagatcctcagaccccgccaccgcatttaatatcgccctctcccgctattgagctccccgtccgatccaaaagctacctgcctactgaaactcgcgagcctcgcgaatacgagcccatgtcatcagcccactcgagccccgcgactaagaagatagataattcagggtcaactaacggtgatgaagatggtcatatctcttccgtgaaacatcttttttcccgcgctgcaaacatcatcagagaaagcatcgaggtcgaaggtgtcgtctttgttgatgctagcttgtcatcattcgggggccttattgggatgaacaatagctcagatgcctcggtttcaatctattccagcagcgaagaaagcattgtcgataatcaaagtgataatttagataacacatgcgatatcctcggatactcgacgacaacttcatccagcctggatgaaagtaccagtattccggaacaaacattaatcccagagaagttccttaagactctactacggagatatcccgaaggcaagatttaccattttggcgacgatgggtcactatcgacgactggtgattcgtctgaaagcgaaccggtggcggcttcatctcgacctccggccattaaaaactctagcgaagcatcggtgagctccgctgataaatcaaggggacgtcgtcggagtaacaaaaaatggtcaagacaaagcgagggcgtatctcttttgaaaatcatcccaaatgcaagatctgtgatgatattgcccctttgggattataacaaagagcgatggtgtgagtcgtgcgtgtctgattctcaagcattgggtgtcatggaaagacaaattactaatgtaggattatccttgattcgtagatgcaggaggaattgtctggacgtgtacaccggcgcgatcgttcacgaaagaagcagatctaagctatcttcgagcgtttggaatgagctgcgcaatagtcttctatccgaattggcacgtcttgaagttcacatagttgataaagctaaatcggatattcttggatcattaagccatgagctaagatcaccattgcatggcgttgtcgcggccgcagagcttctccatgacacctctctcgatgcctttcaatgcgacgtcctccactcccttgaatcatgtggcagagtcctgctggatgtgttaaaccatttgcttgattataccaagatcaatagtgtcatgaaggatcataagcctaaaaaaaagacccgcaagagtaagatcccggcttcatctagtcagtcacgagctttcaatcagttacgactctcaacatacacacatatcgattcactgttcgaggaaagcatcgacagtgtcttcgccggtcatatataccaaaaaatctcgatcgcacaacttgatcacaaatccgaccgcaatgccgatgccatggccttacagcgaatcgatacgctagatgctgttgaaagctttggtcatcgagcagggccttatggccaactcaacattcatttgggagatgtctctgtgtttattgatatcgacccaagtgtgccttggaagtttcgcgctcagcctggtgcactgcgtcgaataatacttaatattctgggaaattctcttagatttacggatagaggcctgattgtcgtcacccttagacaagaaaaaaatctttcaacaaagtcatcgcttgacacaaacattaaactcactgtcacggacaccggccgcggtattggttcgtatttcatgcaacatcgcctcttcacacctttttcgcaagaagaccagctttcagctggcacgggccttggtctcacattagtaaagaaaatcgtcagaaatctacacgggagcgtatcggttcaaagccaagtcggtgtgggcaccagtgtacaaattatagtgcccgttacacaaggagcggacgagacacagccagattcaaatttcacagatcacaagacagctttggctggtcttcgggtatctctcttcggtcttagtaatacggtctggaggagtatcagagacgagccattagtatcggagctcaatctgatgcacaaggtctgctctgagtggcttcagctgcaagtggtggattatggcaatgatgagattcgtccagacttgattctctgcggcgagccatctatggatgaattgctgagagatactggcaagggatcactgtcagcaccaattatcgtcatttgcaaggatgccgtcgttgctcatgaacatagcaaggccacaagagaaaagctagaagaccgagttctcgagtttattgcccaacctattggaccaaggaaacttgcgaaatcgttggatgccgctctgaggcgctggactgaagctgcacaggcggaattgaacaatgcatttccggacatcacaacaccacgtttgcagccatcaacattcacctcgtcagtgggtgccgttctcgaagattcaagtaccgcagaaagtcccgacgtgaagaatgaggtctcaattagtgagcttgtaatcggccccgaaagtcccggtgatttacaagagagggccacatcacctaaagacgatcagcgatcagaaaattcactccttccggaacttgacgagcctgagaatttgattgggaaagcgagcgagacgtcgagaggggagacgcgagttacatcgccagcagacgcaacacgcaaccgagcgatactattagtcgatgataatccgatcaatctacgaatactcgtttcctacatgaagaagctcaaaaggtcatataagacggctactaatggtctcgaggctctcgaagctttcactacggacccaccgagctttagctgtattctgatggatctctcgatgcccgtcatgggtggcctagaatccacaagaaaaatcagagaacttgaacgcactcttgggctggcatcgacaacgactatcattgccctcaccggacttgcgtccttgaagccgcaacaagaagcgtacgcaagtggcatggacttatatttcacaaaaccagtagggctacaagcattggctaaagtattgcaagagagaggtatataa

SEQ ID NO: 38895 - protein, 1313 aa, Muscodor strobelii
  misc_feature: SGI Peptide ID NO. 573524
  misc_feature (42)..(210): Pfam Id: PF01590 Pfam Desc: GAF domain
  misc_feature (813)..(929): Pfam Id: PF02518 Pfam Desc: Histidine kinase-, DNA gyrase B-, and HSP90-like ATPase
  misc_feature (629)..(694): Pfam Id: PF00512 Pfam Desc: His Kinase A (phosphoacceptor) domain
  misc_feature (1189)..(1309): Pfam Id: PF00072 Pfam Desc: Response regulator receiver domain
  misc_feature (3)..(1313): NCBI GI: 39726373 Blast Desc: histidine kinase M232p [Gibberella moniliformis]
  misc_feature (4)..(1313): NCBI GI: 46121621 Blast Desc: FG05189.1 [Gibberella zeae PH-1]
  misc_feature (4)..(1313): NCBI GI: 256724705 Blast Desc: NECHADRAFT_48041 [Nectria haematococca mpVI 77-13-4]
  misc_feature (3)..(1311): NCBI GI: 46126231 Blast Desc: FG07493.1 [Gibberella zeae PH-1]
  misc_feature (44)..(1313): NCBI GI: 39726385 Blast Desc: histidine kinase M1JGp [Gibberella moniliformis]
  misc_feature (4)..(1313): NCBI GI: 256726051 Blast Desc: NECHADRAFT_43774 [Nectria haematococca mpVI 77-13-4]
  misc_feature (64)..(1313): NCBI GI: 261360943 Blast Desc: histidine kinase [Verticillium albo-atrum VaMs.102]
  misc_feature (64)..(1313): NCBI GI: 46111135 Blast Desc: FG02449.1 [Gibberella zeae PH-1]
  misc_feature (44)..(1309): NCBI GI: 115386482 Blast Desc: [Aspergillus terreus NIH2624] gi|114190780|gb|EAU32480.1| [Aspergillus terreus NIH2624]
  misc_feature (44)..(1309): NCBI GI: 67527672 Blast Desc: AN4113.2 [Aspergillus nidulans FGSC A4] gi|40740184|gb|EAA59374.1| AN4113.2 [Aspergillus nidulans FGSC A4] gi|259481296|tpe|CBF74681.1| TPA: conserved [Aspergillus FGSC
MREISETARAREALRFEASAIAVTQLYEESQIRSSPHNANFKADPVLTSLAQLAAVRFDGDGAIVSLFDVHNQYFLAHATRTSPIIHVEHDDEQGRCYLLGKAIPRPNSFGEDVLLESGIDESTLSDQDGCGRRLPVSVVPDIASSPRSSRLIGIPGHPNARFYAAVPIRSPRDINIGVLTVYGLEARTEIEPRLISFLRDLSATVAGHFNSTKSRLDLRRSERMVRGLGSFVEGTAGMSFGPNTSNFDSFRNEGLEGTLNSGQQDIQQANREREQQTPFFANEDSTYHEDPQTPPPHLISPSPAIELPVRSKSYLPTETREPREYEPMSSAHSSPATKKIDNSGSTNGDEDGHISSVKHLFSRAANIIRESIEVEGVVFVDASLSSFGGLIGMNNSSDASVSIYSSSEESIVDNQSDNLDNTCDILGYSTTTSSSLDESTSIPEQTLIPEKFLKTLLRRYPEGKIYHFGDDGSLSTTGDSSESEPVAASSRPPAIKNSSEASVSSADKSRGRRRSNKKWSRQSEGVSLLKIIPNARSVMILPLWDYNKERWCESCVSDSQALGVMERQITNVGLSLIRRCRRNCLDVYTGAIVHERSRSKLSSSVWNELRNSLLSELARLEVHIVDKAKSDILGSLSHELRSPLHGVVAAAELLHDTSLDAFQCDVLHSLESCGRVLLDVLNHLLDYTKINSVMKDHKPKKKTRKSKIPASSSQSRAFNQLRLSTYTHIDSLFEESIDSVFAGHIYQKISIAQLDHKSDRNADAMALQRIDTLDAVESFGHRAGPYGQLNIHLGDVSVFIDIDPSVPWKFRAQPGALRRIILNILGNSLRFTDRGLIVVTLRQEKNLSTKSSLDTNIKLTVTDTGRGIGSYFMQHRLFTPFSQEDQLSAGTGLGLTLVKKIVRNLHGSVSVQSQVGVGTSVQIIVPVTQGADETQPDSNFTDHKTALAGLRVSLFGLSNTVWRSIRDEPLVSELNLMHKVCSEWLQLQVVDYGNDEIRPDLILCGEPSMDELLRDTGKGSLSAPIIVICKDAVVAHEHSKATREKLEDRVLEFIAQPIGPRKLAKSLDAALRRWTEAAQAELNNAFPDITTPRLQPSTFTSSVGAVLEDSSTAESPDVKNEVSISELVIGPESPGDLQERATSPKDDQRSENSLLPELDEPENLIGKASETSRGETRVTSPADATRNRAILLVDDNPINLRILVSYMKKLKRSYKTATNGLEALEAFTTDPPSFSCILMDLSMPVMGGLESTRKIRELERTLGLASTTTIIALTGLASLKPQQEAYASGMDLYFTKPVGLQALAKVLQERGI

SEQ ID NO: 38896 - DNA, 4887 bp, Muscodor strobelii
  misc_feature: SGI EST ID NO. CUFF.93677.5
  misc_feature: Variant of the nucleotide sequence at SEQ ID NO 38894
caagcattgggtgtcatggaaagacaaattactaatgtaggattatccttgattcgtagatgcaggaggaattgtctggacgtgtacaccggcgcgatcgttcacgaaagaagcagatctaagctatcttcgagcgtttggaatgagtcttctatccgaattggcacgtcttgaagttcacatagttgataaagctaaatcggatattcttggatcattaagccatgagctaagatcaccattgcatggcgttgtcgcggccgcagagcttctccatgacacctctctcgatgcctttcaatgcgacgtcctccactcccttgaatcatgtggcagagtcctgctggatgtgttaaaccatttgcttgattataccaagatcaatagtgtcatgaaggatcataagcctaaaaaaaagacccgcaagagtaagatcccggcttcatctagtcagtcacgagctttcaatcagttacgactctcaacatacacacatatcgattcactgttcgaggaaagcatcgacagtgtcttcgccggtcatatataccaaaaaatctcgatcgcacaacttgatcacaaatccgaccgcaatgccgatgccatggccttacagcgaatcgatacgctagatgctgttgaaagctttggtcatcgagcagggccttatggccaactcaacattcatttgggagatgtctctgtgtttattgatatcgacccaagtgtgccttggaagtttcgcgctcagcctggtgcactgcgtcgaataatacttaatattctgggaaattctcttagatttacggatagaggcctgattgtcgtcacccttagacaagaaaaaaatctttcaacaaagtcatcgcttgacacaaacattaaactcactgtcacggacaccggccgcggtattggttcgtatttcatgcaacatcgcctcttcacacctttttcgcaagaagaccagctttcagctggcacgggccttggtctcacattagtaaagaaaatcgtcagaaatctacacgggagcgtatcggttcaaagccaagtcggtgtgggcaccagtgtacaaattatagtgcccgttacacaaggagcggacgagacacagccagattcaaatttcacagatcacaagacagctttggctggtcttcgggtatctctcttcggtcttagtaatacggtctggaggagtatcagagacgagccattagtatcggagctcaatctgatgcacaaggtctgctctgagtggcttcagctgcaagtggtggattatggcaatgatgagattcgtccagacttgattctctgcggcgagccatctatggatgaattgctgagagatactggcaagggatcactgtcagcaccaattatcgtcatttgcaaggatgccgtcgttgctcatgaacatagcaaggccacaagagaaaagctagaagaccgagttctcgagtttattgcccaacctattggaccaaggaaacttgcgaaatcgttggatgccgctctgaggcgctggactgaagctgcacaggcggaattgaacaatgcatttccggacatcacaacaccacgtttgcagccatcaacattcacctcgtcagtgggtgccgttctcgaagattcaagtaccgcagaaagtcccgacgtgaagaatgaggtctcaattagtgagcttgtaatcggccccgaaagtcccggtgatttacaagagagggccacatcacctaaagacgatcagcgatcagaaaattcactccttccggaacttgacgagcctgagaatttgattgggaaagcgagcgagacgtcgagaggggagacgcgagttacatcgccagcagacgcaacacgcaaccgagcgatactattagtcgatgataatccgatcaatctacgaatactcgtttcctacatgaagaagctcaaaaggtcatataagacggctactaatggtctcgaggctctcgaagctttcactacggacccaccgagctttagctgtattctgatggatctctcgatgcccgtcatgggtggcctagaatccacaagaaaaatcagagaacttgaacgcactcttgggctggcatcgacaacgactatcattgccctcaccggacttgcgtccttgaagccgcaacaagaagcgtacgcaagtggcatggacttatatttcacaaaaccagtagggctacaagcattggctaaagtattgcaagagagaggtatataatcgcgctgctttcattattccctagaaattggacgacattggatatccgtgtgtaacgggtagagagtctccatgttgggagactctcaataaaaatttgatatacacatagttcacttttgtgtcatcatcatgaggtcatgcaccagtatctgaaaattggcgcttgtttgagcgtaagaaataaacacgacagcgactatctccattatattgaggtgggccttcgtctttttttccaacgcatctgctcaagctaggtattggacaatccagctggtgttacaaagcgaatctcctatctgacacgcgcacatatcccgaagccggactggcattacctaaagcgcctatttacctgctcacacatctgtcatggcattggggcagagggatagctttacttataacccaagatgccggctttgaagaagtatttgtatacacaatctgcgctcagcagctcaaaagtccaagatgatacacagcgcgctgatcgtcccggaaacaacgtgtgttcttatccttctcccagggttcttgcgtgacgacctacgtgtgagactgcaggtagtagtgttcaacgagacaccaaggccagattacgaggctctgtcgtatgtttggggaccaacaaacgatctttcattacaggttttcgttgatgaattggagaaggatgcaggcacaatggttcgagtacagcagtggttgactgtttgggaaaaaagttcttgtgtgcgttgaaacacttgcgttgcattgataagccgcggtatatgtggattgatgcattgtgcattgatcggaacaatgtcgacgagaaaagtccacaagtggctatgatgggtgtgctttcatgagggccacatcatctgtcgattgtttgggaccgtccactccagacagtgacaccgcaatggcattatccgataatataggttctcagattgaaatggaccagcagggaaatttggtgcctcgatcaggttcacgagacaaagcgcttgtagacaagaatcggtgattttcatagagtcttcacgagatccaagctattattctcttctcatacgaccatggttctgtcgtctctggattcgacaggagattgctcttgctggcccgcaggcggccgttgtcatgcgcggtaatgctactacttagatacgatcccgaacggcttagcatgcactctggctcaagaagcggcctatcaacgagtcgaagggcatctttcacgagcgcgttataagcatgttcctgatttttctcagccgtatttatcacgctgtgcagtatacggcatgtctttggagatgcccgctgcgttaatcccatgatagactgtatgcggttcggccattgctcaacgagcaagaacgacgggcggcttgcgttccggactataatgtgtctcaggtatcggcgtatcgtcgtgctgctgtggccgatatacgtatgaaaagaggaggtttcgaaatcctcgatgcgtgccgttactcagagtcatgggagggtctgagctgggtcctagattggagctgtcaggaccacctgccaacgaggcgatgtgagctccgccgacggcttctggaatgatattgtctgatgtaacgattcagaatgagagtgagagtctactcgtcaacgccattcttgttgcgactgtgagggcagttagtgaactcggtacagacgacaatacaaactacagtcaagcggcgaggcttctgattaggcttccactcggtgccaacgacgataaatcctactctagtacctcacaatatggatcttatctccgaacattgtgcctcgatcttctccctggccacactcgctttcctgctttcaggccagggctactgtaggtatgtgaaatcatgacgcagctttctgttgatgatagcacgataaatcttgcttgcgacaacgttgggccgcttgtacattattttctcgaaaaatccgcttaggggttgcgacaacggatgcctgttgttacagggtggcgatattgtcctgggtcttgcttcattacacgccaaacctggaaataaaaatctatgtgctatttagctgtacacaagccctttctcagatgcgttgctcattgtgactgtaatattggcgtcaagaacaatatttaccgcgtcatagagccgtcctttgcacatggttgctgcgagggcgaggcggttcttggaccgtcctcgaacggtgtttgccccgggctcgcgatctggaatgcttcgcgatattaaaacggggtggagagcactgttgattcgcgcttgcttgcaatttggcctgagaaaaagctagagctggagcagcgaagtaatccggagaggctgacgattaaccccaacgagctgtgtcaaaaattggagctacgggaagtatcaaacgcaaagattgagttggtctaacacaaaaatggtgcatggacgagacatcaggattaaacttcagaagtgagtgacttatataaccgtcaattagcatttagcacttaaaattatcgaccgaagaactatgtgttagtgtggagacggcgtctcaacatcctctttgctgtatacttcgcagcatatacaatgctacctcatttgtcatctggttgactgcat

SEQ ID NO: 38897 - DNA, 1857 bp, Muscodor strobelii
  misc_feature: SGI cDNA ID NO. 573525
  misc_feature: Reduced expression when VOC is produced
  misc_feature: Encodes the peptide sequence at SEQ ID NO 38898
atgaaagataaaaacgacgaacagactcataagcatttgaaccccaaagtcgaagctcaagccactgcgagcatctctaacgttccgctcactctcgatttccctctacaactcttctcgcaaggaaatatcatctgcttatcgtcctcgaacaatcaggacatcgtgtctttgcatgatccattaatgtcccaccaacttcctacaacactggaaatccctcaattgcaagctttcgatgtctctgaggctttgcacaaagtgactgcccgccatgggcaggcaactggactggatgttgtactgggcgcccaggctttcgtcgtcaccgatagctggcagccagatatgcctgtaatacatgtctctgatggcttcctgtcattaactggatatactaggaacgagatcctaggcaagaactgcagaatgttacaagctccaggcgggaatgtccaggcaggggctccaaggacatcgattagtagcggctctgcatttgagttgaaacaaaaattagctggacttcaagagtttcagcacaacattgttaatttcaaaaaggacggaagcggatttatcaactctttgacgatcgttccggttccatcagacatgcccaaccctcgatatcttttcggattcttgagtgaagtagggcaagactgtgacttccacaccattgagcggctgtctatgcaatcgctagcgaacttgccgatcacgccgcaagctgctgaatcccaagcatctgctgctactattctagccaatgcgatggaatacgatgcgacagtcgacgatttcgatatgtcattgatcgaaaacattgatggacttgtgcttgtaatgttcccgcatgggactatccatcatatttcctcttggtgccaccatctaggatatagtagcactgatctctacaaggcttcaattgatacaatctgccatccacttgacgtctcgaacttgctacgacagcttaagcagagctcttcgggttcaattgttgaagccctcatccgtatcaagcaccgcttcgatggttatacatggttccagttccgtggatcggcatggagatacggagcacgaaaattgattactctcgtcggattcccacagcctgatttgcacattgatcgtcaaatcttgttgcaaggaggaggactgagctcgaaagatatctggctaaagctgtccatgtccggacttattcttgcgggatttggaacgtccaaaacgccgctggggttgtccgttgataaattgacggggaccacatttttcacgttaattagcgattctcagtctcggcagaaatctcgagagatgttaagagagctcaaggcgaacgagacgtttgcgactgtgacgtgtttaaacggccctccaagcaatcgattccaagccaaagttatattctacgcgggcaatatccatgtccacctcaaaccgcattttgcgttggtacaaatcaagttcatcaagagcctgccgcatagctacaagaatccgggtgacccgaccgagttcgaagcaatcgtagcgaatctgaacacagctgataacctatttggagatcttgaccccaacatatgtggggtgtggcagtctgatttacgaaacctccgcgtcgagaacaacagactcgaatcggaattagacgttcttctccaacgacaaagccaacgcagacgctgtaagaaagaagggctcctaacaccagactgcgcaaactgccacacgaaagtgacgcccgagtggcgaaagggcccgggtggaaaacgcaatctgtgtaatgcatgtgggctgcggtgggccaagcaggctcggcaggtcaggaaggatgagtaa

SEQ ID NO: 38898 - protein, 618 aa, Muscodor strobelii
  misc_feature: SGI Peptide ID NO. 573525
  misc_feature (578)..(613): Pfam Id: PF00320 Pfam Desc: GATA zinc finger
  misc_feature (78)..(614): NCBI GI: 46127127 Blast Desc: FG07941.1 [Gibberella zeae PH-1]
  misc_feature (78)..(614): NCBI GI: 256721605 Blast Desc: [Nectria haematococca mpVI 77-13-4]
  misc_feature (78)..(614): NCBI GI: 163866879 Blast Desc: white collar 1 [Fusarium oxysporum f. sp. lycopersici]
  misc_feature (78)..(614): NCBI GI: 157310199 Blast Desc: white collar 1-like protein [Gibberella fujikuroi]
  misc_feature (78)..(614): NCBI GI: 56130904 Blast Desc: white collar 1 [Hypocrea jecorina]
  misc_feature (78)..(614): NCBI GI: 51944886 Blast Desc: blue light regulator 1 [Trichoderma atroviride]
  misc_feature (78)..(614): NCBI GI: 261358907 Blast Desc: conserved [Verticillium albo-atrum VaMs.102]
  misc_feature (70)..(614): NCBI GI: 14917059 Blast Desc: WC1_NEUCR RecName: Full=White collar 1 protein; Short=WC1 gi|5441498|emb|CAA63964.2| wc-1 [Neurospora crassa]
  misc_feature (70)..(609): NCBI GI: 164427047 Blast Desc: NCU02356 [Neurospora crassa OR74A] gi|157071583|gb|EAA30541.2| NCU02356 [Neurospora crassa OR74A]
  misc_feature (85)..(612): NCBI GI: 121704672 Blast Desc: GATA transcription factor LreA [Aspergillus clavatus NRRL 1] gi|119398745|gb|EAW09173.1| GATA transcription factor LreA [Aspergillus clavatus NRRL 1]
  misc_feature: Useful for introducing or modulating the production of volatile compounds
MKDKNDEQTHKHLNPKVEAQATASISNVPLTLDFPLQLFSQGNIICLSSSNNQDIVSLHDPLMSHQLPTTLEIPQLQAFDVSEALHKVTARHGQATGLDVVLGAQAFVVTDSWQPDMPVIHVSDGFLSLTGYTRNEILGKNCRMLQAPGGNVQAGAPRTSISSGSAFELKQKLAGLQEFQHNIVNFKKDGSGFINSLTIVPVPSDMPNPRYLFGFLSEVGQDCDFHTIERLSMQSLANLPITPQAAESQASAATILANAMEYDATVDDFDMSLIENIDGLVLVMFPHGTIHHISSWCHHLGYSSTDLYKASIDTICHPLDVSNLLRQLKQSSSGSIVEALIRIKHRFDGYTWFQFRGSAWRYGARKLITLVGFPQPDLHIDRQILLQGGGLSSKDIWLKLSMSGLILAGFGTSKTPLGLSVDKLTGTTFFTLISDSQSRQKSREMLRELKANETFATVTCLNGPPSNRFQAKVIFYAGNIHVHLKPHFALVQIKFIKSLPHSYKNPGDPTEFEAIVANLNTADNLFGDLDPNICGVWQSDLRNLRVENNRLESELDVLLQRQSQRRRCKKEGLLTPDCANCHTKVTPEWRKGPGGKRNLCNACGLRWAKQARQVRKDE

SEQ ID NO: 38899 - DNA, 3303 bp, Muscodor strobelii
  misc_feature: SGI EST ID NO. CUFF.93667.0
  misc_feature: Variant of the nucleotide sequence at SEQ ID NO 38897
cggtagacacagtgtcgagtatctgcagccgttaggatctacaccagctatagatcttgcatgaatcgttatatttctatctggatggaagtatataaactctattggagaatttacagcgacgtatacttgatatgttcccatctgaatggctaacataagcagctaggttgatggcgtgttgacgttgcgcacgcctatttttacctaaggaccctcttaacgccgcattttaacaattagtaggctctatcgaatcttcctccaactccgctacttacatcaattgtgacaagaggcccttatctacattctattaggttacgatgctgctcccaactgcatacgactgttaagtcacggcccatctccgaaatataccgatcccttcaatgtattagcattaggatcatccatttcaaaacgaatacctccttgagagctcgactttagctacactttgttgttttttaaggatgaatgcggcgaattttaccagtaactcaccttcagtaatctgcataagcgtagatttgctttccaccgattcgaaaatacgatgaaagataaaaacgacgaacagactcataagcatttgaaccccaaagtcgaagctcaagccactgcgagcatctctaacgttccgctcactctcgatttccctctacaactcttctcgcaaggaaatatcatctgcttatcgtcctcgaacaatcaggacatcgtgtctttgcatgatccattaatgtcccaccaacttcctacaacactggaaatccctcaattgcaagctttcgatgtctctgaggctttgcacaaagtgactgcccgccatgggcaggcaactggactggatgttgtactgggcgcccaggctttcgtcgtcaccgatagctggcagccagatatgcctgtaatacatgtctctgatggcttcctgtcattaactggatatactaggaacgagatcctaggcaagaactgcagaatgttacaagctccaggcgggaatgtccaggcaggggctccaaggacatcgattagtagcggctctgcatttgagttgaaacaaaaattagctggacttcaagagtttcagcacaacattgttaatttcaaaaaggacggaagcggatttatcaactctttgacgatcgttccggttccatcagacatgcccaaccctcgatatcttttcggattcttgagtgaagtagggcaagactgtgacttccacaccattgagcggctgtctatgcaatcgctagcgaacttgccgatcacgccgcaagctgctgaatcccaagcatctgctgctactattctagccaatgcgatggaatacgatgcgacagtcgacgatttcgatatgtcattgatcgaaaacattgatggacttgtgcttgtaatgttcccgcatgggactatccatcatatttcctcttggtgccaccatctaggatatagtagcactgatctctacaaggcttcaattgatacaatctgccatccacttgacgtctcgaacttgctacgacagcttaagcagagctcttcgggttcaattgttgaagccctcatccgtatcaagcaccgcttcgatggttatacatggttccagttccgtggatcggcatggagatacggagcacgaaaattgattactctcgtcggattcccacagcctgatttgcacattgatcgtcaaatcttgttgcaaggaggaggactgagctcgaaagatatctggctaaagctgtccatgtccggacttattcttgcgggatttggaacgtccaaaacgccgctggggttgtccgttgataaattgacggggaccacatttttcacgttaattagcgattctcagtctcggcagaaatctcgagagatgttaagagagctcaaggcgaacgagacgtttgcgactgtgacgtgtttaaacggccctccaagcaatcgattccaagccaaagttatattctacgcgggcaatatccatgtccacctcaaaccgcattttgcgttggtacaaatcaagttcatcaagagcctgccgcatagctacaagaatccgggtgacccgaccgagttcgaagcaatcgtagcgaatctgaacacagctgataacctatttggagatcttgaccccaacatatgtggggtgtggcagtctgatttacgaaacctccgcgtcgagaacaacagactcgaatcggaattagacgttcttctccaacgacaaagccaacgcagacgctgtaagaaagaagggctcctaacaccagactgcgcaaactgccacacgaaagtgacgcccgagtggcgaaagggcccgggtggaaaacgcaatctgtgtaatgcatgtgggctgcggtgggccaagcaggctcggcaggtcaggaaggatgagtaaatgaagcaaacgacgaagtaacatgattcaaaaccggcatggaagaatgtacaccgacgagaagaatcggatgacaccgaagatatgctgtaatgctccactagatgacaattggcgctaatgttaattgtataatgccgaattcatgcacaatttggcgaaccgcatttcactgtttttgcggaatgacgtactatcatggcgctcggtgaggggggtgaggcgaataaggagaattcacgaagcttcgaaccccgacgccctgacgaccctgatctcatctgtaattccttcatatggtcaagatatgacgaaattgaaggcagtcggtgttgtttcatgcagttcagaccagtagtgtccttgcagatgttgcgctcgggttgcatttgaaagtgccaaaccctgtcgacgtgtttggtgggtcaggggtgctcgatgggatcgtcactatgaccgcattgttatccacaatctgagaattcccagcaattttcatggcaattgcatcgattggtaaatcccattcggcaaatatcgctccatatcccatccatttcatcatattcccatacggtattcccatggcgtcataaaatgccatggtgattgcaggacataactgatgacgactgacttggagacgaatttgacgaccatttcacagcgatgttcacgtccaccctaatcgaggtatagtcaccagcagtcggcaagtggagactccgcacgtagaccacatcagtctagaacagcccttaatgccacatggttcttgtatttggatgatgccccaagcttgaactacggacagaagtgtgggtaaaaataaacgggaaagattcaattcctcaccaaaacgccctccaacttcagttacgtgttcc

SEQ ID NO: 38900 - DNA, 504 bp, Muscodor strobelii
  misc_feature: SGI cDNA ID NO. 573526
  misc_feature: Encodes the peptide sequence at SEQ ID NO 38901
atgcctcagcccgagtctggagaatcaggtgcagatgattctcggccaataagcaccagaatccttttcatccctggcctagtcgctctgcacgccgtcagcgaaaagctcaagatcttgcttcgccgcagactgaacggaccttccgagcatgtcgctgaagttctcgagctgctgcaaacgtgcattaatgatgtgataacggagacagagaggcgcgcaagaaaagctgcaggaagcggcaatcgcgaagtcaacaatacagaaatagatcatcagaggactgaccctctactgcaagatctgagggagctacttatggacgccaagcttgcagcagacaacctttcccaggctctcggcggctggagaacacaactcgatgaagcagtctatctggcgaaagatatcgggcaagaacagaagaaactggacgatagggactttaaagagttggaccggtttgggcagtacactgatgctaccgttgaaggccttaagtaa

SEQ ID NO: 38901 - protein, 167 aa, Muscodor strobelii
  misc_feature: SGI Peptide ID NO. 573526
MPQPESGESGADDSRPISTRILFIPGLVALHAVSEKLKILLRRRLNGPSEHVAEVLELLQTCINDVITETERRARKAAGSGNREVNNTEIDHQRTDPLLQDLRELLMDAKLAADNLSQALGGWRTQLDEAVYLAKDIGQEQKKLDDRDFKELDRFGQYTDATVEGLK

SEQ ID NO: 38902 - DNA, 1197 bp, Muscodor strobelii
  misc_feature: SGI cDNA ID NO. 573527
  misc_feature: Reduced expression when VOC is produced
  misc_feature: Encodes the peptide sequence at SEQ ID NO 38903
atgccgtttttgtactacgctgtccgcaaaggccgagtgcctggtgtgtattcaaattgggcaagttgcaaggagcagaccaatggttgcccaaatgaatacaaagggtttgatagtcaccaagaggctgtcacttggttcagcaaaggcaaccaacaggcgacaactggacgtaacgatcacaaacaaagcaaccagatacaacgacccgatccaacttgtctatccagtcgacaacaatggggcatgtctgttgcggatcctgtgaaggtcaaggttgaggcgccagatgcatctcaatctttcttctcccaggtatcggaattcaaggccaatccacagttgtcatttgatgacgagttccatcgattcgcgtcgtcgcagaacttgagaattggctcgaaggaatggcgagagcagcgcactggtgcgataagtcatgaattgaaatatcactactcgcgccgagacaacgaagatgacgagggcaaagatatggacgagctccagaattcggagcagaagagactcgttatttatcaaaatatgtgtcttgagacggggttgaaaccgcttaataccatcgacgggtgtgtgacaatgctgaggagtatacttgtcaatatcgttgactatatcgactacaaacgcggtctcaagcctatcaagatctgggcaccggaggactttgatgctttcaggtcttacagcctagattcgcgccatcgtatcgatttggaaacagctaagagcgacgaattccttgctgcattgctacagcgcctccaaggccctggttgcaaagaggcgttcacgagtcgaagggtagcagcagagaacaggagagaagctttcgcaataaaggatctgtcaagggacaaagtggacttggaaaactcggcgaaggaaatgggagactccagcgagaaaactagtcaagccgaggtcatcatcattcacgattcggactctgaatgctcctcaccaccgggcgcagaagaagaggacatcagtactatcccaagcagtccagatagcagcgctagccttgaggtcaaagaagaaccaagcacgtctcagaacagattgaaacgaagcttgagcgaggctctcgaggatgaggaagagcttccacgggaaccaagtggcatagcagaattgacacacaagaggcgcaaagccagccctgctcaataa

SEQ ID NO: 38903 - protein, 398 aa, Muscodor strobelii
  misc_feature: SGI Peptide ID NO. 573527
  misc_feature (96)..(262): NCBI GI: 256721713 Blast Desc: NECHADRAFT_55411 [Nectria haematococca mpVI 77-13-4]
  misc_feature (96)..(251): NCBI GI: 116202359 Blast Desc: [Chaetomium globosum CBS 148.51] gi|88177582|gb|EAQ85050.1| [Chaetomium globosum CBS 148.51]
  misc_feature (5)..(265): NCBI GI: 169601640 Blast Desc: SNOG_03690 [Phaeosphaeria nodorum SN15] gi|111067775|gb|EAT88895.1| SNOG_03690 [Phaeosphaeria nodorum SN15]
  misc_feature (102)..(262): NCBI GI: 238837481 Blast Desc: conserved [Microsporum canis CBS 113480]
  misc_feature (99)..(214): NCBI GI: 119481875 Blast Desc: NFIA_090270 [Neosartorya fischeri NRRL 181] gi|119409120|gb|EAW19069.1| conserved [Neosartorya fischeri NRRL 181]
  misc_feature (100)..(262): NCBI GI: 242777409 Blast Desc: conserved [Talaromyces stipitatus ATCC 10500] gi|218722647|gb|EED22065.1| conserved [Talaromyces stipitatus ATCC 10500]
  misc_feature (100)..(262): NCBI GI: 119181193 Blast Desc: CIMG_05734 [Coccidioides immitis RS]
  misc_feature (1)..(49): NCBI GI: 240146765 Blast Desc: RNAse H family protein [Roseburia intestinalis L1-82] gi|257201049|gb|EEU99333.1| RNAse H family protein [Roseburia intestinalis L1-82]
  misc_feature (148)..(265): NCBI GI: 189193463 Blast Desc: conserved [Pyrenophora tritici-repentis Pt-1C-BFP] gi|187978634|gb|EDU45260.1| conserved [Pyrenophora tritici-repentis Pt-1C-BFP]
  misc_feature (98)..(237): NCBI GI: 121716058 Blast Desc: conserved [Aspergillus clavatus NRRL 1] gi|119403795|gb|EAW14212.1| conserved [Aspergillus clavatus NRRL 1]
  misc_feature: Useful for introducing or modulating the production of volatile compounds
MPFLYYAVRKGRVPGVYSNWASCKEQTNGCPNEYKGFDSHQEAVTWFSKGNQQATTGRNDHKQSNQIQRPDPTCLSSRQQWGMSVADPVKVKVEAPDASQSFFSQVSEFKANPQLSFDDEFHRFASSQNLRIGSKEWREQRTGAISHELKYHYSRRDNEDDEGKDMDELQNSEQKRLVIYQNMCLETGLKPLNTIDGCVTMLRSILVNIVDYIDYKRGLKPIKIWAPEDFDAFRSYSLDSRHRIDLETAKSDEFLAALLQRLQGPGCKEAFTSRRVAAENRREAFAIKDLSRDKVDLENSAKEMGDSSEKTSQAEVIIIHDSDSECSSPPGAEEEDISTIPSSPDSSASLEVKEEPSTSQNRLKRSLSEALEDEEELPREPSGIAELTHKRRKASPAQ

SEQ ID NO: 38904 - DNA, 1475 bp, Muscodor strobelii
  misc_feature: SGI EST ID NO. CUFF.93548.1
  misc_feature: Variant of the nucleotide sequence at SEQ ID NO 38902
gggaaattggggagaacaggggagacggccagtagggtggtatattgctttttcgccgcgaatcccggttcaccggacgcgatccgagcttccttgtgcgcgtcgtgctggtgcaaatttgaatctcatgtatgccgaaatatttccaatgctggatatctcttgaaccttcaagatcgttctcaccgctcataccagatatcgatcgaagatgccgtttttgtactacgctgtccgcaaaggccgagtgcctggtgtgtattcaaattgggcaagttgcaaggagcagaccaatggttgcccaaatgaatacaaagggtttgatagtcaccaagaggctgtcacttggttcagcaaaggcaaccaacaggcgacaactggacgtaacgatcacaaacaaagcaaccagatacaacgacccgatccaacttgtctatccagtcgacaacaatggggcatgtctgttgcggatcctgtgaaggtcaaggttgaggcgccagatgcatctcaatctttcttctcccaggtatcggaattcaaggccaatccacagttgtcatttgatgacgagttccatcgattcgcgtcgtcgcagaacttgagaattggctcgaaggaatggcgagagcagcgcactggtgcgataagtcatgaattgaaatatcactactcgcgccgagacaacgaagatgacgagggcaaagatatggacgagctccagaattcggagcagaagagactcgttatttatcaaaatatgtgtcttgagacggggttgaaaccgcttaataccatcgacgggtgtgtgacaatgctgaggagtatacttgtcaatatcgttgactatatcgactacaaacgcggtctcaagcctatcaagatctgggcaccggaggactttgatgctttcaggtcttacagcctagattcgcgccatcgtatcgatttggaaacagctaagagcgacgaattccttgctgcattgctacagcgcctccaaggccctggttgcaaagaggcgttcacgagtcgaagggtagcagcagagaacaggagagaagctttcgcaataaaggatctgtcaagggacaaagtggacttggaaaactcggcgaaggaaatgggagactccagcgagaaaactagtcaagccgaggtcatcatcattcacgattcggactctgaatgctcctcaccaccgggcgcagaagaagaggacatcagtactatcccaagcagtccagatagcagcgctagccttgaggtcaaagaagaaccaagcacgtctcagaacagattgaaacgaagcttgagcgaggctctcgaggatgaggaagagcttccacgggaaccaagtggcatagcagaattgacacacaagaggcgcaaagccagccctgctcaataaatgctacttagtgcctgtgtatcaaccattagttttcagctgtgacgttacagattgataggcaagc

SEQ ID NO: 38905 - DNA, 585 bp, Muscodor strobelii
  misc_feature: SGI cDNA ID NO. 573528
  misc_feature: Encodes the peptide sequence at SEQ ID NO 38906
atgaaggtcttcaatatttttcaagtactgcttttcgcagcaaatcatgcatcagctcaaacgcctttgggcttcactccagctgttacggagaagctagaggtcacgttcggaactaagagtatcgcgacaccaggtcaagcgatgaccaaagccgaggtacaacgacagccaactataggattgtccggcggtgcgaatggatcatacatttggatgatgattgatctcgatgcctcaaccaacttccagaacccgggagccggtaaaccagcgacttacctacacaccgtgctccgagattttaaggcgagcggagccacatcggcatccaacatcaccacgctcacgacaaccgcaacaggcccggttgcatggttcgcgccggctcctccggctgagaatccaccccacccacaccgttacacccatcttctatgggtgcagccagcgaactggcagattcccgcggccgccaatactatgctacagaaccagcgaagcggattcgacgtgccgaagttcattacagctgctggtctcagtaaccctattgcagcaaattacttcaactgcacggggtaa

SEQ ID NO: 38906 - protein, 194 aa, Muscodor strobelii
  misc_feature: SGI Peptide ID NO. 573528
  misc_feature (17)..(194): NCBI GI: 189209766 Blast Desc: conserved [Pyrenophora tritici-repentis Pt-1C-BFP] gi|187977308|gb|EDU43934.1| conserved [Pyrenophora tritici-repentis Pt-1C-BFP]
  misc_feature (14)..(194): NCBI GI: 169615585 Blast Desc: SNOG_10951 [Phaeosphaeria nodorum SN15] gi|111060330|gb|EAT81450.1| SNOG_10951 [Phaeosphaeria nodorum SN15]
  misc_feature (1)..(192): NCBI GI: 169601368 Blast Desc: SNOG_03548 [Phaeosphaeria nodorum SN15] gi|111067633|gb|EAT88753.1| SNOG_03548 [Phaeosphaeria nodorum SN15]
  misc_feature (1)..(190): NCBI GI: 242809416 Blast Desc: conserved [Talaromyces stipitatus ATCC 10500] gi|218715989|gb|EED15411.1| conserved [Talaromyces stipitatus ATCC 10500]
  misc_feature (4)..(190): NCBI GI: 242796577 Blast Desc: conserved [Talaromyces stipitatus ATCC 10500] gi|218719416|gb|EED18836.1| conserved [Talaromyces stipitatus ATCC 10500]
  misc_feature (17)..(194): NCBI GI: 169624905 Blast Desc: SNOG_15718 [Phaeosphaeria nodorum SN15] gi|160705558|gb|EAT76813.2| SNOG_15718 [Phaeosphaeria nodorum SN15]
  misc_feature (30)..(192): NCBI GI: 119500910 Blast Desc: protease inhibitor (Tfs1), [Neosartorya fischeri NRRL 181] gi|119415377|gb|EAW25315.1| protease inhibitor (Tfs1), [Neosartorya fischeri NRRL 181]
  misc_feature (24)..(194): NCBI GI: 189194737 Blast Desc: PTRG_03374 [Pyrenophora tritici-repentis Pt-1C-BFP] gi|187979271|gb|EDU45897.1| PTRG_03374 [Pyrenophora tritici-repentis Pt-1C-BFP]
  misc_feature (30)..(192): NCBI GI: 70994470 Blast Desc: protease inhibitor (Tfs1) [Aspergillus fumigatus Af293] gi|66849648|gb|EAL89976.1| protease inhibitor (Tfs1), [Aspergillus fumigatus Af293] gi|159125073|gb|EDP50190.1| (Tfs1),
  misc_feature (10)..(190): NCBI GI: 242811943 Blast Desc: conserved [Talaromyces stipitatus ATCC 10500] gi|218714196|gb|EED13619.1| conserved [Talaromyces stipitatus ATCC 10500]
MKVFNIFQVLLFAANHASAQTPLGFTPAVTEKLEVTFGTKSIATPGQAMTKAEVQRQPTIGLSGGANGSYIWMMIDLDASTNFQNPGAGKPATYLHTVLRDFKASGATSASNITTLTTTATGPVAWFAPAPPAENPPHPHRYTHLLWVQPANWQIPAAANTMLQNQRSGFDVPKFITAAGLSNPIAANYFNCTG

SEQ ID NO: 38907 - DNA, 478 bp, Muscodor strobelii
  misc_feature: SGI EST ID NO. CUFF.93535.0
  misc_feature: Variant of the nucleotide sequence at SEQ ID NO 38905
caagccgggaaatttaagcgccttgaaataccgccgcaccggaaggggaaacgtcaatttagccaacacgaaatacacatgcgaagcatgtgccgtattggtccttttagattgtcattgtctggtaatagggagtctataattgatttagacgggacagttgggagatgatataccatactcttcctcatcttccctctagagagacgtgagttgttcatctgatatctcaacttctgcctatcaagcaacatgaaggtcttcaatatttttcaagtactgcttttcgcagcaaatcatgcatcagctcaaacgcctttgggcttcactccagctgttacggagaagctagaggtcacgttcggaactaagagtatcgcgacaccaggtcaagcgatgaccaaagccgaggtacaacgacagccaactataggattgtccggcggtgcgaatggatcatacatttggatgatgattg

SEQ ID NO: 38908 - DNA, 1470 bp, Muscodor strobelii
  misc_feature: SGI cDNA ID NO. 573529
  misc_feature: Encodes the peptide sequence at SEQ ID NO 38909
atgtatctaggcgacacagaagtttggcggacttcaaccgctgaaccaaccgccaccggtatccgctgggagtggctgaaagacatgactgccttcactgccttatggaaagagccgcagactgtcattttcgacttagaaaacatcgtcaatgatatttacacaggcattctcaatacgactctaacagcaacattcttcaaggcttcagacactgagaagattgccaatacagcctattcgcagcctgcagatgtgatcattccgatttcgcagcgccttggctcagccgggaagcccagtcaatttgtatatccagaccagaatgcgacaaatacgatcgtttcattcccgcaaaacgcgaatcgagccgtgttcactgccgatgtcaaaggccagggcaacgaagagttctggtggagcaacgtaccgcaaagcgccatctacacattcaatgagacatatggtgtatatccagggtattctccatttcgggaagttcaagtcttgatcgacggattcttagcgggtgtggattggcctttccccgtcatttacacgggtggcgttgtgccccagctcaatcgacccattgtagcaacgcaggcatttgacatcctcgagcatgagattgatatttcgccctttttgccacttctttgcgatggagagcctcatgtcttcacgatcaagattgtagggctagacgatgacgggaaatcgagagcgtggctaagtaatactactacagaggagtggtatgttactggcaaggttttcgtatggctagatgacgaaggctcggtcacgacaggcgaaataggaaatctagatgttccaggtccccaaatcaccttctcgcagtctatatctcaaaatgctacaggggcgaaccagacccttgatctctctttggcggtagagcgctatctaaatctcacctccaaggtgaagactcagcataccgagggagacgtcaaatgggaacagcgcctctcatacgataatgttggcggggtttacgactacggaaatggagaaatcaacagcttttcaattatcggagccgacactgctacagcgggagggagcgcagtgtacggcagagtatattcatacccgctctacgcgaaccagacacttacttattcggcccaagggaacctatcgctgtgggcagaagtgaatcaaggctatacctcacgtacttctggaaacaccgtcttcggtctaggaacagagggatatgtttcagatgctgttggttcgggtacgaccacatggcgcaacgggaccgctgactacggagcctatgcagataacaccgtatcgttcggtttgggcgaaacgcatcaaattttcgcatttggttcatacgatcaaggtggagcgttcacccgactttatgcccgagatgttgaagcccgcaataacagtgtcattgcagaccacattcagggtccttattag

SEQ ID NO: 38909 - protein, 489 aa, Muscodor strobelii
  misc_feature: SGI Peptide ID NO. 573529
  misc_feature (1)..(484): NCBI GI: 39974109 Blast Desc: MGG_00799 [Magnaporthe grisea 70-15] gi|145018264|gb|EDK02543.1| MGG_00799 [Magnaporthe grisea 70-15]
  misc_feature (1)..(484): NCBI GI: 261351792 Blast Desc: peptide-N4-(N-acetyl-beta-glucosaminyl)asparagine amidase A [Verticillium albo-atrum VaMs.102]
  misc_feature (1)..(484): NCBI GI: 154316707 Blast Desc: BC1G_03771 [Botryotinia fuckeliana B05.10] gi|150845383|gb|EDN20576.1| BC1G_03771 [Botryotinia fuckeliana B05.10]
  misc_feature (1)..(440): NCBI GI: 116179866 Blast Desc: CHGG_00561 [Chaetomium globosum CBS 148.51] gi|88184858|gb|EAQ92326.1| CHGG_00561 [Chaetomium globosum CBS 148.51]
  misc_feature (1)..(484): NCBI GI: 156043521 Blast Desc: SS1G_10764 [Sclerotinia sclerotiorum 1980] gi|154695151|gb|EDN94889.1| SS1G_10764 [Sclerotinia sclerotiorum 1980]
  misc_feature (1)..(483): NCBI GI: 85092018 Blast Desc: NCU04643 [Neurospora crassa OR74A] gi|21622310|emb|CAD37013.1| related to peptide-n4-(n-acetyl-beta-d-glucosaminyl) asparaginase amidase N
  misc_feature (1)..(484): NCBI GI: 169603634 Blast Desc: SNOG_04825 [Phaeosphaeria nodorum SN15] gi|111066096|gb|EAT87216.1| SNOG_04825 [Phaeosphaeria nodorum SN15]
  misc_feature (1)..(483): NCBI GI: 189196202 Blast Desc: peptide-N4-(N-acetyl-beta-glucosaminyl)asparagine amidase A [Pyrenophora tritici-repentis Pt-1C-BFP] gi|187980318|gb|EDU46944.1| amidase A [Pyrenophora Pt-1C-BFP]
  misc_feature (1)..(484): NCBI GI: 171691689 Blast Desc: protein product [Podospora anserina] gi|170945793|emb|CAP72593.1| protein product [Podospora anserina]
  misc_feature (1)..(482): NCBI GI: 145235129 Blast Desc: An03g03300 [Aspergillus niger] gi|134057893|emb|CAK38234.1| protein product [Aspergillus niger]
  misc_feature (1)..(485): SWISSPROT Homolog: EC 3.5.1.52 Peptide-N(4)-(N-acetyl-beta-glucosaminyl)asparagine amidase
MYLGDTEVWRTSTAEPTATGIRWEWLKDMTAFTALWKEPQTVIFDLENIVNDIYTGILNTTLTATFFKASDTEKIANTAYSQPADVIIPISQRLGSAGKPSQFVYPDQNATNTIVSFPQNANRAVFTADVKGQGNEEFWWSNVPQSAIYTFNETYGVYPGYSPFREVQVLIDGFLAGVDWPFPVIYTGGVVPQLNRPIVATQAFDILEHEIDISPFLPLLCDGEPHVFTIKIVGLDDDGKSRAWLSNTTTEEWYVTGKVFVWLDDEGSVTTGEIGNLDVPGPQITFSQSISQNATGANQTLDLSLAVERYLNLTSKVKTQHTEGDVKWEQRLSYDNVGGVYDYGNGEINSFSIIGADTATAGGSAVYGRVYSYPLYANQTLTYSAQGNLSLWAEVNQGYTSRTSGNTVFGLGTEGYVSDAVGSGTTTWRNGTADYGAYADNTVSFGLGETHQIFAFGSYDQGGAFTRLYARDVEARNNSVIADHIQGPY

SEQ ID NO: 38910 - DNA, 3073 bp, Muscodor strobelii
  misc_feature: SGI EST ID NO. CUFF.93541.0
  misc_feature: Variant of the nucleotide sequence at SEQ ID NO 38908
ggatccgtcaattgcttacacaatgaagagctcaatactatctagccttttggcgggtatagcttcggctactactcaacaagagcttcttcaaagagatgatgccgcagtccatcctctcgccaaagctaaatctcgcatattcttaactgaaaatgccatttcaactgttgcgacaaattcaacgcctacgaagcccctagaatgctttcaagttgctgaaccgatactcacaccctctgggcttacgcgacgcgatctcagcaacccaccgtcgacatatcagaaaccaattggaacttccgatccgagtgaaagtgtttcgtcaccttgtgctgtggtgttgatggagcatatgttcacaaatagctatggcgcgccctttgtcggaaactacacgccaccagactgtgacttcgatcgcgtagtgatcaattttaccacacttgttaaggggaggcaatatgaccgtaccggaatcatgtatctaggcgacacagaagtttggcggacttcaaccgctgaaccaaccgccaccggtatccgctgggagtggctgaaagacatgactgccttcactgccttatggaaagagccgcagactgtcattttcgacttagaaaacatcgtcaatgatatttacacaggcattctcaatacgactctaacagcaacattcttcaaggcttcagacactgagaagattgccaatacagcctattcgcagcctgcagatgtgatcattccgatttcgcagcgccttggctcagccgggaagcccagtcaatttgtatatccagaccagaatgcgacaaatacgatcgtttcattcccgcaaaacgcgaatcgagccgtgttcactgccgatgtcaaaggccagggcaacgaagagttctggtggagcaacgtaccgcaaagcgccatctacacattcaatgagacatatggtgtatatccagggtattctccatttcgggaagttcaagtcttgatcgacggattcttagcgggtgtggattggcctttccccgtcatttacacgggtggcgttgtgccccagctcaatcgacccattgtagcaacgcaggcatttgacatcctcgagcatgagattgatatttcgccctttttgccacttctttgcgatggagagcctcatgtcttcacgatcaagattgtagggctagacgatgacgggaaatcgagagcgtggctaagtaatactactacagaggagtggtatgttactggcaaggttttcgtatggctagatgacgaaggctcggtcacgacaggcgaaataggaaatctagatgttccaggtccccaaatcaccttctcgcagtctatatctcaaaatgctacaggggcgaaccagacccttgatctctctttggcggtagagcgctatctaaatctcacctccaaggtgaagactcagcataccgagggagacgtcaaatgggaacagcgcctctcatacgataatgttggcggggtttacgactacggaaatggagaaatcaacagcttttcaattatcggagccgacactgctacagcgggagggagcgcagtgtacggcagagtatattcatacccgctctacgcgaaccagacacttacttattcggcccaagggaacctatcgctgtgggcagaagtgaatcaaggctatacctcacgtacttctggaaacaccgtcttcggtctaggaacagagggatatgtttcagatgctgttggttcgggtacgaccacatggcgcaacgggaccgctgactacggagcctatgcagataacaccgtatcgttcggtttgggcgaaacgcatcaaattttcgcatttggttcatacgatcaaggtggagcgttcacccgactttatgcccgagatgttgaagcccgcaataacagtgtcattgcagaccacattcagggtccttattagtcttggctgtaagagctgaattttttgtcgtcctgccgactacgtaagctgagcgaggctatgccggacaaatagcgagacacttttacgcccaccgactcatccactgcactacgctccatgcatatacgtagacaattaattctgttaattaaactaagttaatagcttataaatgaatcgctagcgtttattggaagcattatttttttcacgcaattttttgatgcatttttttgatgtgctgtctttgaaagcttggcagtggtagatgcaaaatgtcttacttttttgcgacataacctcgccgagtaagcggtcacacaaacccttcccatctgactatcagaccactacagacccacgtcagcaaagtctagcaattcgaaacccgaaagggtcgttgcgatgcaacattgccatgtttaacggtcgccaatatcctagatataaagctggagctacacccgcctcgacatattgaaagcagcaaccagacatccatacctacttctaaatcaaccatccgagatcgttttcattggaaccatagtaatatcaatctagcaatgcatctcctaattgccctcgccgtcctggccttcttaagccttactctcgcccaaaactgcggcggcgccgtgtatccctccctatgcggctacgacctcgtgaatcgtgcaggcaagacgcagtccgacattgcttacatggtctgtggccgcaccgacacatgcaacggagaagaatggaactacaccttcagcttaagcttaagcggaacttggagccccggcagattttgttcgacgggttgttataccaagaacaatggctgtgccgaggttgcgatgtgtcattagaaggcaggcgatccaggagttttaaatgcggatgtaggccatttatctaaagactataactgtctcgcacttaagttctagcatgtttctcttcgactataatacacggaggcatagagggcacaaacgatctaagatctcctctttcataacaccgggtagccatgcaagcaagtctaagtcaaaatcttagcattattagcgtattagctactaaatactaagattttgacttaattacgttataaattaataaatt

SEQ ID NO: 38911 - DNA, 240 bp, Muscodor strobelii
  misc_feature: SGI cDNA ID NO. 573530
  misc_feature: Reduced expression when VOC is produced
  misc_feature: Encodes the peptide sequence at SEQ ID NO 38912
atggacgccctcaagaacttcgccaacagcgccaaggagtctactggctctagcagcaacaccaacactggtcccgctggccagaaggatgactacggtgacaagggcgccgctttcttgaacaagaagtataacaacgacaagttgtcccacgatcagctcgagaagatcaccgacggtgctcgcggagcctttgagaagatgactggaaaggacattcctgacaagtactccaactag

SEQ ID NO: 38912 - protein, 79 aa, Muscodor strobelii
  misc_feature: SGI Peptide ID NO. 573530
  misc_feature (30)..(79): NCBI GI: 212526774 Blast Desc: conserved [Penicillium marneffei ATCC 18224] gi|210072942|gb|EEA27029.1| conserved [Penicillium marneffei ATCC 18224]
  misc_feature (28)..(79): NCBI GI: 242781767 Blast Desc: conserved [Talaromyces stipitatus ATCC 10500] gi|218720014|gb|EED19433.1| conserved [Talaromyces stipitatus ATCC 10500]
  misc_feature (1)..(79): NCBI GI: 119490170 Blast Desc: NFIA_062620 [Neosartorya fischeri NRRL 181] gi|119411158|gb|EAW21101.1| conserved [Neosartorya fischeri NRRL 181]
  misc_feature (15)..(79): NCBI GI: 39942014 Blast Desc: [Magnaporthe grisea 70-15] gi|145022930|gb|EDK06625.1| [Magnaporthe grisea 70-15]
  misc_feature (24)..(79): NCBI GI: 154313370 Blast Desc: [Botryotinia fuckeliana B05.10] gi|150849451|gb|EDN24644.1| [Botryotinia fuckeliana B05.10]
  misc_feature (11)..(79): NCBI GI: 238501152 Blast Desc: conserved [Aspergillus flavus NRRL3357] gi|220692047|gb|EED48394.1| conserved [Aspergillus flavus NRRL3357]
  misc_feature (1)..(79): NCBI GI: 121706308 Blast Desc: conserved [Aspergillus clavatus NRRL 1] gi|119399563|gb|EAW09991.1| conserved [Aspergillus clavatus NRRL 1]
  misc_feature (27)..(79): NCBI GI: 189200871 Blast Desc: PTRG_06439 [Pyrenophora tritici-repentis Pt-1C-BFP] gi|187983871|gb|EDU49359.1| PTRG_06439 [Pyrenophora tritici-repentis Pt-1C-BFP]
  misc_feature (1)..(79): NCBI GI: 145241590 Blast Desc: An09g01230 [Aspergillus niger] gi|134077980|emb|CAK49045.1| protein product [Aspergillus niger]
  misc_feature (1)..(79): NCBI GI: 255955867 Blast Desc: Pc21g16860 [Penicillium chrysogenum Wisconsin 54-1255] gi|211590397|emb|CAP96583.1| Pc21g16860 [Penicillium chrysogenum Wisconsin 54-1255]
  misc_feature: Useful for introducing or modulating the production of volatile compounds
MDALKNFANSAKESTGSSSNTNTGPAGQKDDYGDKGAAFLNKKYNNDKLSHDQLEKITDGARGAFEKMTGKDIPDKYSN

SEQ ID NO: 38913 - DNA, 1261 bp, Muscodor strobelii
  misc_feature: SGI EST ID NO. CUFF.94406.1
  misc_feature: Variant of the nucleotide sequence at SEQ ID NO 38911
gtcggtagcttgagctcccagtatataacctactgcataacccctcctcttggcttcgaaatcattcatcattctacaatcgaaaacatctccctacaatcaatactactactctctagactcacacacaaaagtcaatcatcatggacgccctcaagaacttcgccaacagcgccaaggagtctactggctctagcagcaacaccaacactggtcccgctggccagaaggatgactacggtgacaagggcgccgctttcttgaacaagaagtataacaacgacaagttgtcccacgatcagctcgagaagatcaccgacggtgctcgcggagcctttgagaagatgactggaaaggacattcctgacaagtactccaactagaggatgaatgatacccgcagccgttagacactacgctgcacctaatgatagagaggacttaatggaggagacgaggaggattcctctaattttgttattagaatcctaataaacaagactgattgaaagcttaaaaaaacgccttcaatgtgctatcctaagattatgtgcaacaaacgcgcccaggtcctggagataaccatgttctaaccaatgatatgcgcattcccaacatgtgttcccaaacgccgctctttatgcataaatcgtgtcatgttgcgtatgattatgtggaaaagtataagcagtcttatgtgacattgttttgcgcatatacgtcttatcgtaaactcgttgatgtcgaacgatatgagcctcgcttcctttcgagcgttcatcgaggaataggtccaatgtattacgcatcgtcgtagaagacttggatagccatgatgatgatccaaagcaagaatatcgagccgattaatgcgaacgcgaaaacagactgccattgctgacctgtgcaccgttagcttgaccgaattcctaagtcccgcgtacgtttggtatgacagcactactagttcgcctatcaattgttgaaagcgacttacatatggatctctgctcaagccaggcaagaaccgttggattgttcccaactggtacagaattccagaccaaattatcgcagcttgtgctaacagaactcgagccaccccatagctcgatgctcactacgattaatccgactagccataatacgaagaatgtgaatgatcctataattacgatcgaggggaggagtcgtcgttgcgatatcagccataacagtagtgcgatgaaggccactgtcagagcagctactactatccagt

SEQ ID NO: 38914 - DNA, 570 bp, Muscodor strobelii
  misc_feature: SGI cDNA ID NO. 573531
  misc_feature: Encodes the peptide sequence at SEQ ID NO 38915
atggccctctcaacaacaacagggacgggctcgctcgtctacgaacgacgggtagcccgagtccatcgctaccactggcctgccatccaacttaacgtgtggatgctgatcatgcttgcggcttcgttcttgataataggcgtgttcgcgacattcatcgcaatccaggggcaactgaacctgaacgtaccatggtatttcccatactggatagtagtagctgctctgacagtggccttcatcgcactactgttatggctgatatcgcaacgacgactcctcccctcgatcgtaattataggatcattcacattcttcgtattatggctagtcggattaatcgtagtgagcatcgagctatggggtggctcgagttctgttagcacaagctgcgataatttggtctggaattctgtaccagttgggaacaatccaacggttcttgcctggcttgagcagagatccatatgtcagcaatggcagtctgttttcgcgttcgcattaatcggctcgatattcttgctttggatcatcatcatggctatccaagtcttctacgacgatgcgtaa

SEQ ID NO: 38915 - protein, 189 aa, Muscodor strobelii
  misc_feature: SGI Peptide ID NO. 573531
  misc_feature (3)..(188): NCBI GI: 85093763 Blast Desc: NCU02334 [Neurospora crassa OR74A] gi|28921212|gb|EAA30524.1| conserved [Neurospora crassa OR74A]
  misc_feature (3)..(188): NCBI GI: 261354708 Blast Desc: conserved [Verticillium albo-atrum VaMs.102]
  misc_feature (3)..(189): NCBI GI: 39942012 Blast Desc: MGG_10855 [Magnaporthe grisea 70-15] gi|145022931|gb|EDK06626.1| MGG_10855 [Magnaporthe grisea 70-15]
  misc_feature (3)..(174): NCBI GI: 116179476 Blast Desc: CHGG_00366 [Chaetomium globosum CBS 148.51] gi|88184663|gb|EAQ92131.1| CHGG_00366 [Chaetomium globosum CBS 148.51]
  misc_feature (11)..(188): NCBI GI: 46138907 Blast Desc: FG10968.1 [Gibberella zeae PH-1]
  misc_feature (21)..(187): NCBI GI: 256728848 Blast Desc: NECHADRAFT_19478 [Nectria haematococca mpVI 77-13-4]
  misc_feature (5)..(188): NCBI GI: 156042958 Blast Desc: SS1G_11278 [Sclerotinia sclerotiorum 1980] gi|154695663|gb|EDN95401.1| SS1G_11278 [Sclerotinia sclerotiorum 1980]
  misc_feature (3)..(188): NCBI GI: 154313362 Blast Desc: BC1G_05378 [Botryotinia fuckeliana B05.10] gi|150849447|gb|EDN24640.1| BC1G_05378 [Botryotinia fuckeliana B05.10]
  misc_feature (26)..(187): NCBI GI: 121705760 Blast Desc: conserved [Aspergillus clavatus NRRL 1] gi|119399289|gb|EAW09717.1| conserved [Aspergillus clavatus NRRL 1]
  misc_feature (26)..(187): NCBI GI: 119491653 Blast Desc: NFIA_065880 [Neosartorya fischeri NRRL 181] gi|119411481|gb|EAW21424.1| conserved [Neosartorya fischeri NRRL 181]
MALSTTTGTGSLVYERRVARVHRYHWPAIQLNVWMLIMLAASFLIIGVFATFIAIQGQLNLNVPWYFPYWIVVAALTVAFIALLLWLISQRRLLPSIVIIGSFTFFVLWLVGLIVVSIELWGGSSSVSTSCDNLVWNSVPVGNNPTVLAWLEQRSICQQWQSVFAFALIGSIFLLWIIIMAIQVFYDDA

SEQ ID NO: 38916 - DNA, 4528 bp, Muscodor strobelii
  misc_feature: SGI EST ID NO. CUFF.94407.0
  misc_feature: Variant of the nucleotide sequence at SEQ ID NO 38914
atttgacctatagaatgacataatggacgggacgaagggcaatgagtatggagagaggtacttaaacgaagctatcccactgcccccacggggcgcaataaatctttcaatcgtccgactagcggagcttccctggagccttgttcttttctacctctttctttaatctcgacgagccattctccctgtcttcactcgctcaaaaatcgacctcacttgtcctcagtctctctccttcgtgctggcaagttcgctctctaccgatagatacatcactcaggacgccacgatgaacacctccatggtcaagtcaaagttcctctcccatcccgaggatgttggagtggtcgcagtaggattctcgggtggccagggcaaggcaggtgttgatgttggcccagctgcgcttattgagtccgggctgctcaaatctctgcgcgaggagctcaactacaagctccatggcgatgacgaagtacactcctataccgatctcgtgcccaaggaggatcccccattccggaacatgaagaatcctggtcttgtcagcgctgttacccagaaactgagcgagcaagtctacgctcacgctaaggagggtagaatggtcttgacgctgggtggtgatcattctattgctatcggaactatcggcggctcagccaaggccattcgcgagcgacttggccgcgagattgccgtaatttgggtcgatgcccatgccgacatcaatactcctgagagcagcgactctggcaacatccatggcatgcctgtagctttcatatcaggactggcaaaggaagagaagcccgagtacttcggttggctcaagccggagaacctgctcaatgtcaacaagctggtctacatcggactgcgagatgtggatgcaggtgagaagaagatcctccgtgacaatggtatcaaggccttcagcatgttcgacatcgatcgctacggaattggaagagtcatggagatggcacttgcacatattggaaacgatactcccatccacctatcattcgacgtcgacgcactggatccgatgtgggctcctagcacgggtactccggttcgtggcggtctgactctccgagagggcgacttcatctgcgagagtgtgcacctgacaggcaacctcgtggctattgatcttgtcgaggtaaaccctcacctcgctgccaaccaggagcaggaggccgagactatccgcgctggatgctcactcgtccgatgcgcactcggtgaatcgcttctttaaattgacttacaattcggcatttcttcgccgagacctacatttcttttcgacattttggggagctgtgatactcgcgaacgagtgtaaactaactgggaaacgggcaagggaacggaacggggcaaacatggataggacgaatcattgtcgcgaggcgttcacagatgggaggaacaggtcaattgttttttcttcgtctgactgcatagaacaaggcgtttacacagggcatagatgcatggctggcgatctgaatggtaagacggatctcatttcatgattttgttcgggagatccgcaccgcgccggcgagcatggatgcgttgcagcatggcgatctgcgtggttagacagattctaatatttgaggatctgctccgcgtcatgcgatgttcatcagagagatacctagacaacgtctaggtctactataaatagcgaattttattgtaattattatgatggtgacaacgaaagacacctcttttctaacgtgattgctgagatgatgacatcttgaaatggcattcctcgccgacccccacagcgaccatctaaccgcgcaaacccttcgtcgcccagccaccgaatatcgcgaaggtccggaagacattatcacaattccattattctggatcgcaaaatggatacgtaaaagatgcagacgcatacggaatccatggcttagcccctgccctattcttcttcccataacgccacttactcctgggcttgcggccaaaactctaaattccctgttcttcgtcaaggtgacagtttacaagaatagtcgcggtgtcacagcatacctggtacgcaccgatgcccgacagccccgctggcaccgaatcctgggcgcacccccaaatgatcgatctgcgatcgctgtcacttgtcgtaatctaacaattcctttcttttccgccatcccacgtctgccgagtatcgtattcttgatgcgacagctcattgtcgatacgctcgtttcaaccgtgaaatcactgttcggacacgaatagttgattgatacgcacctgggcgtgccagcgcgattccctgctcacttaattgcagggctatccgcgctgctgcgtggaacttgagaggtccccgccgtcgcgcgtcgtacgtcgcagcttaggcctcgattggcgtgccgctgagttggcaattgggcgcatcgggacctgcttttcgcttcgtcatcgggcttcttcctgtctcggatgaaggcggcctatttttaatattataatccatttcaaagtcgattcgaatccgacgcggtgcatcaagttgtgagctctgttctgatagagtgttcattcgaaaggcgaccacgcgtggatcttagttactgttttgagctgtgacaaacgcaatacatatcgctgttatacgactcgaggagctgtggtatcggtagtgctgaggtgtctagagagagagtagacgaacgatcaaacgactaatcgacgacggaacgaacgggcgagcaaacagtccaacaaacaacgcaatcaaacgaaccccagcgcgacgataaacaagcgaattcatcagatcacagaagttgcatcgcatctaatcatccgaccacatcctccagtcttctcatccgaaccacccgatcgccaatctaataccctcaatcacaactacgtaatggccctctcaacaacaacagggacgggctcgctcgtctacgaacgacgggtagcccgagtccatcgctaccactggcctgccatccaacttaacgtgtggatgctgatcatgcttgcggcttcgttcttgataataggcgtgttcgcgacattcatcgcaatccaggggcaactgaacctgaacgtaccatggtatttcccatactggatagtagtagctgctctgacagtggccttcatcgcactactgttatggctgatatcgcaacgacgactcctcccctcgatcgtaattataggatcattcacattcttcgtattatggctagtcggattaatcgtagtgagcatcgagctatggggtggctcgagttctgttagcacaagctgcgataatttggtctggaattctgtaccagttgggaacaatccaacggttcttgcctggcttgagcagagatccatatgtcagcaatggcagtctgttttcgcgttcgcattaatcggctcgatattcttgctttggatcatcatcatggctatccaagtcttctacgacgatgcgtaatacattggacctattcctcgatgaacgctcgaaaggaagcgaggctcatatcgttcgacatcaacgagtttacgataagacgtatatgcgcaaaacaatgtcacataagactgcttatacttttccacataatcatacgcaacatgacacgatttatgcataaagagcggcgtttgggaacacatgttgggaatgcgcatatcattggttagaacatggttatctccaggacctgggcgcgtttgttgcacataatcttaggatagcacattgaaggcgtttttttaagctttcaatcagtcttgtttattaggattctaataacaaaattagaggaatcctcctcgtctcctccattaagtcctctctatcattaggtgcagcgtagtgtctaacggctgcgggtatcattcatcctctagttggagtacttgtcaggaatgtcctttctgtacgaagaagtcagtcagcatatacttcatcgacggacgcagagacggagtatcaacaggcaagggggcttacccagtcatcttctcaaaggctccgcgagcaccgtcggtgatcttctcgagctgatcgtgggacaacttgtcgttgttatacttcttgttcaagaaagcggcgcctggcgaacacccgttagcacttacacttgagaaatgaactggaatggtgatgatggtaatggacgtacccttgtcaccgtagtcatccttctggccagcgggaccagtgttggtgttgctgctagagccagtagactccttggcgctgttggcgaagttcttgagggcgtccatgatgattgacttttgtgtgtgagtctagagagtagtagtattgattgtagggagatgttttcgattgtagaatgatgaatgatttcgaagccaagaggaggggttatgcagtaggttatatactgggagctcaagctaccgacgttagctctcagctcctgcagaacaaagagcatacgcaagcgtgagtttctgttcttgaatcgcgttgacgacgtcatcg

SEQ ID NO: 38917 - DNA, 978 bp, Muscodor strobelii
  misc_feature: SGI cDNA ID NO. 573532
  misc_feature: Reduced expression when VOC is produced
  misc_feature: Encodes the peptide sequence at SEQ ID NO 38918
atgaacacctccatggtcaagtcaaagttcctctcccatcccgaggatgttggagtggtcgcagtaggattctcgggtggccagggcaaggcaggtgttgatgttggcccagctgcgcttattgagtccgggctgctcaaatctctgcgcgaggagctcaactacaagctccatggcgatgacgaagtacactcctataccgatctcgtgcccaaggaggatcccccattccggaacatgaagaatcctggtcttgtcagcgctgttacccagaaactgagcgagcaagtctacgctcacgctaaggagggtagaatggtcttgacgctgggtggtgatcattctattgctatcggaactatcggcggctcagccaaggccattcgcgagcgacttggccgcgagattgccgtaatttgggtcgatgcccatgccgacatcaatactcctgagagcagcgactctggcaacatccatggcatgcctgtagctttcatatcaggactggcaaaggaagagaagcccgagtacttcggttggctcaagccggagaacctgctcaatgtcaacaagctggtctacatcggactgcgagatgtggatgcaggtgagaagaagatcctccgtgacaatggtatcaaggccttcagcatgttcgacatcgatcgctacggaattggaagagtcatggagatggcacttgcacatattggaaacgatactcccatccacctatcattcgacgtcgacgcactggatccgatgtgggctcctagcacgggtactccggttcgtggcggtctgactctccgagagggcgacttcatctgcgagagtgtgcacctgacaggcaacctcgtggctattgatcttgtcgaggtaaaccctcacctcgctgccaaccaggagcaggaggccgagactatccgcgctggatgctcactcgtccgatgcgcactcggtgaatcgcttctttaa

SEQ ID NO: 38918 - protein, 325 aa, Muscodor strobelii
  misc_feature: SGI Peptide ID NO. 573532
  misc_feature (13)..(324): Pfam Id: PF00491 Pfam Desc: Arginase family
  misc_feature (3)..(325): NCBI GI: 164427034 Blast Desc: arginase [Neurospora crassa OR74A] gi|157071578|gb|EAA30523.2| arginase [Neurospora crassa OR74A]
  misc_feature (3)..(317): NCBI GI: 3849794 Blast Desc: arginase 41kDa isoform [Neurospora crassa]
  misc_feature (1)..(325): NCBI GI: 46138905 Blast Desc: FG10967.1 [Gibberella zeae PH-1]
  misc_feature (3)..(317): NCBI GI: 309581 Blast Desc: arginase 36 kDa isoform [Neurospora crassa]
  misc_feature (1)..(325): NCBI GI: 145615788 Blast Desc: MGG_10854 [Magnaporthe grisea 70-15] gi|145022932|gb|EDK06627.1| MGG_10854 [Magnaporthe grisea 70-15]
  misc_feature (1)..(325): NCBI GI: 256728847 Blast Desc: [Nectria haematococca mpVI 77-13-4]
  misc_feature (2)..(325): NCBI GI: 154313364 Blast Desc: arginase [Botryotinia fuckeliana B05.10] gi|150849448|gb|EDN24641.1| arginase [Botryotinia fuckeliana B05.10]
  misc_feature (4)..(325): NCBI GI: 242781777 Blast Desc: arginase, [Talaromyces stipitatus ATCC 10500] gi|218720016|gb|EED19435.1| arginase, [Talaromyces stipitatus ATCC 10500]
  misc_feature (2)..(325): NCBI GI: 156042956 Blast Desc: arginase [Sclerotinia sclerotiorum 1980] gi|154695662|gb|EDN95400.1| arginase [Sclerotinia sclerotiorum 1980]
  misc_feature (4)..(325): NCBI GI: 212526778 Blast Desc: arginase, [Penicillium marneffei ATCC 18224] gi|210072944|gb|EEA27031.1| arginase, [Penicillium marneffei ATCC 18224]
  misc_feature (3)..(325): SWISSPROT Homolog: EC 3.5.3.1 Arginase
  misc_feature: Useful for introducing or modulating the production of volatile compounds
MNTSMVKSKFLSHPEDVGVVAVGFSGGQGKAGVDVGPAALIESGLLKSLREELNYKLHGDDEVHSYTDLVPKEDPPFRNMKNPGLVSAVTQKLSEQVYAHAKEGRMVLTLGGDHSIAIGTIGGSAKAIRERLGREIAVIWVDAHADINTPESSDSGNIHGMPVAFISGLAKEEKPEYFGWLKPENLLNVNKLVYIGLRDVDAGEKKILRDNGIKAFSMFDIDRYGIGRVMEMALAHIGNDTPIHLSFDVDALDPMWAPSTGTPVRGGLTLREGDFICESVHLTGNLVAIDLVEVNPHLAANQEQEAETIRAGCSLVRCALGESLL

SEQ ID NO: 38919 - DNA, 4528 bp, Muscodor strobelii; identical to SEQ ID NO: 38916
  misc_feature: SGI EST ID NO. CUFF.94407.0
  misc_feature: Variant of the nucleotide sequence at SEQ ID NO 38917

SEQ ID NO: 38920 - DNA, 1473 bp, Muscodor strobelii
  misc_feature: SGI cDNA ID NO. 573533
  misc_feature: Encodes the peptide sequence at SEQ ID NO 38921
atggatgaaacacagcctttactcccagactctgaccgaaacagagttgtccaagaagagcaaatcacagatcctaatattgtaatctttaaccccgaaggcgacgaggaaaatcccctggaatggcccgcagcttataaatgggccgttgtcggcctcttggcttttatggcgttcaatgtaacattcacatgtatatcagtagtcccagtagcagaccgcatagtacgcaacctcaacaatggacttaccagtaaatccgccagcgtgctactcgtcacaatctgggagctaggcgaagcagcaggacccctattaatcgcaccactctcagagatgtacgggcggctacccgtggtgaacgtgtgcaacatcgggctcatactatccaccgtcatcgcagcgctcagccagaacctcacactattcacagcggtcagggctctctcaggcgccatggtctgctcaaacgttctcaacccggccatcgtgggcgatatgttcccgccggagaacagaggtagaccaatgggtctggtgatgctcgcttcgctcgtcgggggagcgttgggtccattgattagtgtcagtgttgcggagggtctcgggtggcgggccgtgatgtggatgtgtgtgatactgagtagtacgggtgaactgctcctcttcacgctgtttcgggaaacgtaccgcgtgccaatcttgcgacgtaaagccgccaggatacgcgaggaaacttgtaatccccatgcgaagtcccaattcgacgagaacacacagagcatgtcgaaactccaggatgccgtcctccgacccttcatcgtgtttttcgactcccccgtcttgcaaatcacatccctcttcagcgccgttgtcttcacctttttttacattttgtcgactacactccctgatatcacaggaaatgtgtataaacttgagccgacgatcacaggtcttatatacatcagcttcagcgtcggagcagtcctaggcaacctaataaacaacacaaccatggactatctctacctccgtctcaaaacctcccacaaaggaatcgggcgccccgaataccgactccccttcgtaattttcggatctctcacgatgcccctggccatagcattcttcggctggaccgccgcactcaaactgcccgtcgccgttctcgtcttgggaatcatcctaataggctgcttcatgcaattcgcatttctccccgtcctcgcctacgtcgtcgacgccttcggtctctactcagcgtcagctctcaccgctctcatcgtgacgcgctgtctgatgagcactttcctacccctcgctacgccgcccttggttgaaagatttggttacggatgggctttcactatactaggtgccatgctgattgctcttacgcctattccggggtttacttttagatatggacatatttggcgacaacgctcgaaatactctagggatgaatag

SEQ ID NO: 38921 - protein, 490 aa, Muscodor strobelii
  misc_feature: SGI Peptide ID NO. 573533
  misc_feature (53)..(440): Pfam Id: PF07690 Pfam Desc: Major Facilitator Superfamily
  misc_feature (48)..(480): Pfam Id: PF00083 Pfam Desc: Sugar (and other) transporter
  misc_feature (2)..(490): NCBI GI: 116191461 Blast Desc: CHGG_05448 [Chaetomium globosum CBS 148.51] gi|88181361|gb|EAQ88829.1| CHGG_05448 [Chaetomium globosum CBS 148.51]
  misc_feature (2)..(490): NCBI GI: 171680958 Blast Desc: protein product [Podospora anserina] gi|170940437|emb|CAP65664.1| protein product [Podospora anserina]
  misc_feature (1)..(490): NCBI GI: 154300497 Blast Desc: BC1G_11072 [Botryotinia fuckeliana B05.10] gi|150856597|gb|EDN31789.1| BC1G_11072 [Botryotinia fuckeliana B05.10]
  misc_feature (1)..(490): NCBI GI: 156040237 Blast Desc: SS1G_12134 [Sclerotinia sclerotiorum 1980] gi|154696191|gb|EDN95929.1| SS1G_12134 [Sclerotinia sclerotiorum 1980]
  misc_feature (2)..(489): NCBI GI: 145607613 Blast Desc: MGG_12229 [Magnaporthe grisea 70-15] gi|145015134|gb|EDJ99702.1| MGG_12229 [Magnaporthe grisea 70-15]
  misc_feature (2)..(490): NCBI GI: 189195284 Blast Desc: conserved [Pyrenophora tritici-repentis Pt-1C-BFP] gi|187979859|gb|EDU46485.1| conserved [Pyrenophora tritici-repentis Pt-1C-BFP]
  misc_feature (1)..(487): NCBI GI: 255950574 Blast Desc: Pc22g21580 [Penicillium chrysogenum Wisconsin 54-1255] gi|211593071|emb|CAP99446.1| Pc22g21580 [Penicillium chrysogenum Wisconsin 54-1255]
  misc_feature (2)..(490): NCBI GI: 169597361 Blast Desc: SNOG_01466 [Phaeosphaeria nodorum SN15] gi|111069995|gb|EAT91115.1| SNOG_01466 [Phaeosphaeria nodorum SN15]
  misc_feature (33)..(490): NCBI GI: 85091774 Blast Desc: NCU09156 [Neurospora crassa OR74A] gi|28920464|gb|EAA29830.1| [Neurospora crassa OR74A]
  misc_feature (3)..(487): NCBI GI: 154312802 Blast Desc: BC1G_05102 [Botryotinia fuckeliana B05.10] gi|150849804|gb|EDN24997.1| BC1G_05102 [Botryotinia fuckeliana B05.10]
MDETQPLLPDSDRNRVVQEEQITDPNIVIFNPEGDEENPLEWPAAYKWAVVGLLAFMAFNVTFTCISVVPVADRIVRNLNNGLTSKSASVLLVTIWELGEAAGPLLIAPLSEMYGRLPVVNVCNIGLILSTVIAALSQNLTLFTAVRALSGAMVCSNVLNPAIVGDMFPPENRGRPMGLVMLASLVGGALGPLISVSVAEGLGWRAVMWMCVILSSTGELLLFTLFRETYRVPILRRKAARIREETCNPHAKSQFDENTQSMSKLQDAVLRPFIVFFDSPVLQITSLFSAVVFTFFYILSTTLPDITGNVYKLEPTITGLIYISFSVGAVLGNLINNTTMDYLYLRLKTSHKGIGRPEYRLPFVIFGSLTMPLAIAFFGWTAALKLPVAVLVLGIILIGCFMQFAFLPVLAYVVDAFGLYSASALTALIVTRCLMSTFLPLATPPLVERFGYGWAFTILGAMLIALTPIPGFTFRYGHIWRQRSKYSRDE

SEQ ID NO: 38922 - DNA, 7017 bp, Muscodor strobelii
  misc_feature: SGI EST ID NO. CUFF.93679.0
  misc_feature: Variant of the nucleotide sequence at SEQ ID NO 38920
tgcctactcccgctaacttctccaaaactccaatttctaaggtctacgtcatattctatcgcatatcaattcatgactctttcgccgaacatgcaggtatctactcatgacgttcaccacaccaacgtaatctcgcgccttaaagatccttatgttcgcgccctttgtaaagcatgcagtccaaacccctactatctccccacgacgccgtgtcgtgattggtctgtcaaggaatggagttcctattttagtagtagttgaggaacgcagcaccagcacccgcccccacaacatgcgcccagccgccggtgaatattttcggagacatatggatatttttctcatttatatcccaaccctcacctcgtaactccccatctcgagctagacaaaaaaggttcaaagatggatgaaacacagcctttactcccagactctgaccgaaacagagttgtccaagaagagcaaatcacagatcctaatattgtaatctttaaccccgaaggcgacgaggaaaatcccctggaatggcccgcagcttataaatgggccgttgtcggcctcttggcttttatggcgttcaatgtaacattcacatgtatatcagtagtcccagtagcagaccgcatagtacgcaacctcaacaatggacttaccagtaaatccgccagcgtgctactcgtcacaatctgggagctaggcgaagcagcaggacccctattaatcgcaccactctcagagatgtacgggcggctacccgtggtgaacgtgtgcaacatcgggctcatactatccaccgtcatcgcagcgctcagccagaacctcacactattcacagcggtcagggctctctcaggcgccatggtctgctcaaacgttctcaacccggccatcgtgggcgatatgttcccgccggagaacagaggtagaccaatgggtctggtgatgctcgcttcgctcgtcgggggagcgttgggtccattgattagtgtcagtgttgcggagggtctcgggtggcgggccgtgatgtggatgtgtgtgatactgagtagtacgggtgaactgctcctcttcacgctgtttcgggaaacgtaccgcgtgccaatcttgcgacgtaaagccgccaggatacgcgaggaaacttgtaatccccatgcgaagtcccaattcgacgagaacacacagagcatgtcgaaactccaggatgccgtcctccgacccttcatcgtgtttttcgactcccccgtcttgcaaatcacatccctcttcagcgccgttgtcttcacctttttttacattttgtcgactacactccctgatatcacaggaaatgtgtataaacttgagccgacgatcacaggtcttatatacatcagcttcagcgtcggagcagtcctaggcaacctaataaacaacacaaccatggactatctctacctccgtctcaaaacctcccacaaaggaatcgggcgccccgaataccgactccccttcgtaattttcggatctctcacgatgcccctggccatagcattcttcggctggaccgccgcactcaaactgcccgtcgccgttctcgtcttgggaatcatcctaataggctgcttcatgcaattcgcatttctccccgtcctcgcctacgtcgtcgacgccttcggtctctactcagcgtcagctctcaccgctctcatcgtgacgcgctgtctgatgagcactttcctacccctcgctacgccgcccttggttgaaagatttggttacggatgggctttcactatactaggtgccatgctgattgctcttacgcctattccggggtttacttttagatatggacatatttggcgacaacgctcgaaatactctagggatgaatagatgtccttgcagcgaccaagatagtctacgaggatcgcctcaatcaaattacgctgtgcttgggatcaattgattgaccacaggcgtgaacaccggtcttctccttggcagatcacgttgtgagatcttatgaagaatatcgataacatcaatatgcggcacccgcaaatctagacccagcaagactcaactgattaagagcactcagccaacagtatgaaaacttcaatatagagggacggagaatgcatcggcatggaataaaaatgatttattggggttccacaacgaaccgatggaacagggtataaataattcatgcataaagaccatccgtccagcgccgtgttgataaaacacaacatgctcttaccccctagtccaatgaggattgcttctacaggcgccctttattaaccaacaacgccttcccgtccctcgccaaaggtagcaggagaattgccttataggataatgatcctcgagggcatggatagaagcggatcctgggcaatatcgtagctcaaacaagcttctcgtagcaatgctaccatataatcaaactccaaatcgctatgaatgaccgaacgccgtgattgtgctaagagtcgtgaatgcatcatatcgagtgatctctatgtcatcgatctcgatcgtgactttcggcatcgccggacctatgttcagagcgagcaaagaagcgatcccgtgcactgtctaccagcatactaagccagccgggacgccgcgaaatgtgaggttcggatggaatgccttgttctagatccgacccatcgtcctcacgtgagctgctagaagctgatcctgcgcctcggagtgacatctcgtcttcgtcgctgtcatcctgatacggttcatagcgcggactagatggcgatccacgagcaagcgaccgcacaacatcacccttgcatattgggcatgttcgccgtcgcgttgtgagccatggtgttctgcccaacttgttagctgaggagaaattataaaagaattggaaataagcttacatgcagtccacgtggaattcatgtccacatgggagactcatgacctggctgacaccatcgacatattcttccaaacagacaacacattcaacctgtctgcccatgtacttcttccactggctgggagcctcccgcttttcgtgctctccacgcgatccgcttggcattgctagtgcggcattcacatcaagcagatcaccagccgacggaacacccgtagtggtccgagaacggggtcgcggtctggaagggccatgttgctgattctggagaagcggcgtcgttggagacgagcttgtgggggaaggtaggcgggaagttcggctgggggtagacgtgacggtatgatacgttcgcaccggtagacgctcgacaacagatttgggggcccgccatctgcgtcgtcgaatgcgtgcccggaggagcaatagggcatataccacagttaacgtgattaaggggctcacaaccagaaccaaaagcgtgtcaaagaagggactagctccgcttgttggcacaatcacgacccaaagaccctcacgtccaggcagaggagggatttccccatcgttgcctggtcttccaatgaaaggcccatcaagcgagtccacctcgtcatcggcatctacaaaatcggcgtcctcgccatccccgaagaatttggagatgagtcccgaacttgacgatgttgtcgaggaaccgtcagtggcttgcccgatggcatctttgcctttgactggcatgtggttagcggcatagtccccgcgccctagtgtagaaccgccgtggccagggccaatttgttgttgcttttctgcagcaccggacttggtttgcgatttggaaggcttgctgccggtagtgatagagctgtctgacttgtccatcccgaccaggtcaggatctctccaatcttctacaccaatcttgaagttgtctttgacagagtttttcgcctgggccttgttctttgatttactattacttccagccttagcttgcttttcgagactgcttcgaatggcactgtccttctcatcagaaaaatcctcaaccagtacccaatcctgattgttgttgtttgccacactggtatccggcggcgatttctttgatgcagaggctccaaaaattcgtgagagccaccctggtttagttgcagccttttcggattctgtcgagtaggactctcgaagctgccctgcaccctcgccccgcgaggtcgaagagattctggaatctcgggttgagggtatctgcgaagccaccctcttatgtttgccgccagatttatcgtacgactggaccttctggataggtttgccgttgtcgtcgatgatatcctcaatgaaactcccaggctgcatcatgagcgagagcagataggcagtagttcgagaggtaaagatagaaggaatggaaatatttgaagtgtcgccgtgcgcgtacatctgaatcagagggccacctcgacggttgtctccaacaatcaagccaatagctcctctgcgttgtgcccatttgaccttctccaagaagccgcagccacctcggcttaacagcacgattttgccttcgatctcggcgccttcttgtagggattgtatgtctgcgtgactagaggccgaggagctaaagtgatcggtagaaagcctctgcgaattatcgagatgctggtgaagatagtcgtcggtaccgtcgttaacgggtttctttctgatgttgggctgagcatcgaaccgagtggtgcgatctaccagtggtgtttttggcgccatctttcttgggccgtttggcgtgcagcgagccaagcgtggacttggagtcacccttggcgtccttgatcgagggtttcagggcggagatagagcttccatcgttccagcccggcacatcgctgcatccaagctcgccctcaccttcgccatcggcaagaagctcctcggtgaacccactgcctacccagacctggccgttaagcccatttcccggcagagaggggccgaaagcagctggccgtgcggcgaaggaggtggtattatcatcggcaatggtgattatggcattcggcgggaagagcgtgaagggggcggcgaaggagaagaaagagccgaagcccgacttctggccggggcgcgagacggcgaaggtgggcgagggctggccgaaagagacgatggtccggcagagcaggaagaggcaggcgaggaagaagagggcgaggatgacgattctcggaggccgcatcgtcagaggggccagccgtggggaggctgaccggcaaacagtccagcgggttcggtggtttacacctcgctctcgaggctaaggcaaatgcggcgactcggcctggaaatgtgaaggtcgatcattcgcaaaggcggttgttattaagactcgggtcaaggttcgaagagcgatgtgcgatgcgggcgcgatgaacgatatcaagatagagacacaggaagctgaggcttgcaacctagaagctgagaactaggggagatattgttagggaggcagctatcggagacgaggcgaggcagcagatcaatgcagctgtgcgcgtgacgatatgaatcagaggtaacgccgacgatgctccccacttgcatgtaataccacaggcggatgacaacggcgatgcctgtgtgtcttatcagaaagcgggaaagggaaagaggaaaaggaaaagagaaaaccagcgtatgcagctctaggggttgacggaaggaagggaagatgggcgtgatgcagaagaaggatcaaggcgaggtgaataacgtgaatacctaatgatgatgctgacgaaggccgcagggaagacgcaggcagctttgggtggcatgggcgagcaggcgggcggcccagcggcagatgggcggtggagggcgggcgtcggggctaagacgccaaagaggcaccaccacgcaccgctgcacggagaggagtcgtgcagctggtcccctcgtggctcaggatgcggagaagttccctgtcgcaaagtcgcctgtcgcaatgtttgtcgactggggttttgtctgctgtagccgtatgatgctgagctgggcaatcgtctcaaccgctcctcgggtcaaattgggcactcacgccttcaacatttcaattgctcgacagctcgctaacactagatagagcccctatgctatctgtccatcgtcacaaatagcgcatgcaataacacatacgtaccacatatgatcaccagaatgtgtccgatacctacctaccttacacttgcatgaacctcatcgacgtagagaacccgtcccgcatctgccagctcccaccttgtacgtcttgttttagcttgcaaatcacgacttttaattgctccaaagtcgtgaggtcaagtctcgtcatccactcgtcttgcgcggccggcccaccccagctgctgcttagcgcagggtccctgactatcaatccgaatagccgtagctcatcctcaccttggatttcaggtcatgcactcttctattagcctcagtcgattcggtttcatcaacacggccggagtagctaccgcaaccatgaattatctccatacctaacctatcttccgagtgattcctacgttcgcagggcaaaatgccatgtgaggagtcggataccgtgcagaaatacaattgcgtgcttgggtcacgcctagaccagccctctgtccgtccattcccatcgtatgagagtcgcgtgtcaccgtcaagtgatccatccctgttccacgcccaactgcatttgacgatggggacatcgtgaacccagaaacacgtcctgcaaacaaccaaacaagcctttcttatatcaacacttctccctttgacgcacaccaagcttcgttcacgcatccgtagacacagcctggccaatcacatggcacttgatatgccgtttgttctttggctacttgcaccgccagacacaaacaacatcgtcgtcccaccacacctagcccacaatagaaatcatacatttcttaacaacccgtagttgtaaatcgtcatcgattgtttgtgtccgagatgtaactcgaactcttgtttactcggcaatatcagtaagtgttctagtcttgaacgggtagccaacg

SEQ ID NO: 38923 - DNA, 2514 bp, Muscodor strobelii
  misc_feature: SGI cDNA ID NO. 573534
  misc_feature: Encodes the peptide sequence at SEQ ID NO 38924
atgcggcctccgagaatcgtcatcctcgccctcttcttcctcgcctgcctcttcctgctctgccggaccatcgtctctttcggccagccctcgcccaccttcgccgtctcgcgccccggccagaagtcgggcttcggctctttcttctccttcgccgcccccttcacgctcttcccgccgaatgccataatcaccattgccgatgataataccacctccttcgccgcacggccagctgctttcggcccctctctgccgggaaatgggcttaacggccaggtctgggtaggcagtgggttcaccgaggagcttcttgccgatggcgaaggtgagggcgagcttggatgcagcgatgtgccgggctggaacgatggaagctctatctccgccctgaaaccctcgatcaaggacgccaagggtgactccaagtccacgcttggctcgctgcacgccaaacggcccaagaaagatggcgccaaaaacaccactggtagatcgcaccactcgcatctcgataattcgcagaggctttctaccgatcactttagctcctcggcctctagtcacgcagacatacaatccctacaagaaggcgccgagatcgaaggcaaaatcgtgctgttaagccgaggtggctgcggcttcttggagaaggtcaaatgggcacaacgcagaggagctattggcttgattgttggagacaaccgtcgaggtggccctctgattcagatgtacgcgcacggcgacacttcaaatatttccattccttctatctttacctctcgaactactgcctatctgctctcgctcatgatgcagcctgggagtttcattgaggatatcatcgacgacaacggcaaacctatccagaaggtccagtcgtacgataaatctggcggcaaacataagagggtggcttcgcagataccctcaacccgagattccagaatctcttcgacctcgcggggcgagggtgcagggcagcttcgagagtcctactcgacagaatccgaaaaggctgcaactaaaccagggtggctctcacgaatttttggagcctctgcatcaaagaaatcgccgccggataccagtgtggcaaacaacaacaatcaggattgggtactggttgaggatttttctgatgagaaggacagtgccattcgaagcagtctcgaaaagcaagctaaggctggaagtaatagtaaatcaaagaacaaggcccaggcgaaaaactctgtcaaagacaacttcaagattggtgtagaagattggagagatcctgacctggtcgggatggacaagtcagacagctctatcactaccggcagcaagccttccaaatcgcaaaccaagtccggtgctgcagaaaagcaacaacaaattggccctggccacggcggttctacactagggcgcggggactatgccgctaaccacatgccagtcaaaggcaaagatgccatcgggcaagccactgacggttcctcgacaacatcgtcaagttcgggactcatctccaaattcttcggggatggcgaggacgccgattttgtagatgccgatgacgaggtggactcgcttgatgggcctttcattggaagaccaggcaacgatggggaaatccctcctctgcctggacgtgagggtctttgggtcgtgattgtgccaacaagcggagctagtcccttctttgacacgcttttggttctggttgtgagccccttaatcacgttaactgtggtatatgccctattgctcctccgggcacgcattcgacgacgcagatggcgggcccccaaatctgttgtcgagcgtctaccggtgcgaacgtatcataccgtcacgtctacccccagccgaacttcccgcctaccttcccccacaagctcgtctccaacgacgccgcttctccagaatcagcaacatggcccttccagaccgcgaccccgttctcggaccactacgggtgttccgtcggctggtgatctgcttgatgtgaatgccgcactagcaatgccaagcggatcgcgtggagagcacgaaaagcgggaggctcccagccagtggaagaagtacatgggcagacaggttgaatgtgttgtctgtttggaagaatatgtcgatggtgtcagccaggtcatgagtctcccatgtggacatgaattccacgtggactgcataacaccatggctcacaacgcgacggcgaacatgcccaatatgcaagggtgatgttgtgcggtcgcttgctcgtggatcgccatctagtccgcgctatgaaccgtatcaggatgacagcgacgaagacgagatgtcactccgaggcgcaggatcagcttctagcagctcacgtgaggacgatgggtcggatctagaacaaggcattccatccgaacctcacatttcgcggcgtcccggctggcttagtatgctggtagacagtgcacgggatcgcttctttgctcgctctgaacataggtccggcgatgccgaaagtcacgatcgagatcgatga

SEQ ID NO: 38924 - protein, 837 aa, Muscodor strobelii
  misc_feature: SGI Peptide ID NO. 573534
  misc_feature (139)..(272): Pfam Id: PF02225 Pfam Desc: PA domain
  misc_feature (699)..(741): Pfam Id: PF00097 Pfam Desc: Zinc finger, C3HC4 type (RING finger)
  misc_feature (198)..(272): Pfam Id: PF02225 Pfam Desc: PA domain
  misc_feature (1)..(822): NCBI GI: 164429582 Blast Desc: NCU01964 [Neurospora crassa OR74A] gi|157073537|gb|EAA35092.2| conserved [Neurospora crassa OR74A]
  misc_feature (1)..(837): NCBI GI: 171676115 Blast Desc: protein product [Podospora anserina] gi|170936123|emb|CAP60783.1| protein product [Podospora anserina]
  misc_feature (1)..(783): NCBI GI: 156035685 Blast Desc: SS1G_13046 [Sclerotinia sclerotiorum 1980] gi|154698451|gb|EDN98189.1| SS1G_13046 [Sclerotinia sclerotiorum 1980]
  misc_feature (1)..(768): NCBI GI: 116193725 Blast Desc: CHGG_06580 [Chaetomium globosum CBS 148.51] gi|88182493|gb|EAQ89961.1| CHGG_06580 [Chaetomium globosum CBS 148.51]
  misc_feature (1)..(805): NCBI GI: 154293426 Blast Desc: BC1G_14339 [Botryotinia fuckeliana B05.10] gi|150845320|gb|EDN20513.1| BC1G_14339 [Botryotinia fuckeliana B05.10]
  misc_feature (1)..(795): NCBI GI: 39971035 Blast Desc: MGG_02984 [Magnaporthe grisea 70-15] gi|149210579|ref|XP_001522664.1| MGCH7_ch7g763 [Magnaporthe grisea 70-15] gi|86196718|gb|EAQ71356.1| MGCH7_ch7g763 grisea
  misc_feature (1)..(811): NCBI GI: 256733981 Blast Desc: NECHADRAFT_77648 [Nectria haematococca mpVI 77-13-4]
  misc_feature (1)..(756): NCBI GI: 212543027 Blast Desc: PA and RING finger domain protein [Penicillium marneffei ATCC 18224] gi|210066575|gb|EEA20668.1| PA and RING finger domain protein [Penicillium marneffei ATCC 18224]
  misc_feature (1)..(800): NCBI GI: 242785493 Blast Desc: PA and RING finger domain protein [Talaromyces stipitatus ATCC 10500] gi|218720753|gb|EED20172.1| PA and RING finger domain protein [Talaromyces stipitatus ATCC 10500]
  misc_feature (1)..(772): NCBI GI: 261203931 Blast Desc: PA and RING finger domain-containing protein [Ajellomyces dermatitidis SLH14081] gi|239586964|gb|EEQ69607.1| PA and RING finger domain-containing protein [Ajellomyces
MRPPRIVILALFFLACLFLLCRTIVSFGQPSPTFAVSRPGQKSGFGSFFSFAAPFTLFPPNAIITIADDNTTSFAARPAAFGPSLPGNGLNGQVWVGSGFTEELLADGEGEGELGCSDVPGWNDGSSISALKPSIKDAKGDSKSTLGSLHAKRPKKDGAKNTTGRSHHSHLDNSQRLSTDHFSSSASSHADIQSLQEGAEIEGKIVLLSRGGCGFLEKVKWAQRRGAIGLIVGDNRRGGPLIQMYAHGDTSNISIPSIFTSRTTAYLLSLMMQPGSFIEDIIDDNGKPIQKVQSYDKSGGKHKRVASQIPSTRDSRISSTSRGEGAGQLRESYSTESEKAATKPGWLSRIFGASASKKSPPDTSVANNNNQDWVLVEDFSDEKDSAIRSSLEKQAKAGSNSKSKNKAQAKNSVKDNFKIGVEDWRDPDLVGMDKSDSSITTGSKPSKSQTKSGAAEKQQQIGPGHGGSTLGRGDYAANHMPVKGKDAIGQATDGSSTTSSSSGLISKFFGDGEDADFVDADDEVDSLDGPFIGRPGNDGEIPPLPGREGLWVVIVPTSGASPFFDTLLVLVVSPLITLTVVYALLLLRARIRRRRWRAPKSVVERLPVRTYHTVTSTPSRTSRLPSPTSSSPTTPLLQNQQHGPSRPRPRSRTTTGVPSAGDLLDVNAALAMPSGSRGEHEKREAPSQWKKYMGRQVECVVCLEEYVDGVSQVMSLPCGHEFHVDCITPWLTTRRRTCPICKGDVVRSLARGSPSSPRYEPYQDDSDEDEMSLRGAGSASSSSREDDGSDLEQGIPSEPHISRRPGWLSMLVDSARDRFFARSEHRSGDAESHDRDR

SEQ ID NO: 38925 - DNA, 5606 bp, Muscodor strobelii
  misc_feature: SGI EST ID NO. CUFF.93680.2
  misc_feature: Variant of the nucleotide sequence at SEQ ID NO 38923
cgttggctacccgttcaagactagaacacttactgatattgccgagtaaacaagagttcgagttacatctcggacacaaacaatcgatgacgatttacaactacgggttgttaagaaatgtatgatttctattgtgggctaggtgtggtgggacgacgatgttgtttgtgtctggcggtgcaagtagccaaagaacaaacggcatatcaagtgccatgtgattggccaggctgtgtctacggatgcgtgaacgaagcttggtgtgcgtcaaagggagaagtgttgatataagaaaggcttgtttggttgtttgcaggacgtgtttctgggttcacgatgtccccatcgtcaaatgcagttgggcgtggaacagggatggatcacttgacggtgacacgcgactctcatacgatgggaatggacggacagagggctggtctaggcgtgacccaagcacgcaattgtatttctgcacggtatccgactcctcacatggcattttgccctgcgaacgtaggaatcactcggaagataggttaggtatggagataattcatggttgcggtagctactccggccgtgttgatgaaaccgaatcgactgaggctaatagaagagtgcatgacctgaaatccaaggtgaggatgagctacggctattcggattgatagtcagggaccctgcgctaagcagcagctggggtgggccggccgcgcaagacgagtggatgacgagacttgacctcacgactttggagcaattaaaagtcgtgatttgcaagctaaaacaagacgtacaaggtgggagctggcagatgcgggacgggttctctacgtcgatgaggttcatgcaagtgtaaggtaggtaggtatcggacacattctggtgatcatatgtggtacgtatgtgttattgcatgcgctatttgtgacgatggacagatagcataggggctctatctagtgttagcgagctgtcgagcaattgaaatgttgaaggcgtgagtgcccaatttgacccgaggagcggttgagacgattgcccagctcagcatcatacggctacagcagacaaaaccccagtcgacaaacattgcgacaggcgactttgcgacagggaacttctccgcatcctgagccacgaggggaccagctgcacgactcctctccgtgcagcggtgcgtggtggtgcctctttggcgtcttagccccgacgcccgccctccaccgcccatctgccgctgggccgcccgcctgctcgcccatgccacccaaagctgcctgcgtcttccctgcggccttcgtcagcatcatcattaggtattcacgttattcacctcgccttgatccttcttctgcatcacgcccatcttcccttccttccgtcaacccctagagctgcatacgctggttttctcttttccttttcctctttccctttcccgctttctgataagacacacaggcatcgccgttgtcatccgcctgtggtattacatgcaagtggggagcatcgtcggcgttacctctgattcatatcgtcacgcgcacagctgcattgatctgctgcctcgcctcgtctccgatagctgcctccctaacaatatctcccctagttctcagcttctaggttgcaagcctcagcttcctgtgtctctatcttgatatcgttcatcgcgcccgcatcgcacatcgctcttcgaaccttgacccgagtcttaataacaaccgcctttgcgaatgatcgaccttcacatttccaggccgagtcgccgcatttgccttagcctcgagagcgaggtgtaaaccaccgaacccgctggactgtttgccggtcagcctccccacggctggcccctctgacgatgcggcctccgagaatcgtcatcctcgccctcttcttcctcgcctgcctcttcctgctctgccggaccatcgtctctttcggccagccctcgcccaccttcgccgtctcgcgccccggccagaagtcgggcttcggctctttcttctccttcgccgcccccttcacgctcttcccgccgaatgccataatcaccattgccgatgataataccacctccttcgccgcacggccagctgctttcggcccctctctgccgggaaatgggcttaacggccaggtctgggtaggcagtgggttcaccgaggagcttcttgccgatggcgaaggtgagggcgagcttggatgcagcgatgtgccgggctggaacgatggaagctctatctccgccctgaaaccctcgatcaaggacgccaagggtgactccaagtccacgcttggctcgctgcacgccaaacggcccaagaaagatggcgccaaaaacaccactggtagatcgcaccactcggttcgatgctcagcccaacatcagaaagaaacccgttaacgacggtaccgacgactatcttcaccagcatctcgataattcgcagaggctttctaccgatcactttagctcctcggcctctagtcacgcagacatacaatccctacaagaaggcgccgagatcgaaggcaaaatcgtgctgttaagccgaggtggctgcggcttcttggagaaggtcaaatgggcacaacgcagaggagctattggcttgattgttggagacaaccgtcgaggtggccctctgattcagatgtacgcgcacggcgacacttcaaatatttccattccttctatctttacctctcgaactactgcctatctgctctcgctcatgatgcagcctgggagtttcattgaggatatcatcgacgacaacggcaaacctatccagaaggtccagtcgtacgataaatctggcggcaaacataagagggtggcttcgcagataccctcaacccgagattccagaatctcttcgacctcgcggggcgagggtgcagggcagcttcgagagtcctactcgacagaatccgaaaaggctgcaactaaaccagggtggctctcacgaatttttggagcctctgcatcaaagaaatcgccgccggataccagtgtggcaaacaacaacaatcaggattgggtactggttgaggatttttctgatgagaaggacagtgccattcgaagcagtctcgaaaagcaagctaaggctggaagtaatagtaaatcaaagaacaaggcccaggcgaaaaactctgtcaaagacaacttcaagattggtgtagaagattggagagatcctgacctggtcgggatggacaagtcagacagctctatcactaccggcagcaagccttccaaatcgcaaaccaagtccggtgctgcagaaaagcaacaacaaattggccctggccacggcggttctacactagggcgcggggactatgccgctaaccacatgccagtcaaaggcaaagatgccatcgggcaagccactgacggttcctcgacaacatcgtcaagttcgggactcatctccaaattcttcggggatggcgaggacgccgattttgtagatgccgatgacgaggtggactcgcttgatgggcctttcattggaagaccaggcaacgatggggaaatccctcctctgcctggacgtgagggtctttgggtcgtgattgtgccaacaagcggagctagtcccttctttgacacgcttttggttctggttgtgagccccttaatcacgttaactgtggtatatgccctattgctcctccgggcacgcattcgacgacgcagatggcgggcccccaaatctgttgtcgagcgtctaccggtgcgaacgtatcataccgtcacgtctacccccagccgaacttcccgcctaccttcccccacaagctcgtctccaacgacgccgcttctccagaatcagcaacatggcccttccagaccgcgaccccgttctcggaccactacgggtgttccgtcggctggtgatctgcttgatgtgaatgccgcactagcaatgccaagcggatcgcgtggagagcacgaaaagcgggaggctcccagccagtggaagaagtacatgggcagacaggttgaatgtgttgtctgtttggaagaatatgtcgatggtgtcagccaggtcatgagtctcccatgtggacatgaattccacgtggactgcataacaccatggctcacaacgcgacggcgaacatgcccaatatgcaagggtgatgttgtgcggtcgcttgctcgtggatcgccatctagtccgcgctatgaaccgtatcaggatgacagcgacgaagacgagatgtcactccgaggcgcaggatcagcttctagcagctcacgtgaggacgatgggtcggatctagaacaaggcattccatccgaacctcacatttcgcggcgtcccggctggcttagtatgctggtagacagtgcacgggatcgcttctttgctcgctctgaacataggtccggcgatgccgaaagtcacgatcgagatcgatgacatagagatcactcgatatgatgcattcacgactcttagcacaatcacggcgttcggtcattcatagcgatttggagtttgattatatggtagcattgctacgagaagcttgtttgagctacgatattgcccaggatccgcttctatccatgccctcgaggatcattatcctataaggcaattctcctgctacctttggcgagggacgggaaggcgttgttggttaataaagggcgcctgtagaagcaatcctcattggactagggggtaagagcatgttgtgttttatcaacacggcgctggacggatggtctttatgcatgaattatttataccctgttccatcggttcgttgtggaaccccaataaatcatttttattccatgccgatgcattctccgtccctctatattgaagttttcatactgttggctgagtgctcttaatcagttgagtcttgctgggtctagatttgcgggtgccgcatattgatgttatcgatattcttcataagatctcacaacgtgatctgccaaggagaagaccggtgttcacgcctgtggtcaatcaattgatcccaagcacagcgtaatttgattgaggcgatcctcgtagactatcttggtcgctgcaaggacatctattcatccctagagtatttcgagcgttgtcgccaaatatgtccatatctaaaagtaaaccccggaataggcgtaagagcaatcagcatggcacctagtatagtgaaagcccatccgtaaccaaatctttcaaccaagggcggcgtagcgaggggtaggaaagtgctcatcagacagcgcgtcacgatgagagcggtgagagctgacgctgagtagagaccgaaggcgtcgacgacgtaggcgaggacggggagaaatgcgaattgcatgaagcagcctattaggatgattcccaagacgagaacggcgacgggcagtttgagtgcggcggtccagccgaagaatgctatggccaggggcatcgtgagagatccgaaaattacgaaggggagtcggtattcggggcgcccgattcctttgtgggaggttttgagacggaggtagagatagtccatggttgtgttgtttattaggttgcctaggactgctccgacgcctttgcgggggcttagtgtttgtg

SEQ ID NO: 38926 - DNA, 336 bp, Muscodor strobelii
  misc_feature: SGI cDNA ID NO. 573536
  misc_feature: Elevated expression when VOC is produced
  misc_feature: Encodes the peptide sequence at SEQ ID NO 38927
atgcaagacactgccaagcaaactttcttcaaagtcattcacttaatccctggactgagaccgaagaccaccggcatggcggaagaaaagcccaaagtgacagataccatagcgtatcggtacaacaagcccgaggacgttcgcgcggctctcatgaaatgtggtttcaaagacaaggacattaagatactgggtaccgaaggcaacgctttccagttgaacttgccgcggaacctcacaccagaggaaaaggatcagattcaagagttcctagacgacaaaatacgtgagaaaaagggaaaagtcgtaaacgaggaaggagaagatgatttgtag

SEQ ID NO: 38927 - protein, 111 aa, Muscodor strobelii
  misc_feature: SGI Peptide ID NO. 573536
  misc_feature: Useful for introducing or modulating the production of volatile compounds
MQDTAKQTFFKVIHLIPGLRPKTTGMAEEKPKVTDTIAYRYNKPEDVRAALMKCGFKDKDIKILGTEGNAFQLNLPRNLTPEEKDQIQEFLDDKIREKKGKVVNEEGEDDL

SEQ ID NO: 38928 - DNA, 555 bp, Muscodor strobelii
  misc_feature: SGI EST ID NO. CUFF.93593.0
  misc_feature: Variant of the nucleotide sequence at SEQ ID NO 38926
cttaatccctggactgagaccgaagaccaccggcatggcggaagaaaagcccaaagtgacagataccatagcgtatcggtacaacaagcccgaggacgttcgcgcggctctcatgaaatgtggtttcaaagacaaggacattaagatactgggtaccgaaggcaacgctttccagttgaacttgccgcggaacctcacaccagaggaaaaggatcagattcaagagttcctagacgacaaaatacgtgagaaaaagggaaaagtcgtaaacgaggaaggagaagatgatttgtaggcatgtttgtttagttctatcagcaacgtgatgcgtcttcttgaagcgcatgggagaagtctatttccagattatctacttttgtccttcgagatcgtgtccgaggtgacttccggtgatggattcagtaaggaatgccttaagttcctcgctgctcgctcgcgcatctatttctacgaccaacatctttgattgtataaaatctaacaaagttcttatttgatctgtacaatttttgtgcaatttgagttccgagattt

SEQ ID NO: 38929 - DNA, 2097 bp, Muscodor strobelii
  misc_feature: SGI cDNA ID NO. 573537
  misc_feature: Encodes the peptide sequence at SEQ ID NO 38930
atggacgactacgatcgagactcgaatgccagctccgataatgagcgtgagcaagaggatgacctgattatgcaagacgctgacgccgacgccgacgaagataacgataagtccgatcacgacgacgccgacgataatgacgataacaacgaagacgacaacgacgacaacaacgatgataataacgacgataacgacgacgaagatgacgaccacgatcagcaccaggagactgacgagtcgcagcaacagcatcaaagcaaacccgccaccccaggcgagtcgtccaagcagaaatggcagccaaagatacgccctgaagtctttacggctaagacctacgatatcgtgcccaccatggctgcacccatggccaccagcgttaatgctgtagctataacgccagatttgcggtactggatgacgggtgggaccgacggatatatcagaaaatacgacgggccggcaactatcaatggcaagtcactcttgaccgttgctcagcgccatcccttcgtcgactcggtcacgaaagccggcgttttgctgtcgtactgggagaattccgagcctcaagcacctggtgcgcgtcaagaggacctagtcctcagccctgtatacagcctagccgtgcattccgaggcactgtggctcctttctggtctcgagagcggtggcattaacctgcagagtgttcgccacgacgagggtaagaaaatctgttgtttacagaagcacaccaatgcagtcagcgcgttgacactcgctgccgacgagaagagcgtgttgagtggcagctgggacaagaacatcttcgactgggatctcaacaatggagagatcaagaggagcttcgacggaaacggaggtcagatttctgctattgaaatacgaccgatgggtggcgcgcctttccccgccgaagccagtgctgaggttctccccagcgacacgttcctcagcaacaatggacttccaagcgctggccagatggatttcaagctcgattccgacctccaagatatcaagatggaaagtaatggtgtaaccatcaacagtgactcgttgcccgtaggagatggaatgaatgacatagcagatgctcctggaagccccggccatgatagtctcttcggcggtagtccgggtggtggctctgatctctttggggataattttggaggcgacgacgataacgagttttctcgcgcaatgatgcaagattcagcgcaagacgatcttccaataacggattacaacgtctccagcactacttttgagcctgatagtctatcgacgcttccaaccacccaagtcacagagtctcagcaacagaacgacgttccggttgatctgagccacacagatacgctcgggactgagtcctctactatgaacccgggcatgtcagatgcaacggccgctgcaggtgatcaatcactttctatggattcgctggatacaacgcagccaaacttgcaagttggacaagaagctgaaccgccctcaccttcaaccgtgttcgctgccgcaccgctcactcaccatgacacaacacaaacgtctgatagcactttcttggctgcttccattgacgggccgatccgtatatgggacaaacgaatgccaaatcaggtagccaggatcggaaaccggctgggtgttcctccctggtgtatgggtgcctgctggagcccagacgggaatttcatctacgccgggcgaagaaacggcaccgtagaagagttcagcgtgcagaacgctcgcggcggcatggtaggatggcaaccagagcgaaccttcaaattcccgaatggtagtggaccagtgagctgcgtgcggactatgccgaacggcaggcatctcgtctgcgcatcacacgatattctccggctctacgacctaaaggcggatacctcatcttccaaacatgcacctccgcctttcctcattgttccagggcccccgagagcgggtgtgatctcaagcttgtacatcgatgcctccagccgattcatgctctcggcggcaggcacaagaggttgggaaggttcttccacggaagttctgatcgggtacgaaatcaacgtcccataa

SEQ ID NO: 38930 - protein, 698 aa, Muscodor strobelii
  misc_feature: SGI Peptide ID NO. 573537
  misc_feature (237)..(275): Pfam Id: PF00400 Pfam Desc: WD domain, G-beta repeat
  misc_feature (64)..(697): NCBI GI: 256721903 Blast Desc: NECHADRAFT_36946 [Nectria haematococca mpVI 77-13-4]
  misc_feature (91)..(697): NCBI GI: 46111839 Blast Desc: FG02801.1 [Gibberella zeae PH-1]
  misc_feature (72)..(696): NCBI GI: 85091949 Blast Desc: NCU09208 [Neurospora crassa OR74A] gi|28920553|gb|EAA29916.1| NCU09208 [Neurospora crassa OR74A] gi|29150101|emb|CAD79662.1| related to transcription factor SPT8
  misc_feature (66)..(696): NCBI GI: 171684205 Blast Desc: protein product [Podospora anserina] gi|170942063|emb|CAP67715.1| protein product [Podospora anserina]
  misc_feature (120)..(697): NCBI GI: 261353341 Blast Desc: transcription factor SPT8 [Verticillium albo-atrum VaMs.102]
  misc_feature (84)..(698): NCBI GI: 156042129 Blast Desc: SS1G_11615 [Sclerotinia sclerotiorum 1980] gi|154695998|gb|EDN95736.1| SS1G_11615 [Sclerotinia sclerotiorum 1980]
  misc_feature (1)..(697): NCBI GI: 145614799 Blast Desc: MGG_10590 [Magnaporthe grisea 70-15] gi|145021732|gb|EDK05809.1| MGG_10590 [Magnaporthe grisea 70-15]
  misc_feature (74)..(697): NCBI GI: 149209301 Blast Desc: MGCH7_ch7g143 [Magnaporthe grisea 70-15] gi|86196098|gb|EAQ70736.1| MGCH7_ch7g143 [Magnaporthe grisea 70-15]
  misc_feature (17)..(698): NCBI GI: 67537000 Blast Desc: AN4670.2 [Aspergillus nidulans FGSC A4] gi|40741522|gb|EAA60712.1| AN4670.2 [Aspergillus nidulans FGSC A4] gi|259482495|tpe|CBF77033.1| TPA: transcription factor FGSC
  misc_feature (31)..(697): NCBI GI: 212537929 Blast Desc: conserved [Penicillium marneffei ATCC 18224] gi|210068862|gb|EEA22953.1| conserved [Penicillium marneffei ATCC 18224]
MDDYDRDSNASSDNEREQEDDLIMQDADADADEDNDKSDHDDADDNDDNNEDDNDDNNDDNNDDNDDEDDDHDQHQETDESQQQHQSKPATPGESSKQKWQPKIRPEVFTAKTYDIVPTMAAPMATSVNAVAITPDLRYWMTGGTDGYIRKYDGPATINGKSLLTVAQRHPFVDSVTKAGVLLSYWENSEPQAPGARQEDLVLSPVYSLAVHSEALWLLSGLESGGINLQSVRHDEGKKICCLQKHTNAVSALTLAADEKSVLSGSWDKNIFDWDLNNGEIKRSFDGNGGQISAIEIRPMGGAPFPAEASAEVLPSDTFLSNNGLPSAGQMDFKLDSDLQDIKMESNGVTINSDSLPVGDGMNDIADAPGSPGHDSLFGGSPGGGSDLFGDNFGGDDDNEFSRAMMQDSAQDDLPITDYNVSSTTFEPDSLSTLPTTQVTESQQQNDVPVDLSHTDTLGTESSTMNPGMSDATAAAGDQSLSMDSLDTTQPNLQVGQEAEPPSPSTVFAAAPLTHHDTTQTSDSTFLAASIDGPIRIWDKRMPNQVARIGNRLGVPPWCMGACWSPDGNFIYAGRRNGTVEEFSVQNARGGMVGWQPERTFKFPNGSGPVSCVRTMPNGRHLVCASHDILRLYDLKADTSSSKHAPPPFLIVPGPPRAGVISSLYIDASSRFMLSAAGTRGWEGSSTEVLIGYEINVP

SEQ ID NO: 38931 - DNA, 2812 bp, Muscodor strobelii
  misc_feature: SGI EST ID NO. CUFF.93614.0
  misc_feature: Variant of the nucleotide sequence at SEQ ID NO 38929
tctcaacctgcgcacgatgaactgaccacctcagctgcccaccttacatatttacaataacttgctcattcaaggtcgtaccttgctcatttctataaccatctcctctattggtcttgcaccgcaaaccacttggcgcatcacaagggcagccgttgactagtggtctatgcgccgagcgacatgattgcatcacgaccattgctgccatcgcttctctctttcatcaaagcttagaatatattcgtccgatacgaagcttggttaaatgcttacgtaaccaagtctctcgtactctgcaccctttcgtgtgacaagtacggaaagcagaagagtaaatctacacaatcgctaccattactattgctacaatccatgcggcacaatggacgactacgatcgagactcgaatgccagctccgataatgagcgtgagcaagaggatgacctgattatgcaagacgctgacgccgacgccgacgaagataacgataagtccgatcacgacgacgccgacgataatgacgataacaacgaagacgacaacgacgacaacaacgatgataataacgacgataacgacgacgaagatgacgaccacgatcagcaccaggagactgacgagtcgcagcaacagcatcaaagcaaacccgccaccccaggcgagtcgtccaagcagaaatggcagccaaagatacgccctgaagtctttacggctaagacctacgatatcgtgcccaccatggctgcacccatggccaccagcgttaatgctgtagctataacgccagatttgcggtactggatgacgggtgggaccgacggatatatcagaaaatacgacgggccggcaactatcaatggcaagtcactcttgaccgttgctcagcgccatcccttcgtcgactcggtcacgaaagccggcgttttgctgtcgtactgggagaattccgagcctcaagcacctggtgcgcgtcaagaggacctagtcctcagccctgtatacagcctagccgtgcattccgaggcactgtggctcctttctggtctcgagagcggtggcattaacctgcagagtgttcgccacgacgagggtaagaaaatctgttgtttacagaagcacaccaatgcagtcagcgcgttgacactcgctgccgacgagaagagcgtgttgagtggcagctgggacaagaacatcttcgactgggatctcaacaatggagagatcaagaggagcttcgacggaaacggaggtcagatttctgctattgaaatacgaccgatgggtggcgcgcctttccccgccgaagccagtgctgaggttctccccagcgacacgttcctcagcaacaatggacttccaagcgctggccagatggatttcaagctcgattccgacctccaagatatcaagatggaaagtaatggtgtaaccatcaacagtgactcgttgcccgtaggagatggaatgaatgacatagcagatgctcctggaagccccggccatgatagtctcttcggcggtagtccgggtggtggctctgatctctttggggataattttggaggcgacgacgataacgagttttctcgcgcaatgatgcaagattcagcgcaagacgatcttccaataacggattacaacgtctccagcactacttttgagcctgatagtctatcgacgcttccaaccacccaagtcacagagtctcagcaacagaacgacgttccggttgatctgagccacacagatacgctcgggactgagtcctctactatgaacccgggcatgtcagatgcaacggccgctgcaggtgatcaatcactttctatggattcgctggatacaacgcagccaaacttgcaagttggacaagaagctgaaccgccctcaccttcaaccgtgttcgctgccgcaccgctcactcaccatgacacaacacaaacgtctgatagcactttcttggctgcttccattgacgggccgatccgtatatgggacaaacgaatgccaaatcaggtagccaggatcggaaaccggctgggtgttcctccctggtgtatgggtgcctgctggagcccagacgggaatttcatctacgccgggcgaagaaacggcaccgtagaagagttcagcgtgcagaacgctcgcggcggcatggtaggatggcaaccagagcgaaccttcaaattcccgaatggtagtggaccagtgagctgcgtgcggactatgccgaacggcaggcatctcgtctgcgcatcacacgatattctccggctctacgacctaaaggcggatacctcatcttccaaacatgcacctccgcctttcctcattgttccagggcccccgagagcgggtgtgatctcaagcttgtacatcgatgcctccagccgattcatgctctcggcggcaggcacaagaggttgggaaggttcttccacggaagttctgatcgggtacgaaatcaacgtcccataagctccttatttttgttctcctgctttctttaggcgttatggtgagagtacttcaaccagaccgggtcagcgttttcgtttacgcacgggttcattgaatagatggcaaataccccttggccttggctacggcgttacggttcatggttttcaaagatttgcctttcgggggctggatcggattgattcacacagatcgaaagcgtagagtcgttagaaagcagcggtataagtcaaaatttatggagcagctcagatagtcagggtatcaagcatagagctagaaatctttcgaaacaccactttccccataacgtttgcctctaacgca

SEQ ID NO: 38932 - DNA, 600 bp, Muscodor strobelii
  misc_feature: SGI cDNA ID NO. 573538
  misc_feature: Encodes the peptide sequence at SEQ ID NO 38933
atggccgtcatcttgaaccctcaaccaaacatcaatattcgtcagctgctcggtggtgcggatgccctcgatgttgaacagaacaactggggcaacctcgatttcgctactggccgtatcgactataccgacgacgaccacgatggcgtccaaacctcagtcgccccaccgaggaaaatcattgggacctcaggactggcatcttgcacgggcgtcgtgatcctcacggcgactcgcgccgtcgtggcacactactcgaccgggtttgtcggggacgacttcggagactacctccagcagaaccagaacgaccttcaaaacggaagggcgtgggtcatgcactgccgccgcgatcccaacgcagttaatccagatgaggaatgcgacgaaaccttgggaagacagctatcttccatcctgcaagacaagttggggatgcccgaggccagcatccaaatgctcatgtacaaaccacctccggtgcatctgccacccaatgatacgtggggcaatcgaggggaagggagtattctcgtggacgctcgcaactcgccggctaacccggctacggtgtatgctcaggattaccaacagctgtga

SEQ ID NO: 38933 - protein, 199 aa, Muscodor strobelii
  misc_feature: SGI Peptide ID NO. 573538
MAVILNPQPNINIRQLLGGADALDVEQNNWGNLDFATGRIDYTDDDHDGVQTSVAPPRKIIGTSGLASCTGVVILTATRAVVAHYSTGFVGDDFGDYLQQNQNDLQNGRAWVMHCRRDPNAVNPDEECDETLGRQLSSILQDKLGMPEASIQMLMYKPPPVHLPPNDTWGNRGEGSILVDARNSPANPATVYAQDYQQL

SEQ ID NO: 38934 - DNA, 1365 bp, Muscodor strobelii
  misc_feature: SGI EST ID NO. CUFF.93612.0
  misc_feature: Variant of the nucleotide sequence at SEQ ID NO 38932
cgtgatgccggtggcttggttgtcgtaaagagcagttctttcaccccaccgagctgaacacccagtcgactagacttgtcttacggacagtccgcaagtattacacttcacaccagtggagctgaatatgaatgcgccaaataccagaatgggaatacatgtaggtcatatctcggtccagccgatacacgtacaatgagaggtcgatcccgtgtatatagagggcaatagctactgaacttttagtcgatgaacgataagcaacccttcagatctcaacaacacttagtagtcatcaataaactcttaggctctccctcaacgtattctaagatggccgtcatcttgaaccctcaaccaaacatcaatattcgtcagctgctcggtggtgcggatgccctcgatgttgaacagaacaactggggcaacctcgatttcgctactggccgtatcgactataccgacgacgaccacgatggcgtccaaacctcagtcgccccaccgaggaaaatcattgggacctcaggactggcatcttgcacgggcgtcgtgatcctcacggcgactcgcgccgtcgtggcacactactcgaccgggtttgtcggggacgacttcggagactacctccagcagaaccagaacgaccttcaaaacggaagggcgtgggtcatgcactgccgccgcgatcccaacgcagttaatccagatgaggaatgcgacgaaaccttgggaagacagctatcttccatcctgcaagacaagttggggatgcccgaggccagcatccaaatgctcatgtacaaaccacctccggtgcatctgccacccaatgatacgtggggcaatcgaggggaagggagtattctcgtggacgctcgcaactcgccggctaacccggctacggtgtatgctcaggattaccaacagctgtgagcctcgcacatattgttgttaattcagataactcgtctgtttttcaacaaagcatgtggattttcgcaagagcaataacttcgattccgatgtgcactagtagaaaggccatattcgacttgcttcggttcgtcctggcccttctaactatcctgaattggtctttaaaggtacatctgagtttttttgtgtggtttctatagcttttatttcttgtacataggcacacgtaatttgtctacgcgctcaggaagcgtttcgaggcagtcattatctctaggcaagccgcatgacatgccctgacttatgtggctagcaaattacgggttcacttccaacgagcataaaacggacggcttgacaaaggtttaactcaaatcctttgctctgaagaaatccgtagatcttgtgccgtagtcagttatatcgtgc

SEQ ID NO: 38935 - DNA, 699 bp, Muscodor strobelii
  misc_feature: SGI cDNA ID NO. 573539
  misc_feature: Encodes the peptide sequence at SEQ ID NO 38936
atggatcaaatatcattgaaccacgaggcatcggccggcgacacgcataagcaagtcgtcagcgaactcccgcccgaagtcgtccaatgtctagaaaacgcccgcttcctccatctagcaacatgcgtaggaaaccaacctcacatagcactgatgaactacacctatctgccctcgtcaccccactcctccaaacccgtcatagtcatgaccaccaacccctcgtccaagaaaacgaataatctcctcgagaacccgaatgtctccctcctcgtgcacgactgggtgtcccacaggccgccgacccagggacgtaggccgtctgggggctcacccggtcccgaacaccgatcgagtctcgccagcttgctgatcaacctgaacacgagtgccatgtcgagtatcagtgctacgatcaacggtactgcgaaattggtcgagcccgggtccgaggaagagaaattctacagggaagagcatctggagaataatacttttgactccgagggtgcggtacccttcaatagggagccccagaatgctcgggaagatggcggcagagagcgctttgttgctggtgaggaagtcagagtcatacttgttcatatcaaggatgtacggacgagtgactggaagggagttgtcaaggactgggtccttgaagatgggagtccggctacggtaaatggtgtgcgctga

SEQ ID NO: 38936 - protein, 232 aa, Muscodor strobelii
  misc_feature: SGI Peptide ID NO. 573539
  misc_feature (23)..(150): Pfam Id: PF01243 Pfam Desc: Pyridoxamine 5'-phosphate oxidase
  misc_feature (23)..(95): Pfam Id: PF01243 Pfam Desc: Pyridoxamine 5'-phosphate oxidase
  misc_feature (1)..(232): NCBI GI: 261353768 Blast Desc: conserved [Verticillium albo-atrum VaMs.102]
  misc_feature (3)..(232): NCBI GI: 85074725 Blast Desc: NCU00590 [Neurospora crassa OR74A] gi|28927543|gb|EAA36494.1| [Neurospora crassa OR74A] gi|38567317|emb|CAE76605.1| conserved [Neurospora crassa]
  misc_feature (1)..(230): NCBI GI: 46128623 Blast Desc: FG08689.1 [Gibberella zeae PH-1]
  misc_feature (1)..(231): NCBI GI: 145601442 Blast Desc: MGG_10319 [Magnaporthe grisea 70-15] gi|149211271|ref|XP_001523010.1| MGCH7_ch7g1096 [Magnaporthe grisea 70-15] gi|86197051|gb|EAQ71689.1| MGCH7_ch7g1096 grisea
  misc_feature (3)..(231): NCBI GI: 116192941 Blast Desc: CHGG_06188 [Chaetomium globosum CBS 148.51] gi|88182101|gb|EAQ89569.1| CHGG_06188 [Chaetomium globosum CBS 148.51]
  misc_feature (3)..(220): NCBI GI: 171684061 Blast Desc: protein product [Podospora anserina] gi|170941991|emb|CAP67643.1| protein product [Podospora anserina]
  misc_feature (1)..(222): NCBI GI: 154293232 Blast Desc: BC1G_14414 [Botryotinia fuckeliana B05.10] gi|150845559|gb|EDN20752.1| BC1G_14414 [Botryotinia fuckeliana B05.10]
  misc_feature (1)..(220): NCBI GI: 156061237 Blast Desc: SS1G_02761 [Sclerotinia sclerotiorum 1980] gi|154700165|gb|EDN99903.1| SS1G_02761 [Sclerotinia sclerotiorum 1980]
  misc_feature (6)..(220): NCBI GI: 119192198 Blast Desc: CIMG_00476 [Coccidioides immitis RS]
  misc_feature (6)..(222): NCBI GI: 225555288 Blast Desc: conserved [Ajellomyces capsulatus G186AR]
MDQISLNHEASAGDTHKQVVSELPPEVVQCLENARFLHLATCVGNQPHIALMNYTYLPSSPHSSKPVIVMTTNPSSKKTNNLLENPNVSLLVHDWVSHRPPTQGRRPSGGSPGPEHRSSLASLLINLNTSAMSSISATINGTAKLVEPGSEEEKFYREEHLENNTFDSEGAVPFNREPQNAREDGGRERFVAGEEVRVILVHIKDVRTSDWKGVVKDWVLEDGSPATVNGVR

SEQ ID NO: 38937 - DNA, 1235 bp, Muscodor strobelii
  misc_feature: SGI EST ID NO. CUFF.93618.0
  misc_feature: Variant of the nucleotide sequence at SEQ ID NO 38935
ctgaattctagttttgagaatctgcatgtcgctatttccagattactcaattcgtacatagcgattgaccgatattcgttcatctttctttccgagaatcgcgcacgtggcttccactgagtcttcctgatatgtcatataatttttgtcctgtcgagcccgttgtcccaccgcaaacccgtctcagtggcccgagcttctcaggaatgctcaaggttcgtcatagctagctccccaagctgcccctccaacatccacccacgacaagaatcactacaacacaaacaaaacagacagcacataatggatcaaatatcattgaaccacgaggcatcggccggcgacacgcataagcaagtcgtcagcgaactcccgcccgaagtcgtccaatgtctagaaaacgcccgcttcctccatctagcaacatgcgtaggaaaccaacctcacatagcactgatgaactacacctatctgccctcgtcaccccactcctccaaacccgtcatagtcatgaccaccaacccctcgtccaagaaaacgaataatctcctcgagaacccgaatgtctccctcctcgtgcacgactgggtgtcccacaggccgccgacccagggacgtaggccgtctgggggctcacccggtcccgaacaccgatcgagtctcgccagcttgctgatcaacctgaacacgagtgccatgtcgagtatcagtgctacgatcaacggtactgcgaaattggtcgagcccgggtccgaggaagagaaattctacagggaagagcatctggagaataatacttttgactccgagggtgcggtacccttcaatagggagccccagaatgctcgggaagatggcggcagagagcgctttgttgctggtgaggaagtcagagtcatacttgttcatatcaaggatgtacggacgagtgactggaagggagttgtcaaggactgggtccttgaagatgggagtccggctacggtaaatggtgtgcgctgatttgaaatatggggaaatgacgacacgaagaatcctcaaagtatgtgttagagctgtaaaggctcaatattttgtcgggatgataccctgcttgacgttattatacgaacttgtcatgcagtgttccgacatttgaagaacggtagtctataaccgacagatggttatcaataaatgaggattagcaaatgtgtaataatgagaataataaagtcaaaattacctacccccac

SEQ ID NO: 38938 - DNA, 2133 bp, Muscodor strobelii
  misc_feature: SGI cDNA ID NO. 573540
  misc_feature: Encodes the peptide sequence at SEQ ID NO 38939
atgcgctccgtcaaacccagatacttacgccgtcgggcgttcctgcgctatagcagcacatcctcgcaaccccagattacacccatcacatccctcctcatagcaaatcgcggagagatcgctctccgcattaacaagaccgcaaaacgcctgggaatccagacaacgactttgtacaccgatccagatgcctcatcacaacatgctacgtgtacaccccactcaattggcttgggagctgcaaatggatacctagatggtgaccggatagtcagactagcaaagcagcatggaatacaggcattgcaccctgggtatggcttcttatccgagaactctgcttttgcgaagaagtgcgagcaggagggcatcgtctttgttggtccgccagctcaggcaatggcggacatgggagacaaagccagaagtaaggagatcatgaccaaagccggagttccctgtgttccgggttatcacggatcagatcaaggagaggcggaactactcaaccacgcaaagagtattaagtttcccgttctactcaagagtgtaaagggtggtggcggtaagggtatgcgcattgtcatggaagagcaagagttcctccaacagctcaagagtgcccgtgccgaggcccgagcttcgtttggtgagggaggtgaagtgatgctggtggagaagtacatcacccggccgagacacgtcgaggtccaggtctttgccgataaacatggcaactgcgtagcgctcggcgaacgtgattgcagtgtgcaaagacggcatcaaaagattcttgaagaatcaccagctccaaatctagatgacgcgacacgcttagacctatgggagaaagctcgcatggctgcctcggccgtgggctatgtgggagccggcacggtggagttcatcctcgacaaagattctggcgaattctactttatggagatgaacacacgtcttcaggtggaacatccagttagcgagatggtcactggcacagacttggtggagtggcaattcagagtagcagctggagagaagctacccttgacacaggaggagatcatgcagaggataaaagaaaggggtgccgccatcgaggctcgtatatatgccgagaaccctgagcgcggtttcttgcccgattccggaaatctcgtccatctcaagacaccgttgacggacgaggatatacggatagatgctggtttcgtcgaaggcgacgtcgtttcggatgcatacgatggtatgatagcgaaactcatcgttcgaggtgacgatcgcgaaacagcgatcagaaaaatggaactggctttacggaactacgaagttgtcggtttcagcacgaacatcgagtttctcaagaggttatgcaaatcacccgctttcatcgaaggtgacgtcgagacggggtttatcgagaaatggaagagcgagctctttgatccgataatagtcaaacccgaagtctatgtacaggcggctctaggtatctctgccacatcacccgaggcctctgcccacccacacggtggatcactgggctttggccagggcaacagtgagcggaagttcttctttaagtcactcgaccccttgaatgagaaggaaggagaggtggtagaagtcagtctcttacagaagaacaaccagctctatgatgccaaagttacccgcaaaggtgaagatgcctacatcttcgaggatctcgtttcttctgtctctgcgaactctgacaagtcgagcttggaaacttttttcccagatacgaggctagagacaactgtcgtacaagacaagaataacgacaataagattacgatcttccagctcggcgggaaaacggagctgtctcttgtatcaccgacgtggtatgagaaagctctcggtctgaaggaggtcactgcttccgtggctgctcccatgccgtgcaagatcctgaagaatgaagtacaagaaggtgataccgtggtcaagggtgcacctctcgtcgttattgagtctatgaagatggagacagtcattcgctcaccgcaggatggcgttatcaagcggttagcccacaaggagggcgacaaatgtaaagctggcaccgtactggttgttttcgaggaggagggcgctaccgagtag

SEQ ID NO: 38939 - protein, 710 aa, Muscodor strobelii
  misc_feature: SGI Peptide ID NO. 573540
  misc_feature (139)..(319): Pfam Id: PF02222 Pfam Desc: ATP-grasp domain
  misc_feature (367)..(474): Pfam Id: PF02785 Pfam Desc: Biotin carboxylase C-terminal domain
  misc_feature (636)..(703): Pfam Id: PF00364 Pfam Desc: Biotin-requiring enzyme
  misc_feature (28)..(137): Pfam Id: PF00289 Pfam Desc: Carbamoyl-phosphate synthase L chain, N-terminal domain
  misc_feature (139)..(356): Pfam Id: PF02786 Pfam Desc: Carbamoyl-phosphate synthase L chain, ATP binding domain
  misc_feature (138)..(319): Pfam Id: PF01071 Pfam Desc: Phosphoribosylglycinamide synthetase, ATP-grasp (A) domain
  misc_feature (21)..(705): NCBI GI: 85074727 Blast Desc: methylcrotonoyl-CoA carboxylase alpha chain, mitochondrial precursor [Neurospora crassa OR74A] gi|28927544|gb|EAA36495.1| methylcrotonoyl-CoA carboxylase alpha
  misc_feature (10)..(708): NCBI GI: 116192939 Blast Desc: CHGG_06187 [Chaetomium globosum CBS 148.51] gi|88182100|gb|EAQ89568.1| CHGG_06187 [Chaetomium globosum CBS 148.51]
  misc_feature (6)..(709): NCBI GI: 171684063 Blast Desc: protein product [Podospora anserina] gi|170941992|emb|CAP67644.1| protein product [Podospora anserina]
  misc_feature (1)..(703): NCBI GI: 261353769 Blast Desc: methylcrotonoyl-CoA carboxylase subunit alpha [Verticillium albo-atrum VaMs.102]
  misc_feature (6)..(705): NCBI GI: 46128621 Blast Desc: FG08688.1 [Gibberella zeae PH-1]
  misc_feature (25)..(703): NCBI GI: 256734127 Blast Desc: [Nectria haematococca mpVI 77-13-4]
  misc_feature (32)..(710): NCBI GI: 145601444 Blast Desc: MGG_10320 [Magnaporthe grisea 70-15] gi|145009511|gb|EDJ94178.1| MGG_10320 [Magnaporthe grisea 70-15]
  misc_feature (32)..(710): NCBI GI: 86197052 Blast Desc: MGCH7_ch7g1097 [Magnaporthe grisea 70-15]
  misc_feature (32)..(710): NCBI GI: 149211275 Blast Desc: MG10320.4 [Magnaporthe grisea 70-15]
  misc_feature (70)..(705): NCBI GI: 156040880 Blast Desc: SS1G_11418 [Sclerotinia sclerotiorum 1980] gi|154695802|gb|EDN95540.1| SS1G_11418 [Sclerotinia sclerotiorum 1980]
  misc_feature (6)..(706): SWISSPROT Homolog: EC 6.4.1.4 Methylcrotonoyl-CoA carboxylase
MRSVKPRYLRRRAFLRYSSTSSQPQITPITSLLIANRGEIALRINKTAKRLGIQTTTLYTDPDASSQHATCTPHSIGLGAANGYLDGDRIVRLAKQHGIQALHPGYGFLSENSAFAKKCEQEGIVFVGPPAQAMADMGDKARSKEIMTKAGVPCVPGYHGSDQGEAELLNHAKSIKFPVLLKSVKGGGGKGMRIVMEEQEFLQQLKSARAEARASFGEGGEVMLVEKYITRPRHVEVQVFADKHGNCVALGERDCSVQRRHQKILEESPAPNLDDATRLDLWEKARMAASAVGYVGAGTVEFILDKDSGEFYFMEMNTRLQVEHPVSEMVTGTDLVEWQFRVAAGEKLPLTQEEIMQRIKERGAAIEARIYAENPERGFLPDSGNLVHLKTPLTDEDIRIDAGFVEGDVVSDAYDGMIAKLIVRGDDRETAIRKMELALRNYEVVGFSTNIEFLKRLCKSPAFIEGDVETGFIEKWKSELFDPIIVKPEVYVQAALGISATSPEASAHPHGGSLGFGQGNSERKFFFKSLDPLNEKEGEVVEVSLLQKNNQLYDAKVTRKGEDAYIFEDLVSSVSANSDKSSLETFFPDTRLETTVVQDKNNDNKITIFQLGGKTELSLVSPTWYEKALGLKEVTASVAAPMPCKILKNEVQEGDTVVKGAPLVVIESMKMETVIRSPQDGVIKRLAHKEGDKCKAGTVLVVFEEEGATE

SEQ ID NO: 38940 - DNA, 2593 bp, Muscodor strobelii
  misc_feature: SGI EST ID NO. CUFF.93624.0
  misc_feature: Variant of the nucleotide sequence at SEQ ID NO 38938
tgcgcctgacctttgacgttttcttctcccttccaactgttactgcctcttagtttctatgttttgataccctcatactgtcaattgagtcgtaaagagcatactatacccatcatgcgctccgtcaaacccagatacttacgccgtcgggcgttcctgcgctatagcagcacatcctcgcaaccccagattacacccatcacatccctcctcatagcaaatcgcggagagatcgctctccgcattaacaagaccgcaaaacgcctgggaatccagacaacgactttgtacaccgatccagatgcctcatcacaacatgctacgtgtacaccccactcaattggcttgggagctgcaaatggatacctagatggtgaccggatagtcagactagcaaagcagcatggaatacaggcattgcaccctgggtatggcttcttatccgagaactctgcttttgcgaagaagtgcgagcaggagggcatcgtctttgttggtccgccagctcaggcaatggcggacatgggagacaaagccagaagtaaggagatcatgaccaaagccggagttccctgtgttccgggttatcacggatcagatcaaggagaggcggaactactcaaccacgcaaagagtattaagtttcccgttctactcaagagtgtaaagggtggtggcggtaagggtatgcgcattgtcatggaagagcaagagttcctccaacagctcaagagtgcccgtgccgaggcccgagcttcgtttggtgagggaggtgaagtgatgctggtggagaagtacatcacccggccgagacacgtcgaggtccaggtctttgccgataaacatggcaactgcgtagcgctcggcgaacgtgattgcagtgtgcaaagacggcatcaaaagattcttgaagaatcaccagctccaaatctagatgacgcgacacgcttagacctatgggagaaagctcgcatggctgcctcggccgtgggctatgtgggagccggcacggtggagttcatcctcgacaaagattctggcgaattctactttatggagatgaacacacgtcttcaggtggaacatccagttagcgagatggtcactggcacagacttggtggagtggcaattcagagtagcagctggagagaagctacccttgacacaggaggagatcatgcagaggataaaagaaaggggtgccgccatcgaggctcgtatatatgccgagaaccctgagcgcggtttcttgcccgattccggaaatctcgtccatctcaagacaccgttgacggacgaggatatacggatagatgctggtttcgtcgaaggcgacgtcgtttcggatgcatacgatggtatgatagcgaaactcatcgttcgaggtgacgatcgcgaaacagcgatcagaaaaatggaactggctttacggaactacgaagttgtcggtttcagcacgaacatcgagtttctcaagaggttatgcaaatcacccgctttcatcgaaggtgacgtcgagacggggtttatcgagaaatggaagagcgagctctttgatccgataatagtcaaacccgaagtctatgtacaggcggctctaggtatctctgccacatcacccgaggcctctgcccacccacacggtggatcactgggctttggccagggcaacagtgagcggaagttcttctttaagtcactcgaccccttgaatgagaaggaaggagaggtggtagaagtcagtctcttacagaagaacaaccagctctatgatgccaaagttacccgcaaaggtgaagatgcctacatcttcgaggatctcgtttcttctgtctctgcgaactctgacaagtcgagcttggaaacttttttcccagatacgaggctagagacaactgtcgtacaagacaagaataacgacaataagattacgatcttccagctcggcgggaaaacggagctgtctcttgtatcaccgacgtggtatgagaaagctctcggtctgaaggaggtcactgcttccgtggctgctcccatgccgtgcaagatcctgaagaatgaagtacaagaaggtgataccgtggtcaagggtgcacctctcgtcgttattgagtctatgaagatggagacagtcattcgctcaccgcaggatggcgttatcaagcggttagcccacaaggagggcgacaaatgtaaagctggcaccgtactggttgttttcgaggaggagggcgctaccgagtagatgacgatttagacaaatgtgacgcagcggaacgaatgatcaatcatggcgtatggcgtatggcgtatgggaacaatgataaacgcatttacaatctgtaaatatctcgcgtgcattacaattgagtcaataactacctcggttcacgatttctcaccatctaccttccatactcaggcgacacacagcttgagttagctagccactccattcataacagcagtatgacgttcgatgctcttttgtagcatggctcagcggtatgttctactgcaatggttagtggcttaagtttcatataaagttcattagtacaccaatcacaacacggcattcatctggtagc

SEQ ID NO: 38941 - DNA, 366 bp, Muscodor strobelii
  misc_feature: SGI cDNA ID NO. 573541
  misc_feature: Reduced expression when VOC is produced
  misc_feature: Encodes the peptide sequence at SEQ ID NO 38942
atggtcgttaaaataagactcgcccgattcgggcgcaaaaacacaccgttctacaacatagtcgtcgcacacgccaggacggcacgcaacagcaagccgttggaagtcatcggcacctacgacccggtccccaagccggacccctacgacgattctgggaggcttcacaaggatatcaagttagattcaacgagagcacgatactggattggtgtgggtgcacagccgacggatgttgtttggagattactatctatggttggaataatggagcctaaatatcgtgataccaaaccccgaacaccacccgccatgccgggcgcagcagccgccgagtcaagcacaccaccaaccaccagccaataa

SEQ ID NO: 38942 - protein, 121 aa, Muscodor strobelii
  misc_feature: SGI Peptide ID NO. 573541
  misc_feature (9)..(77): Pfam Id: PF00886 Pfam Desc: Ribosomal protein S16
  misc_feature (1)..(113): NCBI GI: 170940353 Blast Desc: protein product [Podospora anserina]
  misc_feature (1)..(99): NCBI GI: 85068420 Blast Desc: mitochondrial ribosomal protein S16 [Neurospora crassa OR74A] gi|133887|sp|P08580.2|RT16_NEUCR RecName: Full=Ribosomal protein S16, mitochondrial; AltName: Full=S24 cyt-21 [Neurospora
  misc_feature (1)..(93): NCBI GI: 256727658 Blast Desc: [Nectria haematococca mpVI 77-13-4]
  misc_feature (1)..(107): NCBI GI: 116194109 Blast Desc: CHGG_06772 [Chaetomium globosum CBS 148.51] gi|88182685|gb|EAQ90153.1| CHGG_06772 [Chaetomium globosum CBS 148.51]
  misc_feature (1)..(93): NCBI GI: 46135845 Blast Desc: FG09438.1 [Gibberella zeae PH-1]
  misc_feature (1)..(94): NCBI GI: 261353786 Blast Desc: mitochondrial ribosomal protein S16 [Verticillium albo-atrum VaMs.102]
  misc_feature (1)..(103): NCBI GI: 145610288 Blast Desc: MGG_02598 [Magnaporthe grisea 70-15] gi|145017625|gb|EDK01988.1| MGG_02598 [Magnaporthe grisea 70-15]
  misc_feature (1)..(95): NCBI GI: 189192348 Blast Desc: mitochondrial ribosomal protein s24 [Pyrenophora tritici-repentis Pt-1C-BFP] gi|187974119|gb|EDU41618.1| mitochondrial ribosomal protein s24 [Pyrenophora tritici-repentis
  misc_feature (1)..(95): NCBI GI: 169600025 Blast Desc: SNOG_02842 [Phaeosphaeria nodorum SN15] gi|111068453|gb|EAT89573.1| SNOG_02842 [Phaeosphaeria nodorum SN15]
  misc_feature (1)..(103): NCBI GI: 149209663 Blast Desc: MGCH7_ch7g314 [Magnaporthe grisea 70-15] gi|86196269|gb|EAQ70907.1| MGCH7_ch7g314 [Magnaporthe grisea 70-15]
  misc_feature: Useful for introducing or modulating the production of volatile compounds
MVVKIRLARFGRKNTPFYNIVVAHARTARNSKPLEVIGTYDPVPKPDPYDDSGRLHKDIKLDSTRARYWIGVGAQPTDVVWRLLSMVGIMEPKYRDTKPRTPPAMPGAAAAESSTPPTTSQ

SEQ ID NO: 38943 - DNA, 934 bp, Muscodor strobelii
  misc_feature: SGI EST ID NO. CUFF.93688.3
  misc_feature: Variant of the nucleotide sequence at SEQ ID NO 38941
caagcttcatcaccaccaaccacaacacaacaccatggtcgttaaaataagactcgcccgattcgggcgcaaaaacacaccgttctacaacatagtcgtcgcacacgccaggacggcacgcaacagcaagccgttggaagtcatcggcacctacgacccggtccccaagccggacccctacgacgattctgggaggcttcacaaggatatcaagttagattcaacgagagcacgatactggattggtgtgggtgcacagccgacggatgttgtttggagattactatctatggttggaataatggagcctaaatatcgtgataccaaaccccgaacaccacccgccatgccgggcgcagcagccgccgagtcaagcacaccaccaaccaccagccaataagcactctgtagggagacaatgacaaacttgccatcggttcctcacactgccgaatgaattttcaggctacataccactatctgtcacaaaactacttgtacaaagcattgaaaaggcgtcggcgaacatattcgagaggttgtaagatagggaaacgaaactagatggccgaggtttgcgcgaccagcatatgagaagcctcgaccgataaagccaatcggcggctactgtccgaggacttaaggaagtgtcatggccagaaaaggccggagataaggcatatcaagaactagattgggatacgggcgacaggaataatcgcttgacttgagtactcgtctatgtacattaggtggaacgtatattaaatccgcttgaaacagcaacttcaagacaccatcttcaaacttcgaacccggtttcaccaactgtgccatcaaagctgtgtggttcttacgttaacaagtatacatcactctttttgtccatagtacagacgcatcaagagactagccaaaaaattgtatatccttg

SEQ ID NO: 38944 - DNA, 786 bp, Muscodor strobelii
  misc_feature: SGI cDNA ID NO. 573542
  misc_feature: Encodes the peptide sequence at SEQ ID NO 38945
atggccttaaaggtatgtcggcaaagtggagctcccgcgaagacttacacccggtgtccggacgcctcacttgcaaccgctaaacagaccctctccgccaaggccgccgccgccttggacaaggagctcatgagcaccggagccttttccattgaccagctcatggagcttgccgggctggctgtttctcaagtcgtcttccaggttcatccaccgttcaaaggtgaccgtgtacttgttgcatgtggtcccggcaacaatggtggtgatgggctcgtcgctgctcgtcatcttcgccattacggctataggccgaccatttactaccccaagcgcagcaagaatgagctctaccaacgcttggcgaagcagctggaagatctcgaggtaccgtttgttgacgacttcaactcggccatgtcgacaaccgatcacattgtcgatgcggtcttcggctttagtttctccggcgaagtccgtgaaccttttccggctgtcatcaaagctttcgaagagacagatttgccggtcacctcggtcgacgctccgtcttcctggaatatcgaaagtggcccgccagagtcaggtctaggaagcaagtttaatcctgcattcctgattagtctcactgcacccaaaccacttgtaaagcatttcagaggcaggcatttcattggagggcgctttgtttccccagcaatcgcaaagaaatatgactttgaggttccagcgtatcaggggctcgaccaaatagtcgaagttggtgtcgacaaccaaaagctgtag

SEQ ID NO: 38945 - protein, 261 aa, Muscodor strobelii
  misc_feature: SGI Peptide ID NO. 573542
  misc_feature (47)..(213): Pfam Id: PF03853 Pfam Desc: YjeF-related protein N-terminus
  misc_feature (27)..(259): NCBI GI: 85068418 Blast Desc: NCU08070 [Neurospora crassa OR74A] gi|28927006|gb|EAA35965.1| [Neurospora crassa OR74A]
  misc_feature (44)..(261): NCBI GI: 256727077 Blast Desc: [Nectria haematococca mpVI 77-13-4]
  misc_feature (44)..(261): NCBI GI: 46135847 Blast Desc: FG09439.1 [Gibberella zeae PH-1]
  misc_feature (29)..(261): NCBI GI: 169600027 Blast Desc: SNOG_02843 [Phaeosphaeria nodorum SN15] gi|160705363|gb|EAT89574.2| SNOG_02843 [Phaeosphaeria nodorum SN15]
  misc_feature (27)..(261): NCBI GI: 189192346 Blast Desc: meiotically up-regulated gene 182 protein [Pyrenophora tritici-repentis Pt-1C-BFP] gi|187974118|gb|EDU41617.1| meiotically up-regulated gene 182 protein [Pyrenophora Pt-1C-BFP]
  misc_feature (29)..(230): NCBI GI: 149209661 Blast Desc: MGCH7_ch7g313 [Magnaporthe grisea 70-15] gi|86196268|gb|EAQ70906.1| MGCH7_ch7g313 [Magnaporthe grisea 70-15]
  misc_feature (27)..(260): NCBI GI: 156040882 Blast Desc: SS1G_11419 [Sclerotinia sclerotiorum 1980] gi|154695803|gb|EDN95541.1| SS1G_11419 [Sclerotinia sclerotiorum 1980]
  misc_feature (7)..(260): NCBI GI: 240109721 Blast Desc: YjeF-related protein N-terminus domain containing protein [Coccidioides posadasii C735 delta SOWgp]
  misc_feature (27)..(257): NCBI GI: 225683348 Blast Desc: yjeF-related protein [Paracoccidioides brasiliensis Pb03]
  misc_feature (27)..(257): NCBI GI: 238839165 Blast Desc: AI-BP family protein [Microsporum canis CBS 113480]
MALKVCRQSGAPAKTYTRCPDASLATAKQTLSAKAAAALDKELMSTGAFSIDQLMELAGLAVSQVVFQVHPPFKGDRVLVACGPGNNGGDGLVAARHLRHYGYRPTIYYPKRSKNELYQRLAKQLEDLEVPFVDDFNSAMSTTDHIVDAVFGFSFSGEVREPFPAVIKAFEETDLPVTSVDAPSSWNIESGPPESGLGSKFNPAFLISLTAPKPLVKHFRGRHFIGGRFVSPAIAKKYDFEVPAYQGLDQIVEVGVDNQKL

SEQ ID NO: 38946 - DNA, 3801 bp, Muscodor strobelii
  misc_feature: SGI EST ID NO. CUFF.93687.1
  misc_feature: Variant of the nucleotide sequence at SEQ ID NO 38944
caaggatatacaattttttggctagtctcttgatgcgtctgtactatggacaaaaagagtgatgtatacttgttaacgtaagaaccacacagctttgatggcacagttggtgaaaccgggttcgaagtttgaagatggtgtcttgaagttgctgtttcaagcggatttaatatacgttccacctaatgtacatagacgagtactcaagtcaagcgattattcctgtcgcccgtatcccaatctagttcttgatatgccttatctccggccttttctggccatgacacttccttaagtcctcggacagtagccgccgattggctttatcggtcgaggcttctcatatgctggtcgcgcaaacctcggccatctagtttcgtttccctatcttacaacctctcgaatatgttcgccgacgccttttcaatgctttgtacaagtagttttgtgacagatagtggtatgtagcctgaaaattcattcggcagtgtgaggaaccgatggcaagtttgtcattgtctccctacagagtgcttattggctggtggttggtggtgtgcttgactcggcggctgctgcgcccggcatggcgggtggtgttcggggtttggtatcacgatatttaggctccattattccaacctgtagatggacaatcagtcaatgtgacatcgatcttgatataggtagagatggcaagggcataataatagcaacggcgcatggaaatatcaaggtcacgtggatgaaggtgtcgaaactgcgtaccatagatagtaatctccaaacaacatccgtcggctgtgcacccacaccaatccagtatcgtgctctcgttgaatctaacttgatatccttgtgaagcctcccagaatcgtcgtaggggtccggcttggggaccgggtcgtaggtgccgatgacttccaacggcttgctgttgcgtgccgtcctggcgtgtgcgacgactatgttgtagaacggtgtgtttttgcgcccgaatcgggcgagtcttattttaacgaccatggtgttgtgttgtggttggtggtgatgaagcttgatcaaagtgtcttgtctctgaagctgaaatgctggtcgcgacaatttttggtggggacgggtcgcagttgactttccccagccaatcagctgagatttccccgtcatctctattctgaccaatcaagcgataggactaccacccgtattgagggcagtgatgtcaagcagtgatgtcaattgcgcgaggcctcatgccatgtttacaatgctatcgtgccccctcctggctttcgcatatactcctcattgcgtattattcatatcgaatatctttgactacaaatcaccgtcgaagtattgaattccgatggccttaaaggccgccgccgccttggacaaggagctcatgagcaccggagccttttccattgaccagctcatggagcttgccgggctggctgtttctcaagtcgtcttccaggttcatccaccgttcaaaggtgaccgtgtacttgttgcatgtggtcccggcaacaatggtggtgatgggctcgtcgctgctcgtcatcttcgccattacggctataggccgaccatttactaccccaagcgcagcaagaatgagctctaccaagtatgtacccatatctatgtagtctaccaccaccgtcttacattggctgcctgagccatctatttatgttgccccagcatgaacgccttatcttacagtccggtataatcccaatattatataagtttcaacgtgccaggcgccccgtctgctttctcgaactcagtcctcctctttctctcgtttcgatctattaatgttcgctcttgttgtaaatgctgtctcttcgagaaccgacccattttaacccctgcatagcgcttggcgaagcagctggaagatctcgaggtaccgtttgttgacgacttcaactcggccatgtcgacaaccgatcacattgtcgatgcggtcttcggctttagtttctccggcgaagtccgtgaaccttttccggctgtcatcaaagctttcgaagagacagatttgccggtcacctcggtcgacgctccgtcttcctggaatatcgaaagtggcccgccagagtcaggtctaggaagcaagtttaatcctgcattcctgattagtctcactgcacccaaaccacttgtaaagcatttcagaggcaggcatttcattggagggcgctttgtttccccagcaatcgcaaagaaatatgactttgaggttccagcgtatcaggggctcgaccaaatagtcgaagttggtgtcgacaaccaaaagctgtagtcctgactatgaccttgcagagttatgtcctccttatggataagagttggtccccccttttgtgtcaactaacctgacagccgccggtgcgactatacggacaaacaggactaggacaccgtccttcttgcatgatttcgtgctctcgaacggttcctctcgggcagcgtaaaagtggtggatgataagaccggcagaaatggacaaatatcagatataccttcccgcacacagggcattctgagatgtgctcagtgcacattaaaggcgtcgacagcttcgtcgtggctgtatgagtcgtggatgatataaacgttctcgagacgtccctagaaggacaactatagggactgatgaaaatgaacgtagcattcgaagacttgtggctggattacagctagatgtgtggctttattccatagggcttgggatagagtgttcaaatagcacgaagaggcttgatatcgccaggcactttgttgatcgtctccggaatataggaagcgaatggcccacctcttgtgatacttggtgctatgggactgtgctgtggcaatatgcagctgcagggcaccaaggaagtaacctgacagcacccaaccagggccacacgcaaatcaagaatggaaacgggaatgttttcatcgcttctgaaacatttagcagcgaggtatttggcagcctgctttctccattttgtgtcgaacaactttttttcttgttgctaattgttatgtggtgagcccggagcaaatgctccgcagcggctccgaccgcttaccccttagcagctcgtcgttaacgttattcttctctaccgggcttctctcagtattctagatcattttgggggtccgatcgtcctcagtattctgcagtcttttcatcggcccattgttacccatggatttgtttagcatgcacatgggcagtcataatctgctcctgccgctgtcatgtccacctcaattaccaagcaccactaccaatgccttgcgtctaatatttgggcgctcaccaccgttccattcacagcccgtcccatcgctagcagcagtctgccccggatgaatgataataattcggaacaaatactccccggagctcctaatatgtacatattttgtcggcagtatgcaagctgttttcgaacaattttgtagtcgcgtgagattaggagctagtacaacgtggtttgtaaatccagggttcaacgccgaacgccacatcatttcgagatcccacttatccatgcgctgctgtggcttacgggcatcgatcccagctcctccaacccaatgaattcaccagctatacgggacattgaggcctcaaccggcaataagttgaaagtcgcatgaacctcgcgttacagatcctcagttacattgtcgagcaagcgacatgtcatgggatcatggcccatttgccactaagggaactctcagtcatccctaggcgagtcaaaccagatcgga

SEQ ID NO: 38947 - DNA, 2823 bp, Muscodor strobelii
  misc_feature: SGI cDNA ID NO. 573543
  misc_feature: Encodes the peptide sequence at SEQ ID NO 38948
atggtggctaatcgcttgcaggcggccgccttaaaccactgccataaggcgacagtacttggcaatatcatcgctatccacatgcttgagtaccttacgactgcgtctttgaatcaagatgggctcaataggcttgcacacgacttcatggaggtctgcaaaattatgtggtcgatcgaagctggtctaatcgagttctcgcgcaaacatcagactttgcccctggacatgacacaagaattggatcgtaagttccaaacggcacacagcgactttcaagccttggaccactggctgtcgcgatcgctcgcagatgagcggaaaggaaaacttagtaaaagtctgaagagaatgttcacgggtaatgagataccgagaatgagagaagctctcggcaagacaagagaagccttgagaatgagtgccctcatgttccaatggtctctcggggatagcaagatcgacgagtcgctcggaattggctacacagcgttggaggcggccttggatagaatggaaaatggatcgtcgagcaagcctgcgtcatcgaatggttctacaacaagagttgcatcgcagccatcacaaccatcacaaccgacgctgccgccaacgccacctgctgagtttcctcgcgaaattcaccatcctgaagttcacgatgatagacatcacacttcatcgccaacagctacacggacgactaacgatgattcgaggggcaccaggcgctcgtcattgtcccttcccattttcgcctttccgcctcgcgaggacagtatggctcggcccatggacttgcgagcggactcgacctggacaggctcggatcatattgactatcattctccccttgtgccgaaatcgccatctactcaccggacagacacgatttcaacacgcagcgtcttcagtggagtcacttcgtcgcctatggatgggttcaaggatctttcgtccagctgtctctcagaaatcgaaagtctctacttgggtgactcgccagagcatgggtcaaagaagcagtccaaacctgttcgcttgtctgcgaacccaacaaagatgcctagatgggcccccagaaactcgattggagcagagacaccttcactgagagctgaacttatcgccgccattcgggatggaagccagaaagtagtcgaacagctgctcgatcgcggcgtatctccaagcgcagacggcaaccaccatcccctgaatctagccattcgccatcacgatatagaaacggttcgtctgcttctgctcttcggcgccgattcaaatacaccagacacagacaaagtcctgcccctgacagcagctgtcgaagagggcttcttggacgctgcagctattatgctgaagtatggagctgatacaaaccatgccgcaacgcctgactgtgactctgcattcacgtctgccatcatcaaaggcgacactcactttctccgcctattcctcatatatggagccgatgtaaactacgtgacagaaacggatggacagacagttctcacgaagatgatcagcaagacgcgtgacatcttccaaatcgacatagttctcaactacggcgctgatcccaataccaagagcaaagtgggaaacagtccgctcttccaagcagtcactgctggtcgcgctgatatcacaacttcacttctaaatgccggagcgaatcctaacctacccgggccgaagcatgttctctggccatccacataccaaccggcgtgtctcaaggtcatgcttgcccgcggggccgacgtgaaaaaggctccaggaatcatggaactggctacgtcaatcaacaacatcgagtctgtccaggttctgctcaaggctggcgtaaaccccaacatcaagaaagacagcacttacactccgctgtgctcctctataagagacaaccgccccgatatcttccacctgttactggccaatggcgcagaccctaatgttcctgctgccgaatacccgtgtttcaagtgtgtaacccacaaccggccgcatttcctgccatttcttgttgatgctggcgccaatctcaattcgcctagaggcattgtggagacggcagtcaagcacaacaacatggaagccttggaatggctgctagagcacggagtatctccaaacgacgcagcaccagaaacaaaggccacaccacttacaacggcaattcaactgaacaagcccgagctagtggatttcctactctccaaaggagccaaccccaacgttcgcggccaagactggccggtttgcatggcagtcaagcatcccaaaatcctcaagcgtctgctgccagccctcgcccaaccccgagcattcaaaggtgtcatggaaatggcagtatcagccgacgagctcgagtccgtaaaactgctcctcgcagcaggtgtctcggtcgaggatcgcaacggtggcgtattcagccccttgaccaccgcgattcgcgagcgacacaaggagatcgttagatacctcctagacgaggccgacgccgatcccaacgcacccggcgagcatctgcctatcgtcaaggcattgagacgctacgaggcaccagataccgaaatcatcgaaatgttacttgccaagggtgcagatcctaacaaggtttaccgtggccataacgcaatcatacaagcaatcgaaatgggcgacgcggcaatcctgcgcatgctcatcgagaagtggggtgtcgatgtcacggcgatcgatgacagtggaaggacgccaattgaaatcgcagagatacgcggttgggatgagggcaaagatattttgataggcgggaaaaaggccgtgtga

SEQ ID NO: 38948 - protein, 940 aa, Muscodor strobelii
  misc_feature: SGI Peptide ID NO. 573543
  misc_feature (536)..(568): Pfam Id: PF00023 Pfam Desc: Ankyrin repeat
  misc_feature (721)..(753): Pfam Id: PF00023 Pfam Desc: Ankyrin repeat
  misc_feature (814)..(845): Pfam Id: PF00023 Pfam Desc: Ankyrin repeat
  misc_feature (4)..(933): NCBI GI: 154311072 Blast Desc: BC1G_06654 [Botryotinia fuckeliana B05.10] gi|150851058|gb|EDN26251.1| BC1G_06654 [Botryotinia fuckeliana B05.10]
  misc_feature (127)..(933): NCBI GI: 156034629 Blast Desc: SS1G_13249 [Sclerotinia sclerotiorum 1980] gi|154698653|gb|EDN98391.1| SS1G_13249 [Sclerotinia sclerotiorum 1980]
  misc_feature (343)..(933): NCBI GI: 46104668 Blast Desc: FG00140.1 [Gibberella zeae PH-1]
  misc_feature (28)..(934): NCBI GI: 189193859 Blast Desc: ankyrin repeat domain containing protein [Pyrenophora tritici-repentis Pt-1C-BFP] gi|187978832|gb|EDU45458.1| ankyrin repeat domain containing protein [Pyrenophora tritici-repentis
  misc_feature (355)..(934): NCBI GI: 238488245 Blast Desc: ankyrin repeat-containing protein, [Aspergillus flavus NRRL3357] gi|220697748|gb|EED54088.1| ankyrin repeat-containing protein, [Aspergillus flavus NRRL3357]
  misc_feature (355)..(913): NCBI GI: 169762462 Blast Desc: [Aspergillus oryzae RIB40] gi|83770159|dbj|BAE60292.1| protein product [Aspergillus oryzae]
  misc_feature (337)..(934): NCBI GI: 169602040 Blast Desc: SNOG_03898 [Phaeosphaeria nodorum SN15] gi|160706062|gb|EAT89103.2| SNOG_03898 [Phaeosphaeria nodorum SN15]
  misc_feature (343)..(938): NCBI GI: 145611674 Blast Desc: MGG_11634 [Magnaporthe grisea 70-15] gi|145018924|gb|EDK03203.1| MGG_11634 [Magnaporthe grisea 70-15]
  misc_feature (9)..(865): NCBI GI: 261361555 Blast Desc: ankyrin repeat and SOCS box protein [Verticillium albo-atrum VaMs.102]
  misc_feature (7)..(836): NCBI GI: 145235105 Blast Desc: An03g03050 [Aspergillus niger] gi|134057880|emb|CAK44604.1| protein product [Aspergillus niger]
MVANRLQAAALNHCHKATVLGNIIAIHMLEYLTTASLNQDGLNRLAHDFMEVCKIMWSIEAGLIEFSRKHQTLPLDMTQELDRKFQTAHSDFQALDHWLSRSLADERKGKLSKSLKRMFTGNEIPRMREALGKTREALRMSALMFQWSLGDSKIDESLGIGYTALEAALDRMENGSSSKPASSNGSTTRVASQPSQPSQPTLPPTPPAEFPREIHHPEVHDDRHHTSSPTATRTTNDDSRGTRRSSLSLPIFAFPPREDSMARPMDLRADSTWTGSDHIDYHSPLVPKSPSTHRTDTISTRSVFSGVTSSPMDGFKDLSSSCLSEIESLYLGDSPEHGSKKQSKPVRLSANPTKMPRWAPRNSIGAETPSLRAELIAAIRDGSQKVVEQLLDRGVSPSADGNHHPLNLAIRHHDIETVRLLLLFGADSNTPDTDKVLPLTAAVEEGFLDAAAIMLKYGADTNHAATPDCDSAFTSAIIKGDTHFLRLFLIYGADVNYVTETDGQTVLTKMISKTRDIFQIDIVLNYGADPNTKSKVGNSPLFQAVTAGRADITTSLLNAGANPNLPGPKHVLWPSTYQPACLKVMLARGADVKKAPGIMELATSINNIESVQVLLKAGVNPNIKKDSTYTPLCSSIRDNRPDIFHLLLANGADPNVPAAEYPCFKCVTHNRPHFLPFLVDAGANLNSPRGIVETAVKHNNMEALEWLLEHGVSPNDAAPETKATPLTTAIQLNKPELVDFLLSKGANPNVRGQDWPVCMAVKHPKILKRLLPALAQPRAFKGVMEMAVSADELESVKLLLAAGVSVEDRNGGVFSPLTTAIRERHKEIVRYLLDEADADPNAPGEHLPIVKALRRYEAPDTEIIEMLLAKGADPNKVYRGHNAIIQAIEMGDAAILRMLIEKWGVDVTAIDDSGRTPIEIAEIRGWDEGKDILIGGKKAV

SEQ ID NO: 38949 - DNA, 515 bp, Muscodor strobelii
  misc_feature: SGI EST ID NO. CUFF.93631.0
  misc_feature: Variant of the nucleotide sequence at SEQ ID NO 38947
ccagccttcattggacccagatcttcatcgcttggatacccgtcatgctaaggatcgagtcctgattttcccacgaatgcatgaggctactgtaccatgcgcttggaatggatatgagagacaagtgggctaagcttgacgcttgccactctctgtgtctgccggtctagtgtaaggtgcataacaagcaatccgcccgcgctgttatgtttctaattgttaccggtcttgtttcttttcttgcgtttcatatctctacttgtctgcatagacatactttgagcgttgtgctgtggacgactagagaaaagctatcaatatggtggctaatcgcttgcaggcggccgccttaaaccactgccataaggcgacagtacttggcaatatcatcgctatccacatgcttgagtaccttacgactgcgtctttgaatcaagatgggctcaataggcttgcacacgacttcatggaggtctgcaaaattatgtggtcgatcgaagctggtctaatcgagt

SEQ ID NO: 38950 - DNA, 963 bp, Muscodor strobelii
  misc_feature: SGI cDNA ID NO. 573544
  misc_feature: Encodes the peptide sequence at SEQ ID NO 38951
atgcagccaagagcggtgattactcacaccgttctcaaggggcatacttcttcacaatctagagcagttttccggcatctgtccttaccagcctctcatgacacgtcgatatacccgagctacaaccttgcatcacgcgtgcagacagcattgagacaaaatctcctctcatggaaagcactgccattacatgatcgcggcccttcgcccccgccaactcttctctcgtttacacctgcgccgacctacacgctcggtcggcgacagacagagccactatccgacgaggagtatgcacggttacaggcacctcttcatgtcatatccgaggaagatgttgcaaagacgtgctttaatccggcggtgacccccgaacaacgcggtggtttaacaacgtatcacggtcccggccagcttgtcttttggccaatcattgacatgagatctccgttgcatgcacagttatccgtgcgcgactacgcctgcttactggagaagacaacaattaaggtactcgagagatggggaatcattgggtttacaaccgaaaacccgggtgtctgggttaagaacagtaaatcaaacggtgaagagcgcaaaattgctgctcttggtgtccacctaagtcgccatgtcacagggctcggcgtagcagtgaacttcagcactcccgtagcgggtgctgaggatacgaacccatgggcccgcatcgttccttgtgggctaggagatcggggcgtgacgagcatgtgtgaagagctgggccgtgagacgggcccgcaggagacagctctggcgttgcaagacctcgcctctacttgggcttctgaattcgagtcacggttgaaaatacgcaacgatgtcgaagggcttgttgagggatatgatcttgacagatggaagaatgacatccccgacttggaaatcgccgagagccatgtgcagactcgaaaatctccgtag

SEQ ID NO: 38951 - protein, 320 aa, Muscodor strobelii
  misc_feature: SGI Peptide ID NO. 573544
  misc_feature (104)..(190): Pfam Id: PF03099 Pfam Desc: Biotin/lipoate A/B protein ligase family
  misc_feature (127)..(190): Pfam Id: PF03099 Pfam Desc: Biotin/lipoate A/B protein ligase family
  misc_feature (38)..(290): NCBI GI: 46128631 Blast Desc: FG08693.1 [Gibberella zeae PH-1]
  misc_feature (1)..(292): NCBI GI: 256733631 Blast Desc: NECHADRAFT_35982 [Nectria haematococca mpVI 77-13-4]
  misc_feature (38)..(255): NCBI GI: 261353775 Blast Desc: octanoyltransferase [Verticillium albo-atrum VaMs.102]
  misc_feature (26)..(284): NCBI GI: 85074737 Blast Desc: NCU00596 [Neurospora crassa OR74A] gi|28927549|gb|EAA36500.1| [Neurospora crassa OR74A] gi|38567311|emb|CAE76599.1| related to lipoate--protein ligase B
  misc_feature (74)..(294): NCBI GI: 171684077 Blast Desc: protein product [Podospora anserina] gi|170941999|emb|CAP67651.1| protein product [Podospora anserina]
  misc_feature (24)..(254): NCBI GI: 116192925 Blast Desc: CHGG_06180 [Chaetomium globosum CBS 148.51] gi|88182093|gb|EAQ89561.1| CHGG_06180 [Chaetomium globosum CBS 148.51]
  misc_feature (26)..(297): NCBI GI: 212544660 Blast Desc: Lipoyltransferase, [Penicillium marneffei ATCC 18224] gi|210065453|gb|EEA19547.1| Lipoyltransferase, [Penicillium marneffei ATCC 18224]
  misc_feature (24)..(282): NCBI GI: 154293230 Blast Desc: BC1G_14413 [Botryotinia fuckeliana B05.10] gi|150845558|gb|EDN20751.1| BC1G_14413 [Botryotinia fuckeliana B05.10]
  misc_feature (40)..(284): NCBI GI: 169780398 Blast Desc: [Aspergillus oryzae RIB40] gi|83773403|dbj|BAE63530.1| protein product [Aspergillus oryzae]
  misc_feature (40)..(283): NCBI GI: 238505463 Blast Desc: Lipoyltransferase, [Aspergillus flavus NRRL3357] gi|220690071|gb|EED46421.1| Lipoyltransferase, [Aspergillus flavus NRRL3357]
  misc_feature (83)..(282): SWISSPROT Homolog: EC 2.3.1.181 Lipoyl(octanoyl) transferase
MQPRAVITHTVLKGHTSSQSRAVFRHLSLPASHDTSIYPSYNLASRVQTALRQNLLSWKALPLHDRGPSPPPTLLSFTPAPTYTLGRRQTEPLSDEEYARLQAPLHVISEEDVAKTCFNPAVTPEQRGGLTTYHGPGQLVFWPIIDMRSPLHAQLSVRDYACLLEKTTIKVLERWGIIGFTTENPGVWVKNSKSNGEERKIAALGVHLSRHVTGLGVAVNFSTPVAGAEDTNPWARIVPCGLGDRGVTSMCEELGRETGPQETALALQDLASTWASEFESRLKIRNDVEGLVEGYDLDRWKNDIPDLEIAESHVQTRKSP

SEQ ID NO: 38952 - DNA, 2131 bp, Muscodor strobelii
  misc_feature: SGI EST ID NO. CUFF.93645.0
  misc_feature: Variant of the nucleotide sequence at SEQ ID NO 38950
ggaatacaagatataaggtacgaaacgggcacttgaaatgagcgcatgcatatttgggcagtgggttgtggcatgtgctgttgatggtggtttcaacggctggagaactggacaatgcctggcccccagctgttgctacttgtcttcgaatatcagcaattgcatagtataggtactaaggcggcctatttgatagcgcttgttaagtgattggtaattgccacggttcggaatattttacatcaagtatactattactacatgccgttccttcagatagatgcccagggaggatcatcaagcttgttatatgcacacacatgtgaaccatagagaactttcaacgtctacctgtctcgcatgtacctatcttgccgtttttcagggtgcctgccgtcatgtggtctagattgatccatggatgaaaacccgtcggctcgggtcatcttgcccagccaagaggtgatcgtcaaattggcctgaaatcgcgttttacttctctaggaaaccgataaaccccgagacatgctggttctcttcccgattaactccggctacgcatcagccaatttgctcaccttcaactctcacaagatttacactcttgaagagcctgacgcgactttgcagaagccagcacgataatgcagccaagagcggtgattactcacaccgttctcaaggggcatacttcttcacaatctagagcagttttccggcatctgtccttaccagcctctcatgacacgtcgatatacccgagctacaaccttgcatcacgcgtgcagacagcattgagacaaaatctcctctcatggaaagcactgccattacatgatcgcggcccttcgcccccgccaactcttctctcgtttacacctgcgccgacctacacgctcggtcggcgacagacagagccactatccgacgaggagtatgcacggttacaggcacctcttcatgtcatatccgaggaagatgttgcaaagacgtgctttaatccggcggtgacccccgaacaacgcggtggtttaacaacgtatcacggtcccggccagcttgtcttttggccaatcattgacatgagatctccgttgcatgcacagttatccgtgcgcgactacgcctgcttactggagaagacaacaattaaggtactcgagagatggggaatcattgggtttacaaccgaaaacccgggtgtctgggttaagaacagtaaatcaaacggtgaagagcgcaaaattgctgctcttggtgtccacctaagtcgccatgtcacagggctcggcgtagcagtgaacttcagcactcccgtagcgggtgctgaggatacgaacccatgggcccgcatcgttccttgtgggctaggagatcggggcgtgacgagcatgtgtgaagagctgggccgtgagacgggcccgcaggagacagctctggcgttgcaagacctcgcctctacttgggcttctgaattcgagtcacggttgaaaatacgcaacgatgtcgaagggcttgttgagggatatgatcttgacagatggaagaatgacatccccgacttggaaatcgccgagagccatgtgcagactcgaaaatctccgtagtagtaggtgagtcgaatcaaagcaatcggctctctctcgtacctaccatcctctagcctgattccaggatcatcacctgagaggattagatggttgtcggccgaaactccaacctgactccacgtaacctcaatactgagctgcttcctccactagcgctttgaagagcatgcatgggatgagcgaaccacaatttcttgtaaggtcggccgcttcaaggttggcaagctcttcagcccggcgatgtattcttgggcgtgtcattatgctacggaaattgggtgtgccggaatcctatattccgcttgccccagtgcatacataatgtcacggaagcaccgaaggcaggtaaggtaaagtctctcagaaaatcagtatcaaggttaggtatgcataaacgtagtccattcttctcattcgccatcaggcagctcatagtcgcttggatgagcaattagtaagagtggttcacgcggctatctagcggaattccaataagacgaataagatgaaagatatcacta

SEQ ID NO: 38953 - DNA, 1878 bp, Muscodor strobelii
  misc_feature: SGI cDNA ID NO. 573545
  misc_feature: Elevated expression when VOC is produced
  misc_feature: Encodes the peptide sequence at SEQ ID NO 38954
atgttccaggcgcaacccacaccatatggccagttcattccatatggatttcacttaggcaacgaggcgattcctgagtacacattctctccgtcgccccttctacctgataaccatggtcaaggccacttcaatgggagacttgtcgaaggcaattcggagcaaggcagcgatgggtcggccgtggtagggactggcccagcaacagcgcctggaaattactatagcagtgggatttctagcgcctccaccaacagtgccagcaccagcgccagaccaaacgcccacagcggccaccacagcagacgccatcccccgtccacaataccccgccaccaacaccacctccaatcccatcatcctcacaatcaaccccagcagcagcctcaatctcatcagacccggcatcagcactcacttcagcacacactctcccaccggttcccgcccagaagtcgagacggagctcagcaccagcactccaggatggaccaacaacaccagctgggtgacatcgcgcagcaagaggccgccgcgagagactacatgcctgaggtcgagggacccttagtaggcgagaaaacgtccagccaatctattacagatgaatatgcacgagcagatcctacctatgttgctaaaacattggctctaccacagacgtattcgcactaccgcccaatccaaggggatggtaattgtggctggcgagccatcggatttgcttatttcgaaacactggtacgatgtcagaacgttgatttgattcaggaggagctccagcgaataactagtcttaataactacatcgagaatgagggtggtcaagatcctagtatattcgagttcatggttgatgagactttcagccttttcaatgagataattgccgtcatgtcggaaggcggcgacccaatggctcccatcgtggccaaattcaacgatcctaatgcgtcgccgtgtgtcgtctatcacctccgcctgcttgcgtgtgcaagactcaaaggcgaacatagtcgattcgagccttacattgatacagatattgaaagctatgtccagtcgaccatcctgcctgtcaatagagagatcgaccatgtctgcgtcgtcttgcttcacgacatactcttgagacctgcaaacatagtactcgaaattgcgtacttggatcgcagcgaaggatctcaggtcaatgtgcatcgactaccagaggaggctgacgcacaagatccttcgaacttagggcctatgatctatctcttataccgacctggccattacgatattctctatcgtgataatccagttcttatgacacacacgccaccgcctgtcaatctccaggtccatcgcgtaacttcgttcactcatcataggactgatttccaaaaccccatcgcggcattacagggcactgcctacatggacttgacttcacttgccctaattccagcagcgttcgacccaccactgggtccgccgtctggggcgccctccccaatgactgagccttatgcggcgtcgcctgcttcgccgtgggtctctcaacctttcgaagctgatgggccgcctgctgccccgtcgcagccaagccctccacagcaacaacacccgcttcgatttagcaaatacaactttccaaacctgccagagatggctggagagagtgttaatgacgtgacgacgtacgatcaaacgttcacgacgaacacgttcaagaacagccacttcaatgtggcacactacaacaacatgaatttccagccagaaatgtacaaaccagacggcgaagaggacatcgccagtagtgggactggaaggaccggaggtcgaaaacggagtagcgatcattcctcgcttatcaaaagagagaagtag

SEQ ID NO: 38954 - protein, 625 aa, Muscodor strobelii
  misc_feature: SGI Peptide ID NO. 573545
  misc_feature (171)..(615): NCBI GI: 116192923 Blast Desc: CHGG_06179 [Chaetomium globosum CBS 148.51] gi|88182092|gb|EAQ89560.1| CHGG_06179 [Chaetomium globosum CBS 148.51]
  misc_feature (171)..(615): NCBI GI: 171684075 Blast Desc: protein product [Podospora anserina] gi|170941998|emb|CAP67650.1| protein product [Podospora anserina]
  misc_feature (171)..(622): NCBI GI: 149211293 Blast Desc: MGCH7_ch7g1104 [Magnaporthe grisea 70-15] gi|86197059|gb|EAQ71697.1| MGCH7_ch7g1104 [Magnaporthe grisea 70-15]
  misc_feature (158)..(610): NCBI GI: 164428454 Blast Desc: NCU00595 [Neurospora crassa OR74A] gi|157072152|gb|EAA36499.2| [Neurospora crassa OR74A]
  misc_feature (158)..(610): NCBI GI: 38567312 Blast Desc: conserved [Neurospora crassa]
  misc_feature (169)..(599): NCBI GI: 156061245 Blast Desc: SS1G_02765 [Sclerotinia sclerotiorum 1980] gi|154700169|gb|EDN99907.1| SS1G_02765 [Sclerotinia sclerotiorum 1980]
  misc_feature (171)..(622): NCBI GI: 145601450 Blast Desc: MGG_14219 [Magnaporthe grisea 70-15] gi|145009518|gb|EDJ94185.1| MGG_14219 [Magnaporthe grisea 70-15]
  misc_feature (190)..(518): NCBI GI: 261353774 Blast Desc: ubiquitin thioesterase OTUB1 [Verticillium albo-atrum VaMs.102]
  misc_feature (171)..(595): NCBI GI: 242813055 Blast Desc: ubiquitin thiolesterase (OtuB1), [Talaromyces stipitatus ATCC 10500] gi|218714427|gb|EED13850.1| ubiquitin thiolesterase (OtuB1), [Talaromyces stipitatus ATCC 10500]
  misc_feature (172)..(597): NCBI GI: 226294537 Blast Desc: conserved [Paracoccidioides brasiliensis Pb18]
  misc_feature: Useful for introducing or modulating the production of volatile compounds
MFQAQPTPYGQFIPYGFHLGNEAIPEYTFSPSPLLPDNHGQGHFNGRLVEGNSEQGSDGSAVVGTGPATAPGNYYSSGISSASTNSASTSARPNAHSGHHSRRHPPSTIPRHQHHLQSHHPHNQPQQQPQSHQTRHQHSLQHTLSHRFPPRSRDGAQHQHSRMDQQHQLGDIAQQEAAARDYMPEVEGPLVGEKTSSQSITDEYARADPTYVAKTLALPQTYSHYRPIQGDGNCGWRAIGFAYFETLVRCQNVDLIQEELQRITSLNNYIENEGGQDPSIFEFMVDETFSLFNEIIAVMSEGGDPMAPIVAKFNDPNASPCVVYHLRLLACARLKGEHSRFEPYIDTDIESYVQSTILPVNREIDHVCVVLLHDILLRPANIVLEIAYLDRSEGSQVNVHRLPEEADAQDPSNLGPMIYLLYRPGHYDILYRDNPVLMTHTPPPVNLQVHRVTSFTHHRTDFQNPIAALQGTAYMDLTSLALIPAAFDPPLGPPSGAPSPMTEPYAASPASPWVSQPFEADGPPAAPSQPSPPQQQHPLRFSKYNFPNLPEMAGESVNDVTTYDQTFTTNTFKNSHFNVAHYNNMNFQPEMYKPDGEEDIASSGTGRTGGRKRSSDHSSLIKREK

SEQ ID NO: 38955 - DNA, 2738 bp, Muscodor strobelii
  misc_feature: SGI EST ID NO. CUFF.93674.1
  misc_feature: Variant of the nucleotide sequence at SEQ ID NO 38953
ctcaattcccccttctatattcgattggaagttggtttctttctcatgccccgaagcctccggcctcctcgtctcttttcctcgtcttttcctagtccatttatgctttgttcggcgtgctgtctgcgatacggtccagagtgtcccgcaccagtgcagtggttattggccactaggtgcacccagtccacggtaaagagatacttttagtctttgacatacatgaactttgaacagagcgagagttgtcaaccggattggactacgtataattcgcaacaaaggtgactcgctgggacgccgggagctatcgcttcgaaggcacggacaggcatgttccaggcgcaacccacaccatatggccagttcattccatatggatttcacttaggcaacgaggcgattcctgagtacacattctctccgtcgccccttctacctgataaccatggtcaaggccacttcaatgggagacttgtcgaaggcaattcggagcaaggcagcgatgggtcggccgtggtagggactggcccagcaacagcgcctggaaattactatagcagtgggatttctagcgcctccaccaacagtgccagcaccagcgccagaccaaacgcccacagcggccaccacagcagacgccatcccccgtccacaataccccgccaccaacaccacctccaatcccatcatcctcacaatcaaccccagcagcagcctcaatctcatcagacccggcatcagcactcacttcagcacacactctcccaccggttcccgcccagaagtcgagacggagctcagcaccagcactccaggatggaccaacaacaccagctgggtgacatcgcgcagcaagaggccgccgcgagagactacatgcctgaggtcgagggacccttagtaggcgagaaaacgtccagccaatctattacagatgaatatgcacgagcagatcctacctatgttgctaaaacattggctctaccacagacgtattcgcactaccgcccaatccaaggggatggtaattgtggctggcgagccatcggatttgcttatttcgaaacactggtacgatgtcagaacgttgatttgattcaggaggagctccagcgaataactagtcttaataactacatcgagaatgagggtggtcaagatcctagtatattcgagttcatggttgatgagactttcagccttttcaatgagataattgccgtcatgtcggaaggcggcgacccaatggctcccatcgtggccaaattcaacgatcctaatgcgtcgccgtgtgtcgtctatcacctccgcctgcttgcgtgtgcaagactcaaaggcgaacatagtcgattcgagccttacattgatacagatattgaaagctatgtccagtcgaccatcctgcctgtcaatagagagatcgaccatgtctgcgtcgtcttgcttcacgacatactcttgagacctgcaaacatagtactcgaaattgcgtacttggatcgcagcgaaggatctcaggtcaatgtgcatcgactaccagaggaggctgacgcacaagatccttcgaacttagggcctatgatctatctcttataccgacctggccattacgatattctctatcgtgataatccagttcttatgacacacacgccaccgcctgtcaatctccaggtccatcgcgtaacttcgttcactcatcataggactgatttccaaaaccccatcgcggcattacagggcactgcctacatggacttgacttcacttgccctaattccagcagcgttcgacccaccactgggtccgccgtctggggcgccctccccaatgactgagccttatgcggcgtcgcctgcttcgccgtgggtctctcaacctttcgaagctgatgggccgcctgctgccccgtcgcagccaagccctccacagcaacaacacccgcttcgatttagcaaatacaactttccaaacctgccagagatggctggagagagtgttaatgacgtgacgacgtacgatcaaacgttcacgacgaacacgttcaagaacagccacttcaatgtggcacactacaacaacatgaatttccagccagaaatgtacaaaccagacggcgaagaggacatcgccagtagtgggactggaaggaccggaggtcgaaaacggagtagcgatcattcctcgcttatcaaaagagagaagtagacatagaggagttttcgcatctggctagcgcgcttggtgtggtcatggttgcatattcggattgtgtggcaacagtgaatttattctagctttcccccttcgttcgtctttcatcaatttgaccttggtatcagcgttaaaaagcgagcaggaaacaatgttacgtttggcgtatcggtctgcggcgaacgacttaatacggcggtttctcgtggctacggctacgagactgccacggcagggccaacagtgtgatattatgagaaattgttatatctcagagaaggtctttgatagatgcggcttgagatctgagctgcatcggtggatagcaatacttaatgaaggagctgagagaagagtagttgagggtaagcagggaaccacggccacgcgatcaagtaaccgcagatcgaacctgcatgtgtatcgtttagtcactagcacgtgggtttcattgagctatttcggtaggatacaatgacaatttgaggcatgatcaatttgaatatacatgaatagttgtg

SEQ ID NO: 38956 - DNA, 2163 bp, Muscodor strobelii
  misc_feature: SGI cDNA ID NO. 573546
  misc_feature: Elevated expression when VOC is produced
  misc_feature: Encodes the peptide sequence at SEQ ID NO 38957
atgccaccatcggcgccgcgggacggccttaacgttggagcgaatgacgggaaaaggaatcgtcgcagcacttctgatctacctaccaccaaggccggatccgatgggaggaaatggtccttaagtgcaagccggccctggaaaaatagatcgagtgggagtgacagtaaactagagcctacagctaaatcaccggatcttgacacgaaaactatcactttccctggcagcctgccatcatttagcagccctgttacggtggctgatctcgagaaacttcgcagatataccaacaagatcaacaatggcgctaagaatatccatcatgtcgatttgacctgggaagaatacgtcaaagtcagagaaaaatgctttgaatggtgtcgagaaatgatggtcacttcgccgcaacgaagagaatcattattgatcagccccacaacaacaaattcctccaaccaaagaggctatagaggatcttcttcttcagaagccacaagttttacggctgtcgatttgcatcttgcgtcccaagaaggccaatatcaagaagtagtgcatgggtatgaggccgccgtggcacacctaacaaatagtatccgtatgtcgctggaagaaacgtacaatgagtacgacaaagatgcgacccccgaagacttcgatacgatctgtagggatagaacggctcgtaacttgacgatttaccatatgcgcaatgcgagcatctcgaagatggtctctgcgaatcttgactacttcccaaaatatgatctacgttttcgcaattacgatgagatcacgaaagacttggctaagctccgatctgttcttggcacatcaacaatacctccagagaggacaatatgtgaaatctgtatctctcccgttggtgatgtcatgttggagttcttcaataaggaagaagagcagcagcctgtcttccgctttcgcgtgtcatcgcattgtctgagggagacaacctcgcccatcttcgcccatatgttcaactcacgcttcctcgcagagctagatgatgaaacgcgacaaggccttccttccactcctactcgtcatgtctgcgtcgacggatctgaagtcaagctataccgaatgccgcaaattgaactcaacaggaagcgatctctagagatattgctccatgctgctcataaccacatggacaaaattccgagagaagtcagattcgatcaattcgttgccttggctgaaacttgcctccgctatcgatgcacctcacccttagaaatacacgttgagcacgtgtggctaccctactggcggagcagagcaacggacaacatgttggaagacgtgttactcatttgttacgtgttcggtcttggcgcaaatttcactaggttgtcaaggaatgctattcttgacttggtcgatcccgatgatttacggtataacgcatggcctcgcagagtctgtgatcagattttggcaattagacaagcaaagatcaatcaagtatatgagcagtgtcgggctacattgaacgattatctgagtacgcctgatactttccgaaatgcgatcaaaaatatctacgaaggtgtagaggggcttacgctattcgacgtcttaggaaaacgcggctgggcattgtctaagaactcgagccagagaaacagcggcatatcgcagtctgaccgaatggcgggagaaaaactgtttgatattgcttcgcgatcgagtcttgtagactcgacccgggacatacgcactttggcgcaagtcaatcacgccttttatcagagttaccagcgaaacaaggccctactggaagttgaggagcggaccacagagagcatgagcggagttggcgtaggaaatgtggagctagaagggcgtgatcatctgccattgcaagttccaacgtcctccggacttgaaagcaacttgggtgagctcgaagagcgtcctctaggctctacccaatctagagagaaattcagacaaggatcaatcttggtgctagagaacaaaagcccaaccgagcgggatgataagaaatatgctgccgaaatgcgtgagcagctcctagtggaaaagatgttagagttcacacgagtcagtgggcatttcttggatggaattggcgctccggagtttgacaaggaactttcagtggattaa

SEQ ID NO: 38957 - protein, 720 aa, Muscodor strobelii
  misc_feature: SGI Peptide ID NO. 573546
  misc_feature (22)..(514): NCBI GI: 256732306 Blast Desc: NECHADRAFT_40882 [Nectria haematococca mpVI 77-13-4]
  misc_feature (22)..(514): NCBI GI: 46105244 Blast Desc: FG00250.1 [Gibberella zeae PH-1]
  misc_feature (107)..(527): NCBI GI: 154310586 Blast Desc: BC1G_06767 [Botryotinia fuckeliana B05.10] gi|150851307|gb|EDN26500.1| BC1G_06767 [Botryotinia fuckeliana B05.10]
  misc_feature (374)..(621): NCBI GI: 156058412 Blast Desc: SS1G_03217 [Sclerotinia sclerotiorum 1980] gi|154701005|gb|EDO00744.1| SS1G_03217 [Sclerotinia sclerotiorum 1980]
  misc_feature (517)..(603): NCBI GI: 256732306 Blast Desc: NECHADRAFT_40882 [Nectria haematococca mpVI 77-13-4]
  misc_feature (513)..(603): NCBI GI: 154310586 Blast Desc: BC1G_06767 [Botryotinia fuckeliana B05.10] gi|150851307|gb|EDN26500.1| BC1G_06767 [Botryotinia fuckeliana B05.10]
  misc_feature: Useful for introducing or modulating the production of volatile compounds
MPPSAPRDGLNVGANDGKRNRRSTSDLPTTKAGSDGRKWSLSASRPWKNRSSGSDSKLEPTAKSPDLDTKTITFPGSLPSFSSPVTVADLEKLRRYTNKINNGAKNIHHVDLTWEEYVKVREKCFEWCREMMVTSPQRRESLLISPTTTNSSNQRGYRGSSSSEATSFTAVDLHLASQEGQYQEVVHGYEAAVAHLTNSIRMSLEETYNEYDKDATPEDFDTICRDRTARNLTIYHMRNASISKMVSANLDYFPKYDLRFRNYDEITKDLAKLRSVLGTSTIPPERTICEICISPVGDVMLEFFNKEEEQQPVFRFRVSSHCLRETTSPIFAHMFNSRFLAELDDETRQGLPSTPTRHVCVDGSEVKLYRMPQIELNRKRSLEILLHAAHNHMDKIPREVRFDQFVALAETCLRYRCTSPLEIHVEHVWLPYWRSRATDNMLEDVLLICYVFGLGANFTRLSRNAILDLVDPDDLRYNAWPRRVCDQILAIRQAKINQVYEQCRATLNDYLSTPDTFRNAIKNIYEGVEGLTLFDVLGKRGWALSKNSSQRNSGISQSDRMAGEKLFDIASRSSLVDSTRDIRTLAQVNHAFYQSYQRNKALLEVEERTTESMSGVGVGNVELEGRDHLPLQVPTSSGLESNLGELEERPLGSTQSREKFRQGSILVLENKSPTERDDKKYAAEMREQLLVEKMLEFTRVSGHFLDGIGAPEFDKELSVD

SEQ ID NO: 38958 - DNA, 6298 bp, Muscodor strobelii
  misc_feature: SGI EST ID NO. CUFF.93922.1
  misc_feature: Variant of the nucleotide sequence at SEQ ID NO 38956
aacataaacctgaatgtcagctatatagatcatttaaccaaaggcatgtctcatcctacgcgctgcagtcattacgatgttcaagcatcacagatgatttcgtactataacaccactgtcgatatctgctgcgtctcaattgacgctcctgctcagcttacaagccttcaactaacattgaaagagcaaagcgcaccattcatatatacatgttcccaaatctccagcagtgcaaagtggctgcagatgttgggcaaggaggctgtcgtggcttgtggcacgtggattgatttgtacctcgaaatgtattgtgtgagacgtaaaatgtaagtgaagtaagtccctttgcctacgtcggggtttcacccaagatctcatcatcaaaacgaggccgcgcggtcgctcagacggtcaagtgtgctcctggctcagtcacttgctcttggtatagagcctgatactgaagaggtctttagttgttgttgaggctattcgtctacaattaccagaaaagcccaggccggtgaccattgttagggtgagatggagggcggcggcggccacgctttctttcagcacgtggaggagtctttttcagattggctagcgggaattggcgggcgacagcttgtggcaaaggcgcacatatgtccaatgaaacgcaacgcctcttgttctacccccacactttccatggcgatcattcgcgttttggagattcgcgaccaattgtcgaccttctcgagttgtcgaatttacggccagacttgcatggcagaattttagtagcgtttttgttctcccatgtttttcttttccctacacgacccatcactggattatgcgctacttttgggttaaacagttatcaaaagaagctaagagatagcacatacaggggttaccgccaagacatcgtcgcggtttgcactcgaagtttgcgctatatctgcacccatcccctgccggtatcgaaattcttgcatagccgagttcatcgatcttccctctttttcaccctatcctacaggctctaagggcttgttcacatatgaccccgcgattccagaggtgataattaatcggcaagcgacttcaagtctttgcgcttgctcaggtggttgtaggaaagacttgcctcggtggttgagcgagaatcggctctattaagcatcaaagaattggaaatagattattgagctcctggacaagtgaactgtatgaacttcggccgtgcgacgtcgatcatccagtcttttcaggaacatatcggaggatcttcttaccgcaatcactacactccagtcgagcaatacgagatgtcggaccactactcaaccaagccaggcgatgagtctagctcaccggatcacgctgtcgaggtcaccgccagcagtgacagccataatcagctccagagctctctccctgcggacggcgtcacaaacgaggaagtaagccggggcattcatgaacttgagggcaagtctgtccagtggtgggcttattttacgactagggacttctggattgtactcattgttgggcaagtgttggccctgtccatcacatctaccaacacattctcgagtcttctgtcgatgaacaaagtctcattgccggccttccagtcctttttcaactacgtcttgcttacgacgatctatgtgccgtaccttatttatagctatggctggaaaaaggtcggaaaactgctatggcgtgacggatggaggtattttatcctcagtttcttcgacgtcgaaggcaactactttactgttcttgcttatcagtacaccaacattctgtcagctcaactaatcaacttctgggctattgtgattgtcgttatactgtctttcctcatcctgcgcgtgcgctacaagatctggcaagtcatcggtattctaatttgcgttggcggtaccggcctgttgatcgctagtgacgctatcaaccacatcaacaactacgcaggatcgaaccctgtcaagggggacctgttcgctcttctcggtgccacgttctacggattttctaatacgttcgaggagtggttcgtcagcaagcgtcctgcatacgaggttctggcattcttgggtttctggggaatattcatcaacggtgtgcaggccgccatcttcgatcgccacacgcttcagactggtgacttcacacccgcggtgtatggctacattacaggctatacgctagccctgacgctattctactcgctcatcccgtatctcttgcggctcgcctctgcagccttcctcaacatctcgcttctcacgggcaatttctggggtaccatcatcggtatccaggtctttggttactcggtctacttcctttacccaattgcgtttgtgctcatcattattggccagcttatctacttccttgctggtagcatttttggtgactcgaagaagccgtggcttggtgccgagcaggaagatggtgtggcaggtgtcggtacggcgaaactcaaggctatcaatgctgcacggagggcagcgcaagaagctgaacatggcaccggaaacggtgctgaaaatgaggtagccaacggagcatgaagatgtcattgaaatcatagtcatgtttttcgttcggaccgtgccaggagcagaatcgccgctgatttgttcccatgatgagacggagagccaaaagggttatatttttgttgttgcaaacataataatctaatagtttgatgacagaggttggacaacagtacttcaatgtgcagaaaactatccggtacatgagagaccttgccccattatctcgaacaggctttgaagaaataacttgtcaagctcttttggcactgatatattagagttgcgtaactggtattcattttttgaggtagtactgacagtccgaccgcctgatatggtttcattgtgctgtctcattcgacatacgcataatcatcatttgagtatgaaatcagatcttcgtagtcgaattctgctgatctctagagtatgagaaaagagcaatttagtctttacttggtaaatatggcgcgacggtattggttgcctcgctgaaggagcttacctgcattgcacatgaggcgtattcagctctttgcttttctgaacccttgccaactcgaatgtaccacgatgatttccccgcagtatccttcgctcatccgagtgagatgcgacttagacccttcgatcgtctgcggcgcagcaccacttgcccctcacctggcgaggaggggcgagttcatcgtcaacaagggttcacctttctttcgagtatcgcgtacttagaaatgtgtaagattaagtgtggaattactaggcgatcagagttaacgttcggattttcttgatatattatagtcctaccttagctatcaaagaatgtaaacttccaatcatttattgcgtgttcatgatcggtaagtaccggccggtagcaatacgtcacacgagcagaatgacaaggcagcctcgttcccataccgaagcgggcgtcgcagcgagcgttggctgagtttctctcctcaggcagaccacttctgctagcactcggctcatcctcacttttgtggcccagtacttcaggttgtttgttatactgttcttgtactgagcctttgtaattgacttcccgtcgtcgctctgattctcttccctcccaggagagacctttcgacgcaattgccatgccaccatcggcgccgcgggacggccttaacgttggagcgaatgacgggaaaaggaatcgtcgcagcacttctgatctacctaccaccaaggccggatccgatgggaggaaatggtccttaagtgcaagccggccctggaaaaatagatcgagtgggagtgacagtaaactagagcctacagctaaatcaccggatcttgacacgaaaactatcactttccctggcagcctgccatcatttagcagccctgttacggtggctgatctcgagaaacttcgcagatataccaacaagatcaacaatggcgctaagaatatccatcatgtcgatttgacctgggaagaatacgtcaaagtcagagaaaaatgctttgaatggtgtcgagaaatgatggtcacttcgccgcaacgaagagaatcattattgatcagccccacaacaacaaattcctccaaccaaagaggctatagaggatcttcttcttcagaagccacaagttttacggctgtcgatttgcatcttgcgtcccaagaaggccaatatcaagaagtagtgcatgggtatgaggccgccgtggcacacctaacaaatagtatccgtatgtcgctggaagaaacgtacaatgagtacgacaaagatgcgacccccgaagacttcgatacgatctgtagggatagaacggctcgtaacttgacgatttaccatatgcgcaatgcgagcatctcgaagatggtctctgcgaatcttgactacttcccaaaatatgatctacgttttcgcaattacgatgagatcacgaaagacttggctaagctccgatctgttcttggcacatcaacaatacctccagagaggacaatatgtgaaatctgtatctctcccgttggtgatgtcatgttggagttcttcaataaggaagaagagcagcagcctgtcttccgctttcgcgtgtcatcgcattgtctgagggagacaacctcgcccatcttcgcccatatgttcaactcacgcttcctcgcagagctagatgatgaaacgcgacaaggccttccttccactcctactcgtcatgtctgcgtcgacggatctgaagtcaagctataccgaatgccgcaaattgaactcaacaggaagcgatctctagagatattgctccatgctgctcataaccacatggacaaaattccgagagaagtcagattcgatcaattcgttgccttggctgaaacttgcctccgctatcgatgcacctcacccttagaaatacacgttgagcacgtgtggctaccctactggcggagcagagcaacggacaacatgttggaagacgtgttactcatttgttacgtgttcggtcttggcgcaaatttcactaggttgtcaaggaatgctattcttgacttggtcgatcccgatgatttacggtataacgcatggcctcgcagagtctgtgatcagattttggcaattagacaagcaaagtatatgagcagtgtcgggctacattgaacgattatctgagtacgcctgatagtctccgttgccctcgcggagaccgttgctgtgacgccctgaacctcggctggtatatgatgcgactagcagagttgaatttgtcaccctttgtaatgttctctcccgcgccaaccgaatccactcatccacaaacacaaagtctgttccaactcatagactccctgtgtctaaccaaggggtctcccaaatgtcatagcagtgtttgtgacttcgcaccagctttccgaaatgcgatcaaaaatatctacgaaggtgtagaggggcttacgctattcgacgtcttaggaaaacgcggctgggcattgtctaagaactcgagccagagaaacagcggcatatcgcagtctgaccgaatggcgggagaaaaactgtttgatattgcttcgcgatcgaggtacgctcctggatatcaacgagatgctgatgtttatttcaggatacttagtcttgtagactcgacccgggacatacgcactttggcgcaagtcaatcacgccttttatcagagttaccagcgaaacaaggccctactggaagttgaggagcggaccacagagagcatgagcggagttggcgtaggaaatgtggagctagaagggcgtgatcatctgccattgcaagttccaacgtcctccggacttgaaagcaacttgggtgagctcgaagagcgtcctctaggctctacccaatctagagagaaattcagacaaggatcaatcttggtgctagagaacaaaagcccaaccgagcgggatgataagaaatatgctgccgaaatgcgtgagcagctcctaggtttgagaacgaggggaagcaatgcgaacagggaaagtctgtttctatgaggataccaaagggacggtacttttggaaagtggaaaagatgttagagttcacacgagtcagtgggcatttcttggatggaattggcgctccggagtttgacaaggaactttcagtggattaatagataccccttttgaagttagaggattacatgttatttggttactgtctggctatatacaaatttgaataatcgcaatggtatatctc

SEQ ID NO: 38959 - DNA, 1365 bp, Muscodor strobelii
  misc_feature: SGI cDNA ID NO. 573547
  misc_feature: Encodes the peptide sequence at SEQ ID NO 38960
atgaacttcggccgtgcgacgtcgatcatccagtcttttcaggaacatatcggaggatcttcttaccgcaatcactacactccagtcgagcaatacgagatgtcggaccactactcaaccaagccaggcgatgagtctagctcaccggatcacgctgtcgaggtcaccgccagcagtgacagccataatcagctccagagctctctccctgcggacggcgtcacaaacgaggaagtaagccggggcattcatgaacttgagggcaagtctgtccagtggtgggcttattttacgactagggacttctggattgtactcattgttgggcaagtgttggccctgtccatcacatctaccaacacattctcgagtcttctgtcgatgaacaaagtctcattgccggccttccagtcctttttcaactacgtcttgcttacgacgatctatgtgccgtaccttatttatagctatggctggaaaaaggtcggaaaactgctatggcgtgacggatggaggtattttatcctcagtttcttcgacgtcgaaggcaactactttactgttcttgcttatcagtacaccaacattctgtcagctcaactaatcaacttctgggctattgtgattgtcgttatactgtctttcctcatcctgcgcgtgcgctacaagatctggcaagtcatcggtattctaatttgcgttggcggtaccggcctgttgatcgctagtgacgctatcaaccacatcaacaactacgcaggatcgaaccctgtcaagggggacctgttcgctcttctcggtgccacgttctacggattttctaatacgttcgaggagtggttcgtcagcaagcgtcctgcatacgaggttctggcattcttgggtttctggggaatattcatcaacggtgtgcaggccgccatcttcgatcgccacacgcttcagactggtgacttcacacccgcggtgtatggctacattacaggctatacgctagccctgacgctattctactcgctcatcccgtatctcttgcggctcgcctctgcagccttcctcaacatctcgcttctcacgggcaatttctggggtaccatcatcggtatccaggtctttggttactcggtctacttcctttacccaattgcgtttgtgctcatcattattggccagcttatctacttccttgctggtagcatttttggtgactcgaagaagccgtggcttggtgccgagcaggaagatggtgtggcaggtgtcggtacggcgaaactcaaggctatcaatgctgcacggagggcagcgcaagaagctgaacatggcaccggaaacggtgctgaaaatgaggtagccaacggagcatga

SEQ ID NO: 38960 - protein, 454 aa, Muscodor strobelii
  misc_feature: SGI Peptide ID NO. 573547
  misc_feature (92)..(424): Pfam Id: PF06027 Pfam Desc: Eukaryotic protein of function (DUF914)
  misc_feature (150)..(242): Pfam Id: PF00892 Pfam Desc: Integral membrane protein DUF6
  misc_feature (92)..(394): Pfam Id: PF06027 Pfam Desc: Eukaryotic protein of function (DUF914)
  misc_feature (53)..(433): NCBI GI: 149210877 Blast Desc: MGCH7_ch7g911 [Magnaporthe grisea 70-15] gi|86196866|gb|EAQ71504.1| MGCH7_ch7g911 [Magnaporthe grisea 70-15]
  misc_feature (34)..(449): NCBI GI: 39971281 Blast Desc: MGG_03107 [Magnaporthe grisea 70-15] gi|145616608|ref|XP_001402576.1| MGG_14456 [Magnaporthe grisea 70-15] gi|145009226|gb|EDJ93937.1| MGG_14456 [Magnaporthe grisea
  misc_feature (27)..(433): NCBI GI: 154303192 Blast Desc: BC1G_09616 [Botryotinia fuckeliana B05.10] gi|150855079|gb|EDN30271.1| BC1G_09616 [Botryotinia fuckeliana B05.10]
  misc_feature (34)..(442): NCBI GI: 46105258 Blast Desc: FG00257.1 [Gibberella zeae PH-1]
  misc_feature (43)..(439): NCBI GI: 171684149 Blast Desc: protein product [Podospora anserina] gi|170942035|emb|CAP67687.1| protein product [Podospora anserina]
  misc_feature (70)..(441): NCBI GI: 256731909 Blast Desc: [Nectria haematococca mpVI 77-13-4]
  misc_feature (43)..(433): NCBI GI: 156058586 Blast Desc: SS1G_03305 [Sclerotinia sclerotiorum 1980] gi|154701092|gb|EDO00831.1| SS1G_03305 [Sclerotinia sclerotiorum 1980]
  misc_feature (26)..(433): NCBI GI: 116192857 Blast Desc: CHGG_06146 [Chaetomium globosum CBS 148.51] gi|88182059|gb|EAQ89527.1| CHGG_06146 [Chaetomium globosum CBS 148.51]
  misc_feature (34)..(439): NCBI GI: 261353686 Blast Desc: solute carrier family 35 member F1 [Verticillium albo-atrum VaMs.102]
  misc_feature (23)..(441): NCBI GI: 85110898 Blast Desc: NCU00542 [Neurospora crassa OR74A] gi|28925385|gb|EAA34449.1| NCU00542 [Neurospora crassa OR74A]
MNFGRATSIIQSFQEHIGGSSYRNHYTPVEQYEMSDHYSTKPGDESSSPDHAVEVTASSDSHNQLQSSLPADGVTNEEVSRGIHELEGKSVQWWAYFTTRDFWIVLIVGQVLALSITSTNTFSSLLSMNKVSLPAFQSFFNYVLLTTIYVPYLIYSYGWKKVGKLLWRDGWRYFILSFFDVEGNYFTVLAYQYTNILSAQLINFWAIVIVVILSFLILRVRYKIWQVIGILICVGGTGLLIASDAINHINNYAGSNPVKGDLFALLGATFYGFSNTFEEWFVSKRPAYEVLAFLGFWGIFINGVQAAIFDRHTLQTGDFTPAVYGYITGYTLALTLFYSLIPYLLRLASAAFLNISLLTGNFWGTIIGIQVFGYSVYFLYPIAFVLIIIGQLIYFLAGSIFGDSKKPWLGAEQEDGVAGVGTAKLKAINAARRAAQEAEHGTGNGAENEVANGA

SEQ ID NO: 38961 - DNA, 6298 bp, Muscodor strobelii; identical to SEQ ID NO: 38958
  misc_feature: SGI EST ID NO. CUFF.93922.1
  misc_feature: Variant of the nucleotide sequence at SEQ ID NO 38959

SEQ ID NO: 38962 - DNA, 1266 bp, Muscodor strobelii
  misc_feature: SGI cDNA ID NO. 573548
  misc_feature: Reduced expression when VOC is produced
  misc_feature: Encodes the peptide sequence at SEQ ID NO 38963
atgtcggaccactactcaaccaagccaggcgatgagtctagctcaccggatcacgctgtcgaggtcaccgccagcagtgacagccataatcagctccagagctctctccctgcggacggcgtcacaaacgaggaagtaagccggggcattcatgaacttgagggcaagtctgtccagtggtgggcttattttacgactagggacttctggattgtactcattgttgggcaagtgttggccctgtccatcacatctaccaacacattctcgagtcttctgtcgatgaacaaagtctcattgccggccttccagtcctttttcaactacgtcttgcttacgacgatctatgtgccgtaccttatttatagctatggctggaaaaaggtcggaaaactgctatggcgtgacggatggaggtattttatcctcagtttcttcgacgtcgaaggcaactactttactgttcttgcttatcagtacaccaacattctgtcagctcaactaatcaacttctgggctattgtgattgtcgttatactgtctttcctcatcctgcgcgtgcgctacaagatctggcaagtcatcggtattctaatttgcgttggcggtaccggcctgttgatcgctagtgacgctatcaaccacatcaacaactacgcaggatcgaaccctgtcaagggggacctgttcgctcttctcggtgccacgttctacggattttctaatacgttcgaggagtggttcgtcagcaagcgtcctgcatacgaggttctggcattcttgggtttctggggaatattcatcaacggtgtgcaggccgccatcttcgatcgccacacgcttcagactggtgacttcacacccgcggtgtatggctacattacaggctatacgctagccctgacgctattctactcgctcatcccgtatctcttgcggctcgcctctgcagccttcctcaacatctcgcttctcacgggcaatttctggggtaccatcatcggtatccaggtctttggttactcggtctacttcctttacccaattgcgtttgtgctcatcattattggccagcttatctacttccttgctggtagcatttttggtgactcgaagaagccgtggcttggtgccgagcaggaagatggtgtggcaggtgtcggtacggcgaaactcaaggctatcaatgctgcacggagggcagcgcaagaagctgaacatggcaccggaaacggtgctgaaaatgaggtagccaacggagcatga

SEQ ID NO: 38963 - protein, 421 aa, Muscodor strobelii
  misc_feature: SGI Peptide ID NO. 573548
  misc_feature (59)..(391): Pfam Id: PF06027 Pfam Desc: Eukaryotic protein of function (DUF914)
  misc_feature (117)..(209): Pfam Id: PF00892 Pfam Desc: Integral membrane protein DUF6
  misc_feature (59)..(361): Pfam Id: PF06027 Pfam Desc: Eukaryotic protein of function (DUF914)
  misc_feature (20)..(400): NCBI GI: 149210877 Blast Desc: MGCH7_ch7g911 [Magnaporthe grisea 70-15] gi|86196866|gb|EAQ71504.1| MGCH7_ch7g911 [Magnaporthe grisea 70-15]
  misc_feature (1)..(400): NCBI GI: 39971281 Blast Desc: MGG_03107 [Magnaporthe grisea 70-15] gi|145616608|ref|XP_001402576.1| MGG_14456 [Magnaporthe grisea 70-15] gi|145009226|gb|EDJ93937.1| MGG_14456 [Magnaporthe grisea
  misc_feature (9)..(400): NCBI GI: 154303192 Blast Desc: BC1G_09616 [Botryotinia fuckeliana B05.10] gi|150855079|gb|EDN30271.1| BC1G_09616 [Botryotinia fuckeliana B05.10]
  misc_feature (1)..(409): NCBI GI: 46105258 Blast Desc: FG00257.1 [Gibberella zeae PH-1]
  misc_feature (10)..(406): NCBI GI: 171684149 Blast Desc: protein product [Podospora anserina] gi|170942035|emb|CAP67687.1| protein product [Podospora anserina]
  misc_feature (37)..(408): NCBI GI: 256731909 Blast Desc: [Nectria haematococca mpVI 77-13-4]
  misc_feature (10)..(400): NCBI GI: 156058586 Blast Desc: SS1G_03305 [Sclerotinia sclerotiorum 1980] gi|154701092|gb|EDO00831.1| SS1G_03305 [Sclerotinia sclerotiorum 1980]
  misc_feature (6)..(400): NCBI GI: 116192857 Blast Desc: CHGG_06146 [Chaetomium globosum CBS 148.51] gi|88182059|gb|EAQ89527.1| CHGG_06146 [Chaetomium globosum CBS 148.51]
  misc_feature (1)..(406): NCBI GI: 261353686 Blast Desc: solute carrier family 35 member F1 [Verticillium albo-atrum VaMs.102]
  misc_feature (4)..(393): NCBI GI: 189206644 Blast Desc: PTRG_09324 [Pyrenophora tritici-repentis Pt-1C-BFP] gi|187975749|gb|EDU42375.1| PTRG_09324 [Pyrenophora tritici-repentis Pt-1C-BFP]
  misc_feature: Useful for introducing or modulating the production of volatile compounds
MSDHYSTKPGDESSSPDHAVEVTASSDSHNQLQSSLPADGVTNEEVSRGIHELEGKSVQWWAYFTTRDFWIVLIVGQVLALSITSTNTFSSLLSMNKVSLPAFQSFFNYVLLTTIYVPYLIYSYGWKKVGKLLWRDGWRYFILSFFDVEGNYFTVLAYQYTNILSAQLINFWAIVIVVILSFLILRVRYKIWQVIGILICVGGTGLLIASDAINHINNYAGSNPVKGDLFALLGATFYGFSNTFEEWFVSKRPAYEVLAFLGFWGIFINGVQAAIFDRHTLQTGDFTPAVYGYITGYTLALTLFYSLIPYLLRLASAAFLNISLLTGNFWGTIIGIQVFGYSVYFLYPIAFVLIIIGQLIYFLAGSIFGDSKKPWLGAEQEDGVAGVGTAKLKAINAARRAAQEAEHGTGNGAENEVANGA

SEQ ID NO: 38964 - DNA, 6298 bp, Muscodor strobelii; identical to SEQ ID NO: 38958
  misc_feature: SGI EST ID NO. CUFF.93922.1
  misc_feature: Variant of the nucleotide sequence at SEQ ID NO 38962

SEQ ID NO: 38965 - DNA, 1122 bp, Muscodor strobelii
  misc_feature: SGI cDNA ID NO. 573549
  misc_feature: Reduced expression when VOC is produced
  misc_feature: Encodes the peptide sequence at SEQ ID NO 38966
atggcgcaatactatggagagtcccaatggcccagtgctggtcccgctgctcctcctcaaaacgcatgggaccaccagacaccaccgcctccacgatcttcaggtgccaactcagctgtacctcgtgaagacttggccgctttctcccatcaactagaggaggtggaacgtgccatcgacaacttggtcaagagcggcaaaatgtttggcgcgcccggtcgacatggtcgagcagtttcgggtcaccatgctcctcgccactccgtagagttctctgagggccggggagggggccactcgggtcccaacctacagaatttttatgccgctcaacgacatcaatcttctcgtggctccaacgaggcggagcagatgatgcaggccaagcggaggatggcagcacagcgagagagggagctccgcaactatcatcaggagcagcagtataaccgaaatgcaatgcctgacatgccctatgccggcaagtctgaccgcgctttgagcccaggcaatttgtccgaggatgatcgtcgtgatctcattgcgcgtcaacgtagtgcgctgtacggcgaaggtcattatgatgagaccggtaacgcccgatctggtctcactggcttgcccacgactacattgtcccagcgcgggccatctcctcttgcgttcgattacggacgccctactcctgacggtgctgatgcacaagccttgtcccgggccaatagcaatgccagtcctcagtccaacgcaccgaccaacattggcgccgctcgtactagcaactcttcgcctactggcggatctcctcctgggactggtatcgctggtagacaaggcccgactggaagcgcagtagcacccatcggaacgcgaccctcggctaactctcaagcacccaaccctatcttaaccaaatcatcgacgacgccgctcccctctcccctgagccatggcgtttccgcatcaggaagcggacaagaatctggccaggtctccgctacctcgggcgcgcctagcaacccacctagtgccgctcctgatggatacaatggctggggcaatcgctcaggtgtctggagtaacaagtccaacctcggagtccaggcaagtgtttggggatag

SEQ ID NO: 38966 - protein, 373 aa, Muscodor strobelii
  misc_feature: SGI Peptide ID NO. 573549
  misc_feature (1)..(373): NCBI GI: 116192859 Blast Desc: CHGG_06147 [Chaetomium globosum CBS 148.51] gi|88182060|gb|EAQ89528.1| CHGG_06147 [Chaetomium globosum CBS 148.51]
  misc_feature (4)..(373): NCBI GI: 145609634 Blast Desc: MGG_03109 [Magnaporthe grisea 70-15] gi|145017037|gb|EDK01400.1| MGG_03109 [Magnaporthe grisea 70-15]
  misc_feature (4)..(373): NCBI GI: 149210881 Blast Desc: MGCH7_ch7g913 [Magnaporthe grisea 70-15] gi|86196868|gb|EAQ71506.1| MGCH7_ch7g913 [Magnaporthe grisea 70-15]
  misc_feature (1)..(373): NCBI GI: 85111765 Blast Desc: NCU00541 [Neurospora crassa OR74A] gi|28925858|gb|EAA34857.1| conserved [Neurospora crassa OR74A]
  misc_feature (4)..(373): NCBI GI: 154308257 Blast Desc: BC1G_07874 [Botryotinia fuckeliana B05.10] gi|150852959|gb|EDN28151.1| BC1G_07874 [Botryotinia fuckeliana B05.10]
  misc_feature (4)..(373): NCBI GI: 256732311 Blast Desc: [Nectria haematococca mpVI 77-13-4]
  misc_feature (21)..(373): NCBI GI: 46105230 Blast Desc: FG00243.1 [Gibberella zeae PH-1]
  misc_feature (20)..(373): NCBI GI: 212530716 Blast Desc: conserved [Penicillium marneffei ATCC 18224] gi|210074913|gb|EEA29000.1| conserved [Penicillium marneffei ATCC 18224]
  misc_feature (20)..(373): NCBI GI: 240109201 Blast Desc: CPC735_027060 [Coccidioides posadasii C735 delta SOWgp]
  misc_feature (20)..(373): NCBI GI: 242817774 Blast Desc: conserved [Talaromyces stipitatus ATCC 10500] gi|218713482|gb|EED12906.1| conserved [Talaromyces stipitatus ATCC 10500]
  misc_feature: Useful for introducing or modulating the production of volatile compounds
MAQYYGESQWPSAGPAAPPQNAWDHQTPPPPRSSGANSAVPREDLAAFSHQLEEVERAIDNLVKSGKMFGAPGRHGRAVSGHHAPRHSVEFSEGRGGGHSGPNLQNFYAAQRHQSSRGSNEAEQMMQAKRRMAAQRERELRNYHQEQQYNRNAMPDMPYAGKSDRALSPGNLSEDDRRDLIARQRSALYGEGHYDETGNARSGLTGLPTTTLSQRGPSPLAFDYGRPTPDGADAQALSRANSNASPQSNAPTNIGAARTSNSSPTGGSPPGTGIAGRQGPTGSAVAPIGTRPSANSQAPNPILTKSSTTPLPSPLSHGVSASGSGQESGQVSATSGAPSNPPSAAPDGYNGWGNRSGVWSNKSNLGVQASVWG

SEQ ID NO: 38967 - DNA, 3454 bp, Muscodor strobelii
  misc_feature: SGI EST ID NO. CUFF.94188.0
  misc_feature: Variant of the nucleotide sequence at SEQ ID NO 38965
tcccccgtcaatcacccaagtcagagcaagtctccgattatttctcttgattttcccaatacttcccaataccacgccgcggcttctattactgtgcattgtacatacaacggcatcttacgccgtccccgtcgcccctgtccgcctcccttttctatccctctctcctcttaactctatctgctgcacccagccagaccccggctcgcggtatcctccagtccccagtctctagtccctgcgtgagcctcgagccttgagccttgagcctgttgctgagagaactggtcctttgctccgtcccggtgcaagcagagaccgtgtgtctgcgtagtgtatgtgcgcgtcgtactgtccggcgccgactttgcttttttctcccttttacccccaattcgacacacctccgtctcctaacgagcatctggcctgcgctgtgtcttgaacttcgttcgtcaagaccaaagaactgtgacccgtaagtcgccttcccgcgagacatactgcccctttcagcgtgtgcatgcgtgccagcccgtggccgcctccctgcccatctgcctcacagactttggcgcgacccggggcaacgggaacttagagcctaagcggtctgccgcggccaaactcaagtccatgcctgtgccgctcggccagtctatgtcaacgacatcgaagacatcatcgtgtctgtctgtcggaggtgctggttgcatcgagaccgggggattagctgcagtaacaaaggactgggacagtcagcatacaggagtgcgcgatgcacacgacagcaggctgcagtcgcgtatggtctctacgcaacccggtccgatgtgcagtggatgcagaatactctcgttgataccggcgtcacgtttttctgttgtgaagatatcgtttcggtcatccgactaaccttgggaatcagagaacaccatctttcctggacaccttgaagtcgatatcttcactctaccacccgcattactccacaccgattctctatttctactttcgataggtctatggcttctaaaaacaatatggcgcaatactatggagagtcccaatggcccagtgctggtcccgctgctcctcctcaaaacgcatgggaccaccagacaccaccgcctccacgatcttcaggtgccaactcagctgtacctcgtgaagacttggccgctttctcccatcaactagaggaggtggaacgtgccatcgacaacttggtcaagagcggcaaaatgtttggcgcgcccggtcgacatggtcgagcagtttcgggtcaccatgctcctcgccactccgtagagttctctgagggccggggagggggccactcgggtcccaacctacagaatttttatgccgctcaacgacatcaatcttctcgtggctccaacgaggcggagcagatgatgcaggccaagcggaggatggcagcacagcgagagagggagctccgcaactatcatcaggagcagcagtataaccgaagtaggccaccctcagctgtgtagcacaatatgtccatccaaatgaaaaaaagaaagaaacaacccaaatgtccaacggagcctaggtgttccttcgctccacagcacgcttccatcatgccgcatcctgagatcatgtaaagcctgtcacgaaatgccgtcctatattcttttcacagcacacccatcctcccatggtttcctgacagcaggctgacttctcatctgcagatgcaatgcctgacatgccctatgccggcaagtctgaccgcgctttgagcccaggcaatttgtccgaggatgatcgtcgtgatctcattgcgcgtcaacgtagtgcgctgtacggcgaaggtcattatgatgagaccggtaacgcccgatctggtctcactggcttgcccacgactacattgtcccagcgcgggccatctcctcttgcgttcgattacggacgccctactcctgacggtgctgatgcacaagccttgtcccgggccaatagcaatgccagtcctcagtccaacgcaccgaccaacattggcgccgctcgtactagcaactcttcgcctactggcggatctcctcctgggactggtatcgctggtagacaaggcccgactggaagcgcagtagcacccatcggaacgcgaccctcggctaactctcaagcacccaaccctatcttaaccaaatcatcgacgacgccgctcccctctcccctgagccatggcgtttccgcatcaggaagcggacaagaatctggccaggtctccgctacctcgggcgcgcctagcaacccacctagtgccgctcctgatggatacaatggctggggcaatcgctcaggtgtctggagtaacaagtccaacctcggagtccaggcaagtgtttggggataggctcccgatgctaaaggagacgacgtatcaaagctggtccaaggtgaatgggccacagccagggtagaggactcacatgaatggtgttcaggtcggaaggtttcttaaagtttgaggggacaagatatcctgcatcagcacaggtgtttgggccgttgatggtacattgcacggaaacaaacaggctctgggtgcttttgggcggacattgtttttcggagtttaatctttcttatttctctctatcccgtgtcgacatcccaggttctccgaatttcgagcaacggcaggcgtggtcacgatcctctcggccacctatatatgtctttaaggacaggtgggactctccactcatactcctggatctgcgtttggtcggacgagatcattatggacggaaaacaaaaattcatgggcgaacacaggcgacaacaacataaggggcattctggacggtacaaaggcaattaggcgatgtcacatcttttcgactggagttctatcacaatcatcgcttgggtatcaacaccgatcaaggcacggcgagcgggcaggcaggtttgcaaacggagttgtgtcatcattgtggtgcattatctttcaaactgttaagatacctggtgcgccacacggaggggtggttttgtgttttatgttcgagggaaacggagtgctctgcgagttattactcgagaacaggtggagctagacttgttggtaatgggagtgttgagtgtgaagatgggcagagagcaagtatgcaaaaacggagggcatcagggatatggctaaaggtggttctggttctgtttcgtcctttgtcggattctgttgtgtaaaagaagcatttggggagagtttgttttctgcgagggtcacctactgtcggctcggtcgggttcatacggttatggcggagtttttacaaatcttgttttcccagttcattgtcttctcatggtgcggtgatttgtgttttccctctatgagatgagtctatattaatatcgagactgactgcctaactgggctctacgaaatactacttagtattacgct

SEQ ID NO: 38968 - DNA, 894 bp, Muscodor strobelii
  misc_feature: SGI cDNA ID NO. 573550
  misc_feature: Elevated expression when VOC is produced
  misc_feature: Encodes the peptide sequence at SEQ ID NO 38969
atgttttcaaacctaactaccaagctggctatgaagaaagtcggtctgtcgagtgatacgttcgacttctcaaaatccaccaaaacttcttccagcggctctgtacctggtctagacgatattgatgagtccaatggctcgagttggccatcctggatgagcacgaagaaattacccctcacagcgcaagcttggctgtcacctgtgccccctcctgttcccgtcgcctcagaatgtcccaagcccggggatctggctccaatagatcgtgaccgccagcttgaatttggcggtgggaagcccgtgattgtattgttcatgcgctgtgttggatgcgctttcgcccaaaaatccttcctagctctccgtgccctctccacaaagcatcaaggcaaacttcgctgcatcgcagtctctcattcgtccccagcagcgactttgaaatggatcgacatgctaggcggaaaatggaacgttgaaatagtcgttgacgaagaccgcgctatctacgccgcatggggccttggtctcgggaacgtatggtacatgttcaaccctacgacacaggtagcaggatggaaggagaagggctggctgggcatcaaagtcgcagatgccgttcagaaatccggggctgccggatcactaacagcgaggaatactgcgagtgtcaagagaacgggcacggggatgagtacaaaaagccagaacaggagggatgcagaggagtttgaggatgaggacgcagggccttcaacagtcatgggcaataaatggcaacaatctgggctttttgccgtcgatggacgagcgactgttgtatggggcgcgaaagctgtgcgtgctgacgatgtcatggatctggatgcagcggctgcgatactagggttctga

SEQ ID NO: 38969 - protein, 297 aa, Muscodor strobelii
  misc_feature: SGI Peptide ID NO. 573550
  misc_feature (1)..(297): NCBI GI: 39971287 Blast Desc: MGG_03110 [Magnaporthe grisea 70-15] gi|149210885|ref|XP_001522817.1| MGCH7_ch7g915 [Magnaporthe grisea 70-15] gi|86196870|gb|EAQ71508.1| MGCH7_ch7g915 grisea
  misc_feature (53)..(295): NCBI GI: 261353688 Blast Desc: conserved [Verticillium albo-atrum VaMs.102]
  misc_feature (1)..(295): NCBI GI: 256732309 Blast Desc: NECHADRAFT_41784 [Nectria haematococca mpVI 77-13-4]
  misc_feature (1)..(295): NCBI GI: 46105236 Blast Desc: FG00246.1 [Gibberella zeae PH-1]
  misc_feature (1)..(295): NCBI GI: 171684137 Blast Desc: protein product [Podospora anserina] gi|170942029|emb|CAP67681.1| protein product [Podospora anserina]
  misc_feature (1)..(296): NCBI GI: 154308221 Blast Desc: BC1G_07856 [Botryotinia fuckeliana B05.10] gi|150852941|gb|EDN28133.1| BC1G_07856 [Botryotinia fuckeliana B05.10]
  misc_feature (1)..(296): NCBI GI: 156058818 Blast Desc: SS1G_03421 [Sclerotinia sclerotiorum 1980] gi|154701208|gb|EDO00947.1| SS1G_03421 [Sclerotinia sclerotiorum 1980]
  misc_feature (63)..(297): NCBI GI: 256729955 Blast Desc: NECHADRAFT_47175 [Nectria haematococca mpVI 77-13-4]
  misc_feature (1)..(297): NCBI GI: 189189832 Blast Desc: conserved [Pyrenophora tritici-repentis Pt-1C-BFP] gi|187972861|gb|EDU40360.1| conserved [Pyrenophora tritici-repentis Pt-1C-BFP]
  misc_feature (77)..(295): NCBI GI: 85082872 Blast Desc: NCU00015 [Neurospora crassa OR74A] gi|28918085|gb|EAA27766.1| [Neurospora crassa OR74A]
  misc_feature: Useful for introducing or modulating the production of volatile compounds
MFSNLTTKLAMKKVGLSSDTFDFSKSTKTSSSGSVPGLDDIDESNGSSWPSWMSTKKLPLTAQAWLSPVPPPVPVASECPKPGDLAPIDRDRQLEFGGGKPVIVLFMRCVGCAFAQKSFLALRALSTKHQGKLRCIAVSHSSPAATLKWIDMLGGKWNVEIVVDEDRAIYAAWGLGLGNVWYMFNPTTQVAGWKEKGWLGIKVADAVQKSGAAGSLTARNTASVKRTGTGMSTKSQNRRDAEEFEDEDAGPSTVMGNKWQQSGLFAVDGRATVVWGAKAVRADDVMDLDAAAAILGF

SEQ ID NO: 38970 - DNA, 1699 bp, Muscodor strobelii
  misc_feature: SGI EST ID NO. CUFF.93909.1
  misc_feature: Variant of the nucleotide sequence at SEQ ID NO 38968
cttcaacacgttgcgttttctttttccttggcgccagcctcgtgcaccccttcaccaatcaaatacgaggcgaaggtgatcagctttgggggctgcccctaagtacagggtctgagggtgctaaagcagacccccaacatgtgagacgcctccttgtatcaggcgagtttcctcagcctggtgcccctcgctgttggtgatgttttctttgtttcgcgtttcgagacgtccttgggctctagatttgttgtttgtgtcatttcctttttcttttctctccttcgtttctctgttggtttcctgttggtttcttatgagcagtctccctcattccgtaacatattgcacaacccatttacttgttgctcaaaatacccggatccttgctcgttgagctctgctatatctgtctgttaagcgttacgtgcgaccattttcaacatgttttcaaacctaactaccaagctggctatgaagaaagtcggtctgtcgagtgatacgttcgacttctcaaaatccaccaaaacttcttccagcggctctgtacctggtctagacgatattgatgagtccaatggctcgagttggccatcctggatgagcacgaagaaattacccctcacagcgcaagcttggctgtcacctgtgccccctcctgttcccgtcgcctcagaatgtcccaagcccggggatctggctccaatagatcgtgaccgccagcttgaatttggcggtgggaagcccgtgattgtattgttcatgcgctgtgttggatgcgctttcgcccaaaaatccttcctagctctccgtgccctctccacaaagcatcaaggcaaacttcgctgcatcgcagtctctcattcgtccccagcagcgactttgaaatggatcgacatgctaggcggaaaatggaacgttgaaatagtcgttgacgaagaccgcgctatctacgccgcatggggccttggtctcgggaacgtatggtacatgttcaaccctacgacacaggtagcaggatggaaggagaagggctggctgggcatcaaagtcgcagatgccgttcagaaatccggggctgccggatcactaacagcgaggaatactgcgagtgtcaagagaacgggcacggggatgagtacaaaaagccagaacaggagggatgcagaggagtttgaggatgaggacgcagggccttcaacagtcatgggcaataaatggcaacaatctgggctttttgccgtcgatggacgagcgactgttgtatggggcgcgaaagctgtgcgtgctgacgatgtcatggatctggatgcagcggctgcgatactagggttctgaagcggcgtcacgaatttgtttgctgcggttgtcttggattcggcgatttgtacggtcatgaaatcatgttgagccaggcgttaggcgaattgtcgagtcgaatgcagagattttgtcatccaaatgacccgacccctgaatcgaagatcgaaagctgctattcagctgatgtgaagaatctatagtcgaatcaacagctctaaggggcggaggctctatcgtctatatgcgaaatatgttatagtctttaggcttttgtttacatcatagtgtctatttcattattcgagatgcgtacgcatccgaccctcatctcacatatatttggagtttatatagttcgcaaaatatgtgtaatatagtg

SEQ ID NO: 38971 - DNA, 3876 bp, Muscodor strobelii
  misc_feature: SGI cDNA ID NO. 573551
  misc_feature: Encodes the peptide sequence at SEQ ID NO 38972
atggacagtcagcctatcacggccgactcgaaacatctttaccctgctcccgctccccatctctggcaacggtcctcctcgagtccggctgtgcctcgactcagctccttccagcagcccgcaggcgctcccgccgagtacccctccgcccagtgcccgacgcatctgagcctcgtgcccatcctgttccccgagcagtcgtcgctctaccaggcgaagctcctgcagtacaacaagctcattgcgcccggccgtggcggtgggctgcagacgcctcccttgcctcccatcctctctgcgccgcccgtccagtcgcagcccgtccacgccggacagagcgccggacccaggtcccgatcgttgtcgaaagtgtccagctccaacaaggattcccgcgtccggcagagctcccagcatgggaatagacccaatcagaacactcccaaggccgaccgcccgcttatgacaggcaagcccgccagcaccaagatgccacccaagaagtcagatgcgaatcatgggaatcatgggaaccatgtaaaccatggtctgccgcccaagcccaagacatccgtgtccccttccaacctggcaccgcactccagctccgtcccctctactccccaccagcatgcgcgcaagttctccttcgaatcgcgggagcactcgcccaacgcgaaccccagccactcgccccgttcagtctactcggagacgaacagcggtgtgccatcgttgaggccgttaccaccacggcagggaggctgcaaatacgagacggcgcccaaatattcgagacggaggataccgtatagcattggaactgatccgctagagaaggtagatgagaagagcgtgaagagcaaattaaccgaggacgacgagcggcagctgaccacagatatgcgtgaactgtatgaccggttacagccgaccgcggccgtggaggcaaagcggcagaagcttgtccagaaactggagaagcttttgaatgacacctggccgggacacgagatccgcgtccatctctttggatcatcgggcaaccttttgtgccacgatgactccgatgtggatatttgcatcacgacgccctggaaggaactggaaggtgtttgcatgcttgcggatctgctggcgaaacacggtatggagaaggtagtctgtgtctcgtcagccaaagtcccgatcgtgaagatatgggatccggagctggagctcagctgcgacatgaacgtcaacaataccctagccctcgagaatactcgcatgatcaagacatatgtcgagatcgatgaccgggtccgtcctcttgccatgatcatcaagcactggacacggcggcggattgtcaacgatgctgctttcgggggtacactaagctcgtatacctggatttgcatgatcattgcttttctgcagctgcagcaacctccagttctgcccgccttgcaccaacggccacaccagaagctctcgaagccagacggcggcatcgcagccttcgccgatgatttggccaagttacgaggatatggaagcaagaacaaatcgacactcggagagctcctctttcagttctttcgcttctttgcgcatgactttgactattcttcccgtgtgctctccgttagaatgggcaagctactaaccaaagaagagaagaaatggcattttcaggtgaacaatgagctttgtgttgaggaaccgttcaacaccaatcgtaacttgggcaatactgcagatggctatgccttccgcggcatccatcttgagttgcgtcgtgctttcgacctcgtagcccaaggcaaattggacgagtgctgcgagcaattcgaatatcccaaggaagaggagaggatcttccaaaagcctccgcctgtttcgcgcccagtgttgcttagaagtgcatcgcaacaacaacaggctcgccctgctaggggaggaacatttcgcaacggaaaccgacaacatcgaaataacaatgggaaccataataatagcaatagcaacaaccgaagagcctcggccggcctgacgttcgacaacacgccaacccccatgtatattccagcggcctacgcactgagtttaggattgcaagatcccaactcgatgtatatgcacagtccagacttcgttgccacatactcggctttgcaacttcaagagaacaacctgagatttctacaatatacgcagtcgcaagcatttgcgcagcagcaagctttacagcatgcccaaaggatgcaaggggcgacatcgcagtcgcagtcgtccactgaacgctctaggggtaattctttcgacacgccaccgctgagcgctcctctccgtgctgacatgcagtattactatccagtagctttgcaacagacacctgctttctatagttatgctggagcgtatccctcctcgccgtccactaatgtcacgggcactgctgaatatcgacggccttcccaccgatccaccactgcgagtgatgctagccacggctcatctggtagcgctctcaggtcccaatcacagcccgcctcgcggcctatgcctgtgatgtcctcggctcagaacttcgttcttcctgggcaaatgcctatgcattacgctagcgcaccttcgcgccacgcgaacggggtccctattccaagcttcatccccgatgagaataacgactatgagccagcgccatcaaccaccaactctcctggcgagagtcaaggcagcctgcgctatgcgagccctagtagtactcagggatcgatctcagtcacaaatggcatgccgtcttttggcgacataagttcccttccggacagtcccagtcagcagcatgtatcttatgatcagtttgtccaaaatacacctgaaagcaccatgactagatcaaagtcaccctcgccaattagccaagatttctctccagagagtagcaatagatctgcgacgttgaactccagcccgttccctgcaaagcaatccccacgggatactggcccactggttgtcaatggatctcagccggcgatacccaccacaactactccgcgacccatcgtgtcgggagatggtggtggggctaatgactatcgagggtatgataatgcgcttcagattaaccaagatgtcaagacgccctcccagtcttcgacctcttcgtcagaccagacggagacccctcacacgtacaagacatctatgtctggacccccgatgatcgtgaacggctctagaccaacagcaggcactgcctcccagatccaacctcggccgtactttcatgaagcaacaacgtcaaaccaaaacggtgctcataatgttacacattggccaatctcgatggcagcgcctacgagcaatgtgttgccttcagcgcaacagtccacatacacgcaccgattccagcgtggtgcgtccaaccacctcattgcccagctcgatctggcgacggagaatagcttcccatcacataacatgcctcatctatctcctgtctacgagaacaaaagcccgtcgccgcatgtatcgcgcaatttagaccagcctcccggtgagaatcaatcccgtcagaacggtacaaatcaacgccgacatcaagctgcatcagaggcaagcaaaaacaagcagaagtcatcaattgacggcccggccaccgaggctggggcctcttcgcattcaaacccgaaggtcaacggcctaatgcgagaaaatggtcacaatcgcagggcgaagagcgagagcgaaaacgttgccgccggtggtacttggcagaagtcgcgtgggaaaaagaagtcaggtgaccctaaagggcgtggggaagcatcctcacaaagcgaacagcccccgaagaacgatgcagacagaaaaggaggctga

SEQ ID NO: 38972 - protein, 1291 aa, Muscodor strobelii
  misc_feature: SGI Peptide ID NO. 573551
  misc_feature (323)..(429): Pfam Id: PF01909 Pfam Desc: Nucleotidyltransferase domain
  misc_feature (519)..(575): Pfam Id: PF03828 Pfam Desc: Poly(A) polymerase
  misc_feature (1)..(1291): NCBI GI: 256732308 Blast Desc: NECHADRAFT_93859 [Nectria haematococca mpVI 77-13-4]
  misc_feature (49)..(1291): NCBI GI: 46105240 Blast Desc: FG00248.1 [Gibberella zeae PH-1]
  misc_feature (1)..(1291): NCBI GI: 171684135 Blast Desc: protein product [Podospora anserina] gi|170942028|emb|CAP67680.1| protein product [Podospora anserina]
  misc_feature (48)..(1291): NCBI GI: 145609622 Blast Desc: MGG_09124 [Magnaporthe grisea 70-15] gi|145017029|gb|EDK01392.1| MGG_09124 [Magnaporthe grisea 70-15]
  misc_feature (67)..(1291): NCBI GI: 149210899 Blast Desc: MGCH7_ch7g922 [Magnaporthe grisea 70-15] gi|86196877|gb|EAQ71515.1| MGCH7_ch7g922 [Magnaporthe grisea 70-15]
  misc_feature (198)..(1291): NCBI GI: 116192867 Blast Desc: CHGG_06151 [Chaetomium globosum CBS 148.51] gi|88182064|gb|EAQ89532.1| CHGG_06151 [Chaetomium globosum CBS 148.51]
  misc_feature (175)..(1291): NCBI GI: 261353689 Blast Desc: Poly(A) RNA polymerase cid11 [Verticillium albo-atrum VaMs.102]
  misc_feature (77)..(1291): NCBI GI: 154308271 Blast Desc: BC1G_07881 [Botryotinia fuckeliana B05.10] gi|150852966|gb|EDN28158.1| BC1G_07881 [Botryotinia fuckeliana B05.10]
  misc_feature (201)..(1008): NCBI GI: 121713318 Blast Desc: PAP/25A associated domain family [Aspergillus clavatus NRRL 1] gi|119402423|gb|EAW12844.1| PAP/25A associated domain family [Aspergillus clavatus NRRL 1]
  misc_feature (201)..(896): NCBI GI: 145235221 Blast Desc: An03g03780 [Aspergillus niger] gi|134057940|emb|CAK47817.1| protein product [Aspergillus niger]
MDSQPITADSKHLYPAPAPHLWQRSSSSPAVPRLSSFQQPAGAPAEYPSAQCPTHLSLVPILFPEQSSLYQAKLLQYNKLIAPGRGGGLQTPPLPPILSAPPVQSQPVHAGQSAGPRSRSLSKVSSSNKDSRVRQSSQHGNRPNQNTPKADRPLMTGKPASTKMPPKKSDANHGNHGNHVNHGLPPKPKTSVSPSNLAPHSSSVPSTPHQHARKFSFESREHSPNANPSHSPRSVYSETNSGVPSLRPLPPRQGGCKYETAPKYSRRRIPYSIGTDPLEKVDEKSVKSKLTEDDERQLTTDMRELYDRLQPTAAVEAKRQKLVQKLEKLLNDTWPGHEIRVHLFGSSGNLLCHDDSDVDICITTPWKELEGVCMLADLLAKHGMEKVVCVSSAKVPIVKIWDPELELSCDMNVNNTLALENTRMIKTYVEIDDRVRPLAMIIKHWTRRRIVNDAAFGGTLSSYTWICMIIAFLQLQQPPVLPALHQRPHQKLSKPDGGIAAFADDLAKLRGYGSKNKSTLGELLFQFFRFFAHDFDYSSRVLSVRMGKLLTKEEKKWHFQVNNELCVEEPFNTNRNLGNTADGYAFRGIHLELRRAFDLVAQGKLDECCEQFEYPKEEERIFQKPPPVSRPVLLRSASQQQQARPARGGTFRNGNRQHRNNNGNHNNSNSNNRRASAGLTFDNTPTPMYIPAAYALSLGLQDPNSMYMHSPDFVATYSALQLQENNLRFLQYTQSQAFAQQQALQHAQRMQGATSQSQSSTERSRGNSFDTPPLSAPLRADMQYYYPVALQQTPAFYSYAGAYPSSPSTNVTGTAEYRRPSHRSTTASDASHGSSGSALRSQSQPASRPMPVMSSAQNFVLPGQMPMHYASAPSRHANGVPIPSFIPDENNDYEPAPSTTNSPGESQGSLRYASPSSTQGSISVTNGMPSFGDISSLPDSPSQQHVSYDQFVQNTPESTMTRSKSPSPISQDFSPESSNRSATLNSSPFPAKQSPRDTGPLVVNGSQPAIPTTTTPRPIVSGDGGGANDYRGYDNALQINQDVKTPSQSSTSSSDQTETPHTYKTSMSGPPMIVNGSRPTAGTASQIQPRPYFHEATTSNQNGAHNVTHWPISMAAPTSNVLPSAQQSTYTHRFQRGASNHLIAQLDLATENSFPSHNMPHLSPVYENKSPSPHVSRNLDQPPGENQSRQNGTNQRRHQAASEASKNKQKSSIDGPATEAGASSHSNPKVNGLMRENGHNRRAKSESENVAAGGTWQKSRGKKKSGDPKGRGEASSQSEQPPKNDADRKGG

SEQ ID NO: 38973 - DNA, 6918 bp, Muscodor strobelii
  misc_feature: SGI EST ID NO. CUFF.94058.3
  misc_feature: Variant of the nucleotide sequence at SEQ ID NO 38971
ctggtaggcagtgcatgattctatttgggaagacaaatgcgagatgctgacctacagcggctcgagttgtcgctgagagctaaaagcagacatacccggccgtgtataccttcctaccctggcagctgctggacggccacttgggattagtactgagcaacacgagaaatcgatcagtagtacagcgtgcaaatggtaaagtggaaaggacgcatcattgtgttggatttggcgacaacaatactcattgataatcatgtgtatagtggttccgattgaaaacaggtctgggtctttcaggagcaatgttggctgggatgccttgttatatcatattctacttatgttggtgcttcaatgttggtatagttgattccgcctttgcggattgaaccgctatcgaatgttgccacgatattctcaccttgcaactaacagaacgatttacgaatgttcaatgttagcccagataggtacctcttagctggtggggtgatgacctcagatacaggacctgttagactccagacttgtcctcgtcgccggtgactcgcacgctagtacgtagtgacgtgtaagctggaggtaccattttgtgcagggccgagtcgtttctgacccgatttacaatttcgcgttgctaattgagtgcgatctgatgacccttggaaccttgaggacccttgggtcgaccttggcagtgtaaaagtgaaagaccaatgtagaaattccgtagactcgatacagtagacagcaggcgcacagatttggttgtccgtcccattgaaattggcttgttgtcgtccgatttgacgcttcccttggacttggaggattgacaaccaactttggggattcatctcattcgtcagtctcacgagttgctcatcagtcttttgtatagtatcccagcggcatagttacgaaacaaagcaggccccggttcccattgcagttctcaagtcaccccctcgacagacaggacagacagagaacgcggaaaggaacagcaggaagtacctttagtgatcctgcacccgcatcctcgtcacccgtcaggttgtcctgtccctgccacggtggggagagtgcgctgtgcctgctgccacgggccacggtctgccacacattgcacactgcacgctgcagacacagagcacatacccatatcccgtacatgcccatacatatctccaccgcatactacccgcatacctgctgcacgctaccaactctactattcctcctacctgccgtataccgacctccaccgttgttcctccttctcaacctcgcacgacacgacactctacccagccgtcctgtcgcggttgctccctcttctttcttcttcttttactatattttctttggaagccaccgacgactgtcgtttcactcccattcagcgactgctgacgtgcatctcgcctgcgacacccccccttttcacgacccgttggtcaccgtccgccgtgcttattcaatattcaacgcctcctctcactcgcccagcaaccagcctcttgatcccgccccgtctggtgcgtccgtctcgacgactcgaactactcccgctgctcagcctcccggtcaacagcttgtgtgcgtcgggatgcactgatcctagctcgactgtcacccctcgcgcccacctctcttcgttgtcgtctgctgctctcgactctcgacactcgacactcgacccatgagcatcctcgcctgtgtttctcgggtgtgactgcgactgcattctctactgtatccatactctgcaaatagccggcgacacttgtcatagatccactggtattctctgcattctcgacatccttcatacttctgccttcagctccgctgctctggtgtcgaccactgtcctacctgtctctggccctcctcggcaaagcatatgctctctcaagccgcctgactgcctcttaccggcctcacatagactgctctaccagttcgtccactcaacattcggctactggtctcgtgtttcgtgtttcgttttgctggaacacgcgtctctactctctcttcgaagattcccgtttgcattgttctccgcagcttcagcttcgacagctttgatagctcgcacactcgtcgttgtacgtgcagtgggactgggttcaaggcgactgctcttgctgttgctgctcctctgcccgccacgcttcagccggttgttcgggccgggccgatctcttcatggacagtcagcctatcacggccgactcgaaacatctttaccctgctcccgctccccatctctggcaacggtcctcctcgagtccggctgtgcctcgactcagctccttccagcagcccgcaggcgctcccgccgagtacccctccgcccagtgcccgacgcatctgagcctcgtgcccatcctgttccccgagcagtcgtcgctctaccaggcgaagctcctgcagtacaacaagctcattgcgcccggccgtggcggtgggctgcagacgcctcccttgcctcccatcctctctgcgccgcccgtccagtcgcagcccgtccacgccggacagagcgccggacccaggtcccgatcgttgtcgaaagtgtccagctccaacaaggattcccgcgtccggcagagctcccagcatgggaatagacccaatcagaacactcccaaggccgaccgcccgcttatgacaggcaagcccgccagcaccaagatgccacccaagaagtcagatgcgaatcatgggaatcatgggaaccatgtaaaccatggtctgccgcccaagcccaagacatccgtgtccccttccaacctggcaccgcactccagctccgtcccctctactccccaccagcatgcgcgcaagttctccttcgaatcgcgggagcactcgcccaacgcgaaccccagccactcgccccgttcagtctactcggagacgaacagcggtgtgccatcgttgaggccgttaccaccacggcagggaggctgcaaatacgagacggcgcccaaatattcgagacggaggataccgtatagcattggaactgatccgctagagaaggtagatgagaagagcgtgaagagcaaattaaccgaggacgacgagcggcagctgaccacagatatgcgtgaactgtatgaccggttacagccgaccgcggccgtggaggcaaagcggcagaagcttgtccagaaactggagaagcttttgaatgacacctggccgggacacgagatccgcgtccatctctttggatcatcgggcaaccttttgtgccacgatgactccgatgtggatatttgcatcacgacgccctggaaggaactggaaggtgtttgcatgcttgcggatctgctggcgaaacacggtatggagaaggtagtctgtgtctcgtcagccaaagtcccgatcgtgaagatatgggatccggagctggagctcagctgcgacatgaacgtcaacaataccctagccctcgagaatactcgcatgatcaagacatatgtcgagatcgatgaccgggtccgtcctcttgccatgatcatcaagcactggacacggcggcggattgtcaacgatgctgctttcgggggtacactaagctcgtatacctggatttgcatgatcattgcttttctgcagctgcagcaacctccagttctgcccgccttgcaccaacggccacaccagaagctctcgaagccagacggcggcatcgcagccttcgccgatgatttggccaagttacgaggatatggaagcaagaacaaatcgacactcggagagctcctctttcagttctttcgcttctttgcgcatgactttgactattcttcccgtgtgctctccgttagaatgggcaagctactaaccaaagaagagaagaaatggcattttcaggtgaacaatgagctttgtgttgaggaaccgttcaacaccaatcgtaacttgggcaatactgcagatggctatgccttccgcggcatccatcttgagttgcgtcgtgctttcgacctcgtagcccaaggcaaattggacgagtgctgcgagcaattcgaatatcccaaggaagaggagaggatcttccaaaagcctccgcctgtttcgcgcccagtgttgcttagaagtgcatcgcaacaacaacaggctcgccctgctaggggaggaacatttcgcaacggaaaccgacaacatcgaaataacaatgggaaccataataatagcaatagcaacaaccgaagagcctcggccggcctgacgttcgacaacacgccaacccccatgtatattccagcggcctacgcactgagtttaggattgcaagatcccaactcgatgtatatgcacagtccagacttcgttgccacatactcggctttgcaacttcaagagaacaacctgagatttctacaatatacgcagtcgcaagcatttgcgcagcagcaagctttacagcatgcccaaaggatgcaaggggcgacatcgcagtcgcagtcgtccactgaacgctctagggtagctttgcaacagacacctgctttctatagttatgctggagcgtatccctcctcgccgtccactaatgtcacgggcactgctgaatatcgacggccttcccaccgatccaccactgcgagtgatgctagccacggctcatctggtagcgctctcaggtcccaatcacagcccgcctcgcggcctatgcctgtgatgtcctcggctcagaacttcgttcttcctgggcaaatgcctatgcattacgctagcgcaccttcgcgccacgcgaacggggtccctattccaagcttcatccccgatgagaataacgactatgagccagcgccatcaaccaccaactctcctggcgagagtcaaggcagcctgcgctatgcgagccctagtagtactcagggatcgatctcagtcacaaatggcatgccgtcttttggcgacataagttcccttccggacagtcccagtcagcagcatgtatcttatgatcagtttgtccaaaatacacctgaaagcaccatgactagatcaaagtcaccctcgccaattagccaagatttctctccagagagtagcaatagatctgcgacgttgaactccagcccgttccctgcaaagcaatccccacgggatactggcccactggttgtcaatggatctcagccggcgatacccaccacaactactccgcgacccatcgtgtcgggagatggtggtggggctaatgactatcgagggtatgataatgcgcttcagattaaccaagatgtcaagacgccctcccagtcttcgacctcttcgtcagaccagacggagacccctcacacgtacaagacatctatgtctggacccccgatgatcgtgaacggctctagaccaacagcaggcactgcctcccagatccaacctcggccgtactttcatgaagcaacaacgtcaaaccaaaacggtgctcataatgttacacattggccaatctcgatggcagcgcctacgagcaatgtgttgccttcagcgcaacagtccacatacacgcaccgattccagcgtggtgcgtccaaccacctcattgcccagctcgatctggcgacggagaatagcttcccatcacataacatgcctcatctatctcctgtctacgagaacaaaagcccgtcgccgcatgtatcgcgcaatttagaccagcctcccggtgagaatcaatcccgtcagaacggtacaaatcaacgccgacatcaagctgcatcagaggcaagcaaaaacaagcagaagtcatcaattgacggcccggccaccgaggctggggcctcttcgcattcaaacccgaaggtcaacggcctaatgcgagaaaatggtcacaatcgcagggcgaagagcgagagcgaaaacgttgccgccggtggtacttggcagaagtcgcgtgggaaaaagaagtcaggtgaccctaaagggcgtggggaagcatcctcacaaagcgaacagcccccgaagaacgatgcagacagaaaaggaggctgatcaagccttatatcgtgtcccggcgttcttattgcggtggtctttatgatttcttggatagccaccgatggtcagcatcatatgtcgaaacgcggagctcgtaggcaatttgatatacccgactgtattggacatcatccggtgtcagggtagtttcttgccccttcgagacaaagtcgttccggcccttctccctcccgagcctggatgtccggttactacctctttgctgcgagaaagcgagacggagagaaccctggtgcatcaaccgagcgatcggcgtgttgatccactgcggcgctaaaggtgtggtgactggcgtggtcgatgtctccggcactactcactccgtgcgacctcttacgctgaaaacatgcttgagccaacattgaggcatgctccaggcagactgaaacacaccgtattcgagaagagcttaaatcctgctcggccgacaacacatatacatctcaagggagggagctctggacggacgtccattttctcatatttgtactaacaagttggacgagtgttggaagtgcaggtgcaagttatattataggctgtacgcttgggagcatgttagttttgatcgaaaagccggagcgcggagcattttcatggatagggattagcaagtcacgtcatgttggcgcttcggatttacctagccttctgaggatcggggcagttcaaggttcatggcggcgaaaatcatagaccctacaatagagagaaacggtataggaatgaaacaaaaataaaactaggacagttacaaaaaaacaagcatttagattacgcattcacagcggacactgatagaattcccaagaggcggtcggataggtataggtattcgttatgagcaaatattttatgaac

SEQ ID NO: 38974 - DNA, 2121 bp, Muscodor strobelii
  misc_feature: SGI cDNA ID NO. 573552
  misc_feature: Encodes the peptide sequence at SEQ ID NO 38975
atgatcgggaccggggatcatcaactgtaccaaccattgaaccactctaggcaagagattcgcgttctgcgcccgaaatgtttgtctacacccgatgctgttgtacggggttcgctaccaacatcggcggcgatcacagtcataccagatctcaccctcgaattcgacttagatgtgatctccttacttgatcatccggaatacactactctctcgtaccgttggggctctgaaaaagaccccgaaaccatctcagtagacggcagccagttccttgtcacacggagcctatacaccgcgttgcgccacttgagctcttcggatatagggaaaggaatatggatcgacatgatctgtatcaatcaaactgatgccaccgaaagagatgagcaggtcatgatgatggatcgcatttattctaacgccatccgctgcatcgcatggttaggcgaagccacgactcacagcgcgtattttgcggactgtttgcacaggttgaaaacaactgcgtgtgagaggttcaacattccagagaagccaaagtatgacttatacgactatatcgaattcgaaacagaagctgaggcacttgagtttgtgcgccagataatgcttcctcctgctaacaatgccagcgataatgttacatccgcaacacccacttacgcagcgccgggggaattctgtcgtgcatttgttgagttcatgagtagtcaggactggtggttccgggtgtggataatccaagaatttgtcctgagccgcgcagtagttttccagattggcggcatggagtgtttggtagatgaaggacttaattccgcctttccgtttgcgtcgatcgcccagacaccgggttacccatgggttacgcggcttctgtactatcgcgagcgtcgcgtgggagggtccttcttagaccatacgagcgtctttgaagtattatgcgcgacttactgccagccgttccaccctaatttgactaacggaatcggtgatttatcaagagcgcctggggcaaagcaaaaacgagaccatatttggggcctccggagcctgttcgccagcgacttccaagacatgggactcaaggaggttaatcacaaatatctcacctgggaggatgtctactgtgatgtagcacggtgtttgatcgaacacggtcatctggacatcttgagtcttcgaacttctggcatggtgagcgtggaagcacagcagcaactaccatcctgggtacctgtgtggcatgaccctatccagccgccgtttccttcgttcacgatcataagaaaagagaagtcaaaggatggatttagattgcgaaacagagaaaacaacctcccccaaggcaactctctattcagtgcaggcactcaaagaaaggttgaggttaccttcggggccgaacagttaacagcgagtcgcgcaaagctcaaggaccgcagcatgcatattgccggtatcagagtggatgagatattgaatcttcgagaagccgcctggcgcatcccaatcatggaccaagagtatcccgacaatggggaagatccgatgcacagagcgaccaatgcaagcgagattgcttataagacgtgtctcccccttttccagtcaatcagagcacatacatcggagcaaaacgccctccacatgctgcatcattcctatcttcaagctctgtggacatggccacggattctattttaccgagcactttctgcctatcacttcggcaaacacatacacgagctgccttcgtggagaaagcctttgggttttctcaaatggatataccagtctcttgcaacgtctagagatcccttatacgtacgaagaattgtgtcgcctgatgtctctaaatatatgctttccatggaattaggccgcgccatcagaccgttcatcaccaagaagggctatattggacttggccccccttcatcacaaccgggggatatgctctgtgtattcttcggatcttatataccccatatcctacacccagtgtcggaacctacaggcacttatactttcgtaggcgatgcgtatacgtatggtctaatggatggtgaggctttgaacctaggctacgacacgacacagttttgtatacggtga

SEQ ID NO: 38975 - protein, 706 aa, Muscodor strobelii
  misc_feature: SGI Peptide ID NO. 573552
  misc_feature (68)..(250): Pfam Id: PF06985 Pfam Desc: Heterokaryon incompatibility protein (HET)
  misc_feature (113)..(150): Pfam Id: PF06985 Pfam Desc: Heterokaryon incompatibility protein (HET)
  misc_feature (10)..(696): NCBI GI: 256724627 Blast Desc: NECHADRAFT_84376 [Nectria haematococca mpVI 77-13-4]
  misc_feature (9)..(705): NCBI GI: 67538668 Blast Desc: AN5504.2 [Aspergillus nidulans FGSC A4] gi|40743474|gb|EAA62664.1| AN5504.2 [Aspergillus nidulans FGSC A4] gi|259485046|tpe|CBF81783.1| TPA: HET domain protein nidulans
  misc_feature (50)..(416): NCBI GI: 256721799 Blast Desc: NECHADRAFT_53281 [Nectria haematococca mpVI 77-13-4]
  misc_feature (53)..(705): NCBI GI: 116198933 Blast Desc: CHGG_07622 [Chaetomium globosum CBS 148.51] gi|88178901|gb|EAQ86369.1| CHGG_07622 [Chaetomium globosum CBS 148.51]
  misc_feature (57)..(416): NCBI GI: 256724252 Blast Desc: NECHADRAFT_87550 [Nectria haematococca mpVI 77-13-4]
  misc_feature (8)..(276): NCBI GI: 154292443 Blast Desc: BC1G_14540 [Botryotinia fuckeliana B05.10] gi|150846126|gb|EDN21319.1| BC1G_14540 [Botryotinia fuckeliana B05.10]
  misc_feature (59)..(426): NCBI GI: 169777885 Blast Desc: [Aspergillus oryzae RIB40] gi|83772145|dbj|BAE62275.1| protein product [Aspergillus oryzae]
  misc_feature (1)..(669): NCBI GI: 39975543 Blast Desc: MGG_00082 [Magnaporthe grisea 70-15] gi|145019080|gb|EDK03359.1| MGG_00082 [Magnaporthe grisea 70-15]
  misc_feature (10)..(262): NCBI GI: 171693637 Blast Desc: protein product [Podospora anserina] gi|170946767|emb|CAP73571.1| protein product [Podospora anserina]
  misc_feature (65)..(688): NCBI GI: 46111023 Blast Desc: FG02393.1 [Gibberella zeae PH-1] gi|82779921|gb|ABB90278.1| heterokaryon incompatibility protein [Gibberella zeae]
MIGTGDHQLYQPLNHSRQEIRVLRPKCLSTPDAVVRGSLPTSAAITVIPDLTLEFDLDVISLLDHPEYTTLSYRWGSEKDPETISVDGSQFLVTRSLYTALRHLSSSDIGKGIWIDMICINQTDATERDEQVMMMDRIYSNAIRCIAWLGEATTHSAYFADCLHRLKTTACERFNIPEKPKYDLYDYIEFETEAEALEFVRQIMLPPANNASDNVTSATPTYAAPGEFCRAFVEFMSSQDWWFRVWIIQEFVLSRAVVFQIGGMECLVDEGLNSAFPFASIAQTPGYPWVTRLLYYRERRVGGSFLDHTSVFEVLCATYCQPFHPNLTNGIGDLSRAPGAKQKRDHIWGLRSLFASDFQDMGLKEVNHKYLTWEDVYCDVARCLIEHGHLDILSLRTSGMVSVEAQQQLPSWVPVWHDPIQPPFPSFTIIRKEKSKDGFRLRNRENNLPQGNSLFSAGTQRKVEVTFGAEQLTASRAKLKDRSMHIAGIRVDEILNLREAAWRIPIMDQEYPDNGEDPMHRATNASEIAYKTCLPLFQSIRAHTSEQNALHMLHHSYLQALWTWPRILFYRALSAYHFGKHIHELPSWRKPLGFLKWIYQSLATSRDPLYVRRIVSPDVSKYMLSMELGRAIRPFITKKGYIGLGPPSSQPGDMLCVFFGSYIPHILHPVSEPTGTYTFVGDAYTYGLMDGEALNLGYDTTQFCIR

SEQ ID NO: 38976 - DNA, 975 bp, Muscodor strobelii
  misc_feature: SGI cDNA ID NO. 573553
  misc_feature: Encodes the peptide sequence at SEQ ID NO 38977
atggatagccgtcttgagcagttccttttcacagcagcacactattgctcagaggcccagatgaagtttcttctagaagccggcattaaccgcgacggcagtgcatggacggacacttcctctattaaggaacttctaatattatcattcaaggacgaaaccagcattgacgattcggcaaagatagctcgtggccttatttcatgcattagcgaccctaacgacactttgtactacaggtcgagcaggaagcttccggaaattgcgccactcccgcaaacattttggcaatggctcctgctccatgtacatgattctatgcaatctgatcttcgtgctttggctcgcacagggagcctcgacatcactatcaatgttttggtctcattcctagagaaaggagctcgatataacgaaaaggttataggaagtgcaacaaaatcctctaagacgacttgcagcactgcagacgagctcatcgagactttctgcacccgggcttgggacgttcgacaatcataccggctgagtaaagcttttcatagccggttaccaaacgcaacacgaacggatgactcgatgcatgacgccgatgctttgtcgaccctggcagagcaattaacaaaaatcaacgctttcttccgtactgtatggggaggagacactccgtgggtcgattataccgtgctaagcactaagagggagatgaagagcggagcaaagcacaaagaggtagcagcagctaagcaggtacttcaagcggagaaggcttggaacacgacgagacgggctgatcggataaaattgctgaacgacgaagaccaggccttggcggcacaactgtctaagaaaaacactactgcccgagagcagcgaaaaacattctcagaattgatgaagcggtcaatcaatcagcaggaaaagatcctacgatgtgcggaatctctgcaaagtgacgaggatcaaaagtattga

SEQ ID NO: 38977 - protein, 324 aa, Muscodor strobelii
  misc_feature: SGI Peptide ID NO. 573553
MDSRLEQFLFTAAHYCSEAQMKFLLEAGINRDGSAWTDTSSIKELLILSFKDETSIDDSAKIARGLISCISDPNDTLYYRSSRKLPEIAPLPQTFWQWLLLHVHDSMQSDLRALARTGSLDITINVLVSFLEKGARYNEKVIGSATKSSKTTCSTADELIETFCTRAWDVRQSYRLSKAFHSRLPNATRTDDSMHDADALSTLAEQLTKINAFFRTVWGGDTPWVDYTVLSTKREMKSGAKHKEVAAAKQVLQAEKAWNTTRRADRIKLLNDEDQALAAQLSKKNTTAREQRKTFSELMKRSINQQEKILRCAESLQSDEDQKY

SEQ ID NO: 38978 - DNA, 3565 bp, Muscodor strobelii
  misc_feature: SGI EST ID NO. CUFF.93745.0
  misc_feature: Variant of the nucleotide sequence at SEQ ID NO 38976
agtttgttgactttgcacacaagattattcgcgagggaaaacaaatctctgtgtctggtagctccttgagcgttgaacatctctcacttgttaccaatgacttgaaagctcttttggggtcgttgagaagccagaaaagcatttgcattcagagagggagcagtattgacgaagaggatcaggtacgtatacggttaccaagctgagtaaaagtcatttcgccaatattcgtctcgatgaacaggcattgttggaactagcatcgggctgtgacgaggtcgccgaggctattctagacggcttgaactgcttaccaaaagtagctaccaataacaaaagcgatcaaggaactagattgcggtcgattagaactgcgctcaagatagtatggggaaccaagagacttgctgagctgcaaggacgcttagacaactatcggacagagatctcgttgcggttgcttgtatatattaatacgagccaacttgtacagtcgcaagtccttaatcagctcagacagagcagtgaagagatcaccgaggttctatcgcttcagtgcaagacaatacgcctccaaattgaagagataaatggaagtttcacccgcttggacgaattgaatcgcaaagaggcggatgcacgacatgcagctacaattgcggcaatcttaacaactaaaaacggcaactcagtagccatatatgatcatcagacatcaagagataattctctgaagggatcaactgcaaacgaagagactttggtgtcaagaaacttctcgggtgatttcgcaaataaggctttggttacagcaaaatattcccccccagcagtcattcagttgaaacacttcagtgaagcaatccttgctgcattggagtttaaagagatgagagaccgacaggctgaagtcacccccgcatacagtaagacgctgagctggatatataaggatccaaaggaagtcggacggcggtgggacaatttcgatcagtggctacgatgcggttctggaatatactggatcaatggcaaggcgggctccgggaagtcaactctcatgaaatatgtgagtaatcacgaacatacaagcgctcgcttaaaagaatgggcaggaggtcatcaacttctcgttgggtcattcttcttctggtacgggggctgcacgctgcaacgttctcgagctggattgctacgggctttacttcactgtgtttgtggccagcaaccgcaccttatacccttgttatttcccagcatcatcaaggttttgaattccccgaatataccgtctccgctgcaactaaccgaaacggaactacgaagcgcattctataaccttatatccggaggcttccttcgctctaaagtatgcttcatcattgacgggttggacgaatacgaaggagaccatgacgagctagcgagtctgtttgctcaagcgtcgagttcagacatgataaaactgatcatttcaagtcgcccgctccctgcttgcatgttcgcattttcaaattattccactctacaactacaagatctaacctccaatgatatccttcactacgctactactgagctccgtcagcatcctatactcgagcggttggaaatggcaatgccgggaacgacgaatgaacttattgaaactatcgtttcgaaggcttcaggagtgttcttgtgggtcgccgtggtaataaagctcttacgcgaagggcttcgagattacgacacgatagatgatcttcgccaaagattggtcgatctgcctgaggagctagaacatctgtatagtcacatgtttcatacattgcctagagcataccgctcacaagcatctgcatactttcagttggtccttcaaagctctcggtggcacgagtctttcccaatgaccccgttacagttatcattcgccgccgaaaggaactatggtcaccagtattatacccgtgattccaggttatcagcaaaagaaacggcatggcgcgtagagagcacagaagggcggctcaggagccgatgccgtgggctcatagaatgtcatagcatcaacgcgtgttcctccggtatagccactactgttgtagggtttctacatcgcacagtggctgaattcttagagaatgagaacaactggaatgagatcatacaatggcgagagggagtgaaaattgattgtacggaggctctcgcgtgctcaacgcttgccgaaattaaagttgaactttcgaatcagatcatagacgacaatctcgcagctttcagagcacttgcacgactatggacattcagggatacaatgagtggtgatcggggagcttgcgttagatatattttcgatgcctatcagacatgttttcggtcgtggggagaccatagggacgtatacttatcctcttggattaagatggatagccgtcttgagcagttccttttcacagcagcacactattgctcagaggcccagatgaagtttcttctagaagccggcattaaccgcgacggcagtgcatggacggacacttcctctattaaggaacttctaatattatcattcaaggacgaaaccagcattgacgattcggcaaagatagctcgtggccttatttcatgcattagcgaccctaacgacactttgtactacaggtcgagcaggaagcttccggaaattgcgccactcccgcaaacattttggcaatggctcctgctccatgtacatgattctatgcaatctgatcttcgtgctttggctcgcacagggagcctcgacatcactatcaatgttttggtctcattcctagagaaaggagctcgatataacgaaaaggttataggaagtgcaacaaaatcctctaagacgacttgcagcactgcagacgagctcatcgagactttctgcacccgggcttgggacgttcgacaatcataccggctgagtaaagcttttcatagccggttaccaaacgcaacacgaacggatgactcgatgcatgacgccgatgctttgtcgaccctggcagagcaattaacaaaaatcaacgctttcttccgtactgtatggggaggagacactccgtgggtcgattataccgtgctaagcactaagagggagatgaagagcggagcaaagcacaaagaggtagcagcagctaagcaggtacttcaagcggagaaggcttggaacacgacgagacgggctgatcggataaaattgctgaacgacgaagaccaggccttggcggcacaactgtctaagaaaaacactactgcccgagagcagcgaaaaacattctcagaattgatgaagcggtcaatcaatcagcaggaaaagatcctacgatgtgcggaatctctgcaaagtgacgaggatcaaaagtattgagacatcacggaccgtgggcaggatcaatgagtttcgcgctcaaagacataggccacataacgagttgacaatgacgagcaagaagaaatattcagtgtgcctctatgctccattcacgagctatccaatgctatttatcttgtttcgaatcgacacgttgacactttcttgtaatgtcta

SEQ ID NO: 38979 - DNA, 1329 bp, Muscodor strobelii
  misc_feature: SGI cDNA ID NO. 573554
  misc_feature: Encodes the peptide sequence at SEQ ID NO 38980
atgcccctactaaactggaagaaagagactaagacggaaaacgaaaaggggctcaatgaggatacgcaatatcagagtctcattcaagatgaagtcgagctagatccagggaaaagaacgcgaattcaagattctcctgcacttgagagcatgatgcctcaatggggtcctcgtctatgggttcagcatatgttgggatccaacgactcaatctggcgacagccgcccagcgatagtgttgacgctgcttggaatcgtgtgacggacgtagccatgctccagatcacacgcgaacaacttctcaaacttggaaaggacccgagaaatgctgttcatacgcctctggaatgggtggatggcaacgaagatgaacgctacttggcgatcattgatgggatgcatatgctgcattgtttgaactcaatgcgcaagagcctgtaccacaactatcatcattatttccccgacggctatccttcgtcattcggcgcacatctctctcattgccaagagacactagcgcactggctcatgtgccaacccagtatcgagttcatcagcttcggttggtacgagagacgtgaaccgccgttcccggactttgatatcacgcgtaagtgcgtcgactttgagcagattcttaattggcagaatgagaacaggattgaggggttgactaaaccgatgttcgatgcactgcgtccgcctgaggagggcgtacggaggacggcgccggtcatgtatgatgagattcttgatgatacgtgggacgagatcctcgattcggctgaggtacgcatgtggcatgatgaggggtttgtattgaactctcgtgcccatcaaaagctgccctcatggctccctccgcaacggcagatcaacagagtcttttggccaaacgacttattcgcacgcgatccaagcgccgaaaccgatacggcttgggacagcctcttcccagaggggggaggtttcgttgagttcgaggatggggaaatttcaaacccgccgctttctgagcgtcgtgccgtgttgtcggtcttccatcaacttcactgcttagagataattcggatgggatactttgtggccgtggaggggcggccagatgatgtggatcagggtccggggcatctcgggcattgctgggactatcttcatcaagcaatcatgtgccatggcgatacgactctggaatgggtacatgaaggagatccaggtagtagtggttggggctatgagcataagtgcaatgacttcggtgcggtattctcttgggttgaggctcgcaagacggttaatcatacggggatacctgcgactggctga

SEQ ID NO: 38980 - protein, 442 aa, Muscodor strobelii
  misc_feature: SGI Peptide ID NO. 573554
  misc_feature (278)..(428): NCBI GI: 164425482 Blast Desc: NCU05766 [Neurospora crassa OR74A] gi|157070942|gb|EAA30505.2| conserved [Neurospora crassa OR74A]
  misc_feature (302)..(438): NCBI GI: 169779515 Blast Desc: [Aspergillus oryzae RIB40] gi|83772961|dbj|BAE63089.1| protein product [Aspergillus oryzae]
  misc_feature (71)..(252): NCBI GI: 145236190 Blast Desc: protein product [Aspergillus niger] gi|134075194|emb|CAK96507.1| protein product [Aspergillus niger]
  misc_feature (45)..(245): NCBI GI: 119485272 Blast Desc: NFIA_099050 [Neosartorya fischeri NRRL 181] gi|119410324|gb|EAW20271.1| conserved [Neosartorya fischeri NRRL 181]
  misc_feature (45)..(245): NCBI GI: 159123578 Blast Desc: conserved [Aspergillus fumigatus A1163]
  misc_feature (45)..(245): NCBI GI: 146324783 Blast Desc: conserved [Aspergillus fumigatus Af293] gi|129556152|gb|EAL85405.2| conserved [Aspergillus fumigatus Af293]
  misc_feature (303)..(438): NCBI GI: 238500169 Blast Desc: conserved [Aspergillus flavus NRRL3357] gi|220693072|gb|EED49418.1| conserved [Aspergillus flavus NRRL3357]
  misc_feature (68)..(238): NCBI GI: 238495678 Blast Desc: conserved [Aspergillus flavus NRRL3357] gi|220695725|gb|EED52068.1| conserved [Aspergillus flavus NRRL3357]
  misc_feature (69)..(237): NCBI GI: 189196292 Blast Desc: conserved [Pyrenophora tritici-repentis Pt-1C-BFP] gi|187980363|gb|EDU46989.1| conserved [Pyrenophora tritici-repentis Pt-1C-BFP]
  misc_feature (66)..(239): NCBI GI: 115396320 Blast Desc: [Aspergillus terreus NIH2624] gi|114193368|gb|EAU35068.1| [Aspergillus terreus NIH2624]
MPLLNWKKETKTENEKGLNEDTQYQSLIQDEVELDPGKRTRIQDSPALESMMPQWGPRLWVQHMLGSNDSIWRQPPSDSVDAAWNRVTDVAMLQITREQLLKLGKDPRNAVHTPLEWVDGNEDERYLAIIDGMHMLHCLNSMRKSLYHNYHHYFPDGYPSSFGAHLSHCQETLAHWLMCQPSIEFISFGWYERREPPFPDFDITRKCVDFEQILNWQNENRIEGLTKPMFDALRPPEEGVRRTAPVMYDEILDDTWDEILDSAEVRMWHDEGFVLNSRAHQKLPSWLPPQRQINRVFWPNDLFARDPSAETDTAWDSLFPEGGGFVEFEDGEISNPPLSERRAVLSVFHQLHCLEIIRMGYFVAVEGRPDDVDQGPGHLGHCWDYLHQAIMCHGDTTLEWVHEGDPGSSGWGYEHKCNDFGAVFSWVEARKTVNHTGIPATG

SEQ ID NO: 38981 - DNA, 333 bp, Muscodor strobelii
  misc_feature: SGI cDNA ID NO. 573555
  misc_feature: Encodes the peptide sequence at SEQ ID NO 38982
atgctcaagatgcaaatccaaacctacctcaccctcattaccttcctcgtcggccttgcgaccagcacgcccactccgcaagacgtgcaacacatccactctcttgaggaacccagcatggtactcaagactcgtgacggtcgcttcaagcccatctgggtgatcgggtacgatgaagacgaagaagaaggtgaacacatcggcttccgtctcttcaacgaggggaaagagcccggtgaggaagcacgtcatggtccgaagaaagaccacgaccacgtcaaggcccatgatgatcatgagtcttcgttctggtactattattatacttattag

SEQ ID NO: 38982 - protein, 110 aa, Muscodor strobelii
  misc_feature: SGI Peptide ID NO. 573555
MLKMQIQTYLTLITFLVGLATSTPTPQDVQHIHSLEEPSMVLKTRDGRFKPIWVIGYDEDEEEGEHIGFRLFNEGKEPGEEARHGPKKDHDHVKAHDDHESSFWYYYYTY

SEQ ID NO: 38983 - DNA, 231 bp, Muscodor strobelii
  misc_feature: SGI EST ID NO. CUFF.93751.0
  misc_feature: Variant of the nucleotide sequence at SEQ ID NO 38981
ctgagatatttgaagaaagcaagacgcaatggatcttaaagctataagtaaagcctcgctccagagtcatggctcaacttctcaccatcaacagatatcaatagatcagcatccaagctaagagaccgctaccaagcaacttcaacccgcaaaagtaagcactcctgtctatatagtcccttccgccactaacctcccaattatgctcaagatgcaaatccaaacctacct

SEQ ID NO: 38984 - DNA, 2073 bp, Muscodor strobelii
  misc_feature: SGI cDNA ID NO. 573556
  misc_feature: Encodes the peptide sequence at SEQ ID NO 38985
atggtgtcattttttggtttgaaaattggggcagaaaagaagaagaaatcggtgaaggacctcaatatttctgcgccccagcagcctcgacaaggtggcgaagggaatgcgaccgacgaagatttctttaacttcgaagggccaaaagcctcttatgctacgagcgtctattcgctgtccagacaaagcagcaaagagtccaccaaatcgaagaaatcgaagtttctagggatgaagacggtcccatttgcgcctcaaaaagacaattctagctttgtagatcttccaagtcctcacaaatttgcagactcgagctatccgggcttgaaacaccataattccaatccgagtatggttcgacgctggaacacagggtctacgacgagcttgagttttgcgcctcccccaaccattggcgccctcgcacgacctagtacatcggacggaagaagtaagaaagcttgggtcagccctcttgacgtgcattctgctcgagacgcgccgtcagcgatgggtcaggggtcttcgaatgcatcgctaaaagcgatcgacacgaatgtcggccggccgagcacttcatcagcatctttaggacctttcagcccagcaacagccaccacaccaaagtcgccgttgggacaatatgaactgaaactcgatctaccgagcgatgtatcgactttatttgcagatttgcctagtttcgatggcggtgtcccggcccctgagccgttgcggatccagaaacagccctctactcgaaaaccctcgagagactcgcaaattcaatctcctaggaaacctccatctccgccactatctattgatggcaaacagggaccgggtggcccagtcgcgccggcgttgaccacggcgcccataattcaggatcgtccttccagctctcgccacaagcatgacattccgtcgggaatcgaagaaatcgaagcagcgctgtctagttttcctacttcacccccctcgccatttgcatctccacgcgccagtaacgagaatatacttgtgcctgtatcgggtccagcacctcatgaagacgaagatgaaccaatcatccggaatgtgaaggcaaagcgggatacgcttacaatcaacccacaaatgagacgtagcttggagatgaggattgagaagtccgagcgtggaaatatcccatctcttgttgcgcgaccaaaaacttcaaacggtcggacgatggaacgtcctccacctttgaaactcaatctcggggtaccactaagtgcatctgaccgtgacggtccccggagtgctcccttcattctccctgccctctcgcgatcattcacacccactagcacgaaatcccctatcaaattttctcatgggacggctcttgagcggacaaattcggcacttggcaacgaagaataccagttgcgcaccggcccggattcgccaacagggtcttcagtctatgatgaggatgatgtaccagtgagccccgttttgccgttatcaggtccgctggcaagccctcgaattccgccaacaccggatgattccccttggccgcaccattcggatcctagtaacttcaagttcccaatgaaggacaacctaggagatacaaacttcccattaccacctccacgctctgtgaagcgtaatcaaaaccctcctacgcctgattctgttgagtggcctttgccatcgcctcttggtgcctgcccagtgagatcacccctcgctctcgatcgcgtgacatcatctcaatccggcaactcgacaacaagctcgcgattgcgcggcgagtcgcaatcaacaatgaatagtctcgaagcactagagccaccaagactgccccgaagcgggaacgaatctcctactttccgctcgtttagtcgaccttggacacctaccaccgccgggccgtcgacattaaaacgtgctgagacttccgcggctacgggtagtggttcgagtcctttcaagccgcctcctcggtccgccactgtgaagagcgttgcgccatctgttgtggaggataaaggatttgattttgggattcgcagtttgactggcggctttatataa

SEQ ID NO: 38985 - protein, 690 aa, Muscodor strobelii
  misc_feature: SGI Peptide ID NO. 573556
  misc_feature (269)..(384): NCBI GI: 256731957 Blast Desc: NECHADRAFT_93912 [Nectria haematococca mpVI 77-13-4]
MVSFFGLKIGAEKKKKSVKDLNISAPQQPRQGGEGNATDEDFFNFEGPKASYATSVYSLSRQSSKESTKSKKSKFLGMKTVPFAPQKDNSSFVDLPSPHKFADSSYPGLKHHNSNPSMVRRWNTGSTTSLSFAPPPTIGALARPSTSDGRSKKAWVSPLDVHSARDAPSAMGQGSSNASLKAIDTNVGRPSTSSASLGPFSPATATTPKSPLGQYELKLDLPSDVSTLFADLPSFDGGVPAPEPLRIQKQPSTRKPSRDSQIQSPRKPPSPPLSIDGKQGPGGPVAPALTTAPIIQDRPSSSRHKHDIPSGIEEIEAALSSFPTSPPSPFASPRASNENILVPVSGPAPHEDEDEPIIRNVKAKRDTLTINPQMRRSLEMRIEKSERGNIPSLVARPKTSNGRTMERPPPLKLNLGVPLSASDRDGPRSAPFILPALSRSFTPTSTKSPIKFSHGTALERTNSALGNEEYQLRTGPDSPTGSSVYDEDDVPVSPVLPLSGPLASPRIPPTPDDSPWPHHSDPSNFKFPMKDNLGDTNFPLPPPRSVKRNQNPPTPDSVEWPLPSPLGACPVRSPLALDRVTSSQSGNSTTSSRLRGESQSTMNSLEALEPPRLPRSGNESPTFRSFSRPWTPTTAGPSTLKRAETSAATGSGSSPFKPPPRSATVKSVAPSVVEDKGFDFGIRSLTGGFI

SEQ ID NO: 38986 - DNA, 5328 bp, Muscodor strobelii
  misc_feature: SGI EST ID NO. CUFF.93773.0
  misc_feature: Variant of the nucleotide sequence at SEQ ID NO 38984
ctggtatgtgacagacgcccacgcgaacggtatgagtggtgcgaggaattcagggtccgtttctttcttcgtgttgtttcccgcccttgtcgaaccatgaaccctcgtttctactagtcttttggagttggtgcccctgatctgcagcgtggttcctcgtgtggacagaccattatggggtccggtcgtttgctcaatttcctgcatcttggcgcttgcctcatccggtatgaactggcacgcataggtgttcgttcctgacctcaaccggcgactcagctgtgggaatccctggcggctgttccttgcatgttcatagaacacctattttgtcgaatgagcgtttgctaatctccatcctggtggtaccttcataattatcctcgtcgacttttgagtgctgatacggcatgccaataatgcttgtgttgccccagatctgaaaggggccgcccctcgactgttggtagctcgacaggcccccatgctcatacataccagacgataggactagacatcgtgatgctttaagcctgaactgtactcgatttggacttctccttcctccattatcctactacactcctttccctgatcggtgtgggatccgatagacagctttgatagcacgccaccctccttatgttaatatctaataattatcaccccagtgttgtgtagactgatcccgcgaactatagagtttaatttcgtaccacttctccaatccctagtatcgccaccgctctttgcatagtcgcgaacgaaatcgatacaaacaacctaggaagacccgacgacagcaaacgaagtcacgggcacgttttcatatcgagtaacgactacgtcgcaaacatcaaactgtcatcacacaagttcacaagaacaccgagaacaaccctgatcctggaatcatcgatcaatgacacgcggttcactgtcaaacgcccaaaacgccccttagtatctgatcttcggcgcgttcaccacatgcacacgtgtagcctagtctgtctattggtgtaaaatttgatcttatcgcattggattggatagaccctatttctattcgacacgagaacgaactagcctccggggttcctaccatttttcagagagatacaagagctaaactgagaaaatggtgtcattttttggtttgaaaattggggcagaaaagaagaagaaatcggtgaaggacctcaatatttctgcgccccagcagcctcgacaaggtggcgaagggaatgcgaccgacgaagatttctttaacttcgaagggccaaaagcctcttatgctacgagcgtctattcgctgtccagacaaagcagcaaagagtccaccaaatcgaagaaatcgaagtttctagggatgaagacggtcccatttgcgcctcaaaaagacaattctagctttgtagatcttccaagtcctcacaaatttgcagactcgagctatccgggcttgaaacaccataattccaatccgagtatggttcgacgctggaacacagggtctacgacgagcttgagttttgcgcctcccccaaccattggcgccctcgcacgacctagtacatcggacggaagaagtaagaaagcttgggtcagccctcttgacgtgcattctgctcgagacgcgccgtcagcgatgggtcaggggtcttcgaatgcatcgctaaaagcgatcgacacgaatgtcggccggccgagcacttcatcagcatctttaggacctttcagcccagcaacagccaccacaccaaagtcgccgttgggacaatatgaactgaaactcgatctaccgagcgatgtatcgactttatttgcagatttgcctagtttcgatggcggtgtcccggcccctgagccgttgcggatccagaaacagccctctactcgaaaaccctcgagagactcgcaaattcaatctcctaggaaacctccatctccgccactatctattgatggcaaacagggaccgggtggcccagtcgcgccggcgttgaccacggcgcccataattcaggatcgtccttccagctctcgccacaagcatgacattccgtcgggaatcgaagaaatcgaagcagcgctgtctagttttcctacttcacccccctcgccatttgcatctccacgcgccagtaacgagaatatacttgtgcctgtatcgggtccagcacctcatgaagacgaagatgaaccaatcatccggaatgtgaaggcaaagcgggatacgcttacaatcaacccacaaatgagacgtagcttggagatgaggattgagaagtccgagcgtggaaatatcccatctcttgttgcgcgaccaaaaacttcaaacggtcggacgatggaacgtcctccacctttgaaactcaatctcggggtaccactaagtgcatctgaccgtgacggtccccggagtgctcccttcattctccctgccctctcgcgatcattcacacccactagcacgaaatcccctatcaaattttctcatgggacggctcttgagcggacaaattcggcacttggcaacgaagaataccagttgcgcaccggcccggattcgccaacagggtcttcagtctatgatgaggatgatgtaccagtgagccccgttttgccgttatcaggtccgctggcaagccctcgaattccgccaacaccggatgattccccttggccgcaccattcggatcctagtaacttcaagttcccaatgaaggacaacctaggagatacaaacttcccattaccacctccacgctctgtgaagcgtaatcaaaaccctcctacgcctgattctgttgagtggcctttgccatcgcctcttggtgcctgcccagtgagatcacccctcgctctcgatcgcgtgacatcatctcaatccggcaactcgacaacaagctcgcgattgcgcggcgagtcgcaatcaacaatgaatagtctcgaagcactagagccaccaagactgccccgaagcgggaacgaatctcctactttccgctcgtttagtcgaccttggacacctaccaccgccgggccgtcgacattaaaacgtgctgagacttccgcggctacgggtagtggttcgagtcctttcaagccgcctcctcggtccgccactgtgaagagcgttgcgccatctgttgtggaggataaaggatttgattttgggattcgcagtttgactggcggctttatataaatcgatggcgatcgattataatctgatgcaagaattattggcttgatgtcatgacttggctggttttcatttttggtgaaggtggctgcttagaattggggttcagcgtcgtgtttctgatgcatttgaaaaggagcgtggggcatcgcataggagacaggacatagtggggaaattgtgcttaaagtccgaaaccgttcgtttgcttttctctcgtcatttattagctaaagataccatttgcaatttactttgttttcaagtcctgagcagaaaatctatcgtgtgccattagcaatgtgtctatgggacttgtggctgttagtagatgcattaatcctccaacaatgaggtggaatagaatagaaacagcacaatgtgcataattgatagggaacgccacttgcaagaacgccacaagactgagttctagaattctgaagcaaagatgcaaaacgccatctagatatgtcaagcgactaaccgactgcctatggacacttcaagcaggcaagcagacaatcttacgccgcgtacaaatatgtacaagacccaacgcctttatccgttcgtgatcgtcatgaaacatgcgcattattcaagctcctgtaatccggtgctgaccttcaacatcgctattcgtagtctcggtttatcgtgtgagtgcgccacgtctcactccgttcttcggggtttacttcattcttttcgtcttcgtgtttgacagaagcctccgtgtttgagacaccaacacctgatatctccgagtctttacgatcatggctctcattctcccgctccgcgtgtttctcttcagatgccgccacatcatcactacccggtaacccagttgaagctgttgctgaaatctcaaccttctcttctggactttgatcatctcctttacgctcatctgtcgtgtcagattcggaacctgtagcagcatgagcttcaggtcccgcagagagttcaagtttctcttgtacttccttcacgagttggtccatatcatctgcactctcttgtgccctctcccctgaacgctggcgcttcgcctctttttcacccacaatgtcaacccacatcttttcgagctcatcacgccagcccagctcatcagcaagcttccggatgccagcgtcacattcgcccaaacataggacatcgtcagcgcgggaaccaaaatctccaacaggatccatgttgagcaacaatcttggtacgcctttcattggcatacgcggcaacatgttgaaagggccgaccgacagactcgtacccatcacgatcgcaagatcagtatatgctggcacctgcgaattgttgtgaaatgaatttggtagtccctcgccgaaaaaacacaatgtcaggtttcacgaggccttcacaaccctctcgaacacaagacggcgggtcgcctcgctcaacagcttcccgcatctcggcatcagggaacacagtcttgcattcgatacaccgctgagtggcaaagctaccgtgagcctccacgattaactccggaggcacgccagccgcgcgctcgagacagtcgatgttttgcgtgaaaagcatacggaggagattcttcttcgcgaggagagctatgaagacatgtgatatggtcggttggaaattgccggggtatagttcctttgccagcacatagaatggacgaggatcccggcgaaagaaatctatttcgaagacagcctcaggatgtggtagattaagtcgggcgagattatggtaaagtcctgtgcgtggagagcggaaatccggtattcctgcggcggtggagatcccggcccccgtcataacaacgatctgtgttgcatcgccattcttaatgagctcggccacagctttcaggcttcgctcagaaagcgtttccgtgggcgtgtcatctgagatgggggttgaggattcctgacccatcttgcgccgggacgccttttgatggcggggcctctttctgcgtcctatattgaactatgtttctagcccctattgaataagccgcaggaatggttactcaggctatgatgttgaggtaggtgagtttatatacttgcagatgagtcagagtgatgagatgaagaataagtccttcggcg

SEQ ID NO: 38987 - DNA, 1251 bp, Muscodor strobelii
  misc_feature: SGI cDNA ID NO. 573557
  misc_feature: Encodes the peptide sequence at SEQ ID NO 38988
atgggtcaggaatcctcaacccccatctcagatgacacgcccacggaaacgctttctgagcgaagcctgaaagctgtggccgagctcattaagaatggcgatgcaacacagatcgttgttatgacgggggccgggatctccaccgccgcaggaataccggatttccgctctccacgcacaggactttaccataatctcgcccgacttaatctaccacatcctgaggctgtcttcgaaatagatttctttcgccgggatcctcgtccattctatgtgctggcaaaggaactataccccggcaatttccaaccgaccatatcacatgtcttcatagctctcctcgcgaagaagaatctcctccgtatgcttttcacgcaaaacatcgactgtctcgagcgcgcggctggcgtgcctccggagttaatcgtggaggctcacggtagctttgccactcagcggtgtatcgaatgcaagactgtgttccctgatgccgagatgcgggaagctgttgagcgaggcgacccgccgtcttgtgttcgagagggttgtgaaggcctcgtgaaacctgacattgtgccagcatatactgatcttgcgatcgtgatgggtacgagtctgtcggtcggccctttcaacatgttgccgcgtatgccaatgaaaggcgtaccaagattgttgctcaacatggatcctgttggagattttggttcccgcgctgacgatgtcctatgtttgggcgaatgtgacgctggcatccggaagcttgctgatgagctgggctggcgtgatgagctcgaaaagatgtgggttgacattgtgggtgaaaaagaggcgaagcgccagcgttcaggggagagggcacaagagagtgcagatgatatggaccaactcgtgaaggaagtacaagagaaacttgaactctctgcgggacctgaagctcatgctgctacaggttccgaatctgacacgacagatgagcgtaaaggagatgatcaaagtccagaagagaaggttgagatttcagcaacagcttcaactgggttaccgggtagtgatgatgtggcggcatctgaagagaaacacgcggagcgggagaatgagagccatgatcgtaaagactcggagatatcaggtgttggtgtctcaaacacggaggcttctgtcaaacacgaagacgaaaagaatgaagtaaaccccgaagaacggagtgagacgtggcgcactcacacgataaaccgagactacgaatag

SEQ ID NO: 38988 - protein, 416 aa, Muscodor strobelii
  misc_feature: SGI Peptide ID NO. 573557
  misc_feature (43)..(210): Pfam Id: PF02146 Pfam Desc: Sir2 family
  misc_feature (43)..(192): Pfam Id: PF02146 Pfam Desc: Sir2 family
  misc_feature (1)..(308): NCBI GI: 156061423 Blast Desc: SS1G_02855 [Sclerotinia sclerotiorum 1980] gi|154700258|gb|EDN99996.1| SS1G_02855 [Sclerotinia sclerotiorum 1980]
  misc_feature (1)..(335): NCBI GI: 154313829 Blast Desc: BC1G_05764 [Botryotinia fuckeliana B05.10] gi|150849346|gb|EDN24539.1| BC1G_05764 [Botryotinia fuckeliana B05.10]
  misc_feature (1)..(301): NCBI GI: 46134157 Blast Desc: FG09218.1 [Gibberella zeae PH-1]
  misc_feature (1)..(335): NCBI GI: 256732278 Blast Desc: NECHADRAFT_104568 [Nectria haematococca mpVI 77-13-4]
  misc_feature (1)..(307): NCBI GI: 164428403 Blast Desc: NCU00523 [Neurospora crassa OR74A] gi|157072134|gb|EAA34489.2| NCU00523 [Neurospora crassa OR74A]
  misc_feature (1)..(308): NCBI GI: 225680633 Blast Desc: NAD-dependent deacetylase sirtuin-2 [Paracoccidioides brasiliensis Pb03]
  misc_feature (1)..(308): NCBI GI: 226292308 Blast Desc: NAD-dependent deacetylase sirtuin-2 [Paracoccidioides brasiliensis Pb18]
  misc_feature (1)..(360): NCBI GI: 226282529 Blast Desc: NAD-dependent deacetylase sirtuin-2 [Paracoccidioides brasiliensis Pb01]
  misc_feature (16)..(383): NCBI GI: 145602793 Blast Desc: MGG_14172 [Magnaporthe grisea 70-15] gi|145011184|gb|EDJ95840.1| MGG_14172 [Magnaporthe grisea 70-15]
  misc_feature (1)..(385): NCBI GI: 116192895 Blast Desc: CHGG_06165 [Chaetomium globosum CBS 148.51] gi|88182078|gb|EAQ89546.1| CHGG_06165 [Chaetomium globosum CBS 148.51]
MGQESSTPISDDTPTETLSERSLKAVAELIKNGDATQIVVMTGAGISTAAGIPDFRSPRTGLYHNLARLNLPHPEAVFEIDFFRRDPRPFYVLAKELYPGNFQPTISHVFIALLAKKNLLRMLFTQNIDCLERAAGVPPELIVEAHGSFATQRCIECKTVFPDAEMREAVERGDPPSCVREGCEGLVKPDIVPAYTDLAIVMGTSLSVGPFNMLPRMPMKGVPRLLLNMDPVGDFGSRADDVLCLGECDAGIRKLADELGWRDELEKMWVDIVGEKEAKRQRSGERAQESADDMDQLVKEVQEKLELSAGPEAHAATGSESDTTDERKGDDQSPEEKVEISATASTGLPGSDDVAASEEKHAERENESHDRKDSEISGVGVSNTEASVKHEDEKNEVNPEERSETWRTHTINRDYE

SEQ ID NO: 38989 - DNA, 1605 bp, Muscodor strobelii
  misc_feature: SGI cDNA ID NO. 573558
  misc_feature: Encodes the peptide sequence at SEQ ID NO 38990
atggcgccacacgaccagcacccatcgcttgctgggttgacactcttggtttttgaagcggtattggaagtcgtttgtgtcagcttccctggctacatactggctcggaaaggcctgttcaagccagaacaccagaagttcgcggctaatctgaacatgtggctgttcacaccatgtctgatcttcagcaagctagcgaaacaactgaatccgagccaactcggcgagctcgcagttattcccgtcatctttatcattcagacatgtgtttcatacaccgtgtctatctgcgtatcaaaattatttagatttgggaaacgcccgagtaacttcgtgacagcaatgagcgtttttggcaattcaaattcacttcccatttccctcgtcatctctctttctcaaacgctgaagaacctctcgtgggaccgcgtagtaggagaccatagtggactagtctcttctcgtggtatcctctacttactcatcttccaacaattggggcaaatgcttcgctggacttggggtttccacgttttgctagctaagaagagcgaatacgaagattaccaagatgagataacggaagagggcagatatcgcgacaacaatgtatccagagaggatttgatatcggttcttgagggtagcacggatggcgatgaaccctccgattacgatgccgatacttcagacgacgaagctcactaccatccacctggtcgaacgcctgttgtgggcacgtccagcacatcacttgtcaactccgatgacgaggcaaatgcaacaagaaaacggttagcaaaactggacagcaatgggcacaacggcaccaacggagtacctccacatgatctccacaatatcctctcttttccgcctatgaatgatcctgacgacgtcgagcctccgagcggtattaagggattttacgttcgatcaaagcgggctatgggaagggccacggcaaaaacgcaacatggcatcaagggattctgtcgacgggcctaccatctacttcccgtgggacttcgaactgtattggaaaagacattcaaattcttatccgagttcatgaaccctccgctatgggcaatgctcgtatcgattgtcgtagcttcgattcctcgacttcagcagttgttctttgatgatggatttgtcaaaaacagtgtcacgcgagccgtcacacagagcgccggtgtcgccgttcctctgattttggtcgtattgggtgccaatctcgcgaatagcaccaaggatagcgagacgaaggactcggaggaggcacagattggaacacgtcttcttgttgcgtctctcatcagccggatgatcctacccacgctcatcatggcacctattcttgctcttatcgcaaagcacactccgatcagcatcctagacgacccgattttcatagtggtgtgctttctactcacaggtgctcccagtgctttacagctagcacagatctgccaaatcaacgaggtctacgaaggggtcatgtccaagatcttgttccagagctatgtcgtgtggattctcccatcgacactaatattagtaatgcttgcgctggagactctcgagtgggctggagtctaa

SEQ ID NO: 38990 - protein, 534 aa, Muscodor strobelii
  misc_feature: SGI Peptide ID NO. 573558
  misc_feature (16)..(521): Pfam Id: PF03547 Pfam Desc: Membrane transport protein
  misc_feature (4)..(533): NCBI GI: 171684059 Blast Desc: protein product [Podospora anserina] gi|170941990|emb|CAP67642.1| protein product [Podospora anserina]
  misc_feature (4)..(533): NCBI GI: 85074723 Blast Desc: NCU00589 [Neurospora crassa OR74A] gi|28927542|gb|EAA36493.1| NCU00589 [Neurospora crassa OR74A]
  misc_feature (3)..(532): NCBI GI: 116192943 Blast Desc: CHGG_06189 [Chaetomium globosum CBS 148.51] gi|88182102|gb|EAQ89570.1| CHGG_06189 [Chaetomium globosum CBS 148.51]
  misc_feature (4)..(533): NCBI GI: 38567318 Blast Desc: conserved [Neurospora crassa]
  misc_feature (4)..(532): NCBI GI: 256734128 Blast Desc: NECHADRAFT_59302 [Nectria haematococca mpVI 77-13-4]
  misc_feature (3)..(532): NCBI GI: 39969317 Blast Desc: MGG_10269 [Magnaporthe grisea 70-15] gi|149211147|ref|XP_001522948.1| MGCH7_ch7g1036 [Magnaporthe grisea 70-15] gi|86196991|gb|EAQ71629.1| MGCH7_ch7g1036 grisea
  misc_feature (4)..(533): NCBI GI: 154305633 Blast Desc: BC1G_07631 [Botryotinia fuckeliana B05.10] gi|150853150|gb|EDN28342.1| BC1G_07631 [Botryotinia fuckeliana B05.10]
  misc_feature (4)..(532): NCBI GI: 46128625 Blast Desc: FG08690.1 [Gibberella zeae PH-1]
  misc_feature (4)..(533): NCBI GI: 156031074 Blast Desc: SS1G_14145 [Sclerotinia sclerotiorum 1980] gi|154700536|gb|EDO00275.1| SS1G_14145 [Sclerotinia sclerotiorum 1980]
  misc_feature (2)..(533): NCBI GI: 259488782 Blast Desc: TPA: auxin efflux transporter family protein (Eurofung) [Aspergillus nidulans FGSC A4]
MAPHDQHPSLAGLTLLVFEAVLEVVCVSFPGYILARKGLFKPEHQKFAANLNMWLFTPCLIFSKLAKQLNPSQLGELAVIPVIFIIQTCVSYTVSICVSKLFRFGKRPSNFVTAMSVFGNSNSLPISLVISLSQTLKNLSWDRVVGDHSGLVSSRGILYLLIFQQLGQMLRWTWGFHVLLAKKSEYEDYQDEITEEGRYRDNNVSREDLISVLEGSTDGDEPSDYDADTSDDEAHYHPPGRTPVVGTSSTSLVNSDDEANATRKRLAKLDSNGHNGTNGVPPHDLHNILSFPPMNDPDDVEPPSGIKGFYVRSKRAMGRATAKTQHGIKGFCRRAYHLLPVGLRTVLEKTFKFLSEFMNPPLWAMLVSIVVASIPRLQQLFFDDGFVKNSVTRAVTQSAGVAVPLILVVLGANLANSTKDSETKDSEEAQIGTRLLVASLISRMILPTLIMAPILALIAKHTPISILDDPIFIVVCFLLTGAPSALQLAQICQINEVYEGVMSKILFQSYVVWILPSTLILVMLALETLEWAGV

SEQ ID NO: 38991 - DNA, 2660 bp, Muscodor strobelii
  misc_feature: SGI EST ID NO. CUFF.93777.0
  misc_feature: Variant of the nucleotide sequence at SEQ ID NO 38989
tacaaactcccactatttgatctgttatcgtttgtgctgtcactcaatgttctttcttgcggatgagatctgatatctctacttcttgcccctccctccttgattcaattgcttgtcggtctcgatctgcgtcgctccgtcatcgaaactcaacgagcactccttcgcccaccaaagcctgttcccccttcacgtgcgactctccttgataaagcgagacgtaaaccaaatatacttcgtggtcaacaacctacaccccagctcattactaagtttccttgttctacgctcgcattcccaacatctgagctgataagccctcaacgctttcccaatttatcgaggtccgacgtacccgagttcatccaacagacaggtgacaggcaggaacatcaaccacgcttccgttcaacattcccattttcgatcaatctgccccggacttgtgacttctttttgacgaacttccgatacgagagaccatcaagtgtgtaagactgctactcactacatcttgcagcttcaaggtagcttgattacgctccgccttgcggcttccgcctcctcgggtcgcagaattgggcgcggatatggaggtatcaaagaactcgccatattcgtccttactgcgtccaaacaatgcagtgtttgattggtcaaccaacgactcgccagtcgtcaccatggcgccacacgaccagcacccatcgcttgctgggttgacactcttggtttttgaagcggtattggaagtcgtttgtgtcagcttccctggctacatactggctcggaaaggcctgttcaagccagaacaccagaagttcgcggctaatctgaacatgtggctgttcacaccatgtctgatcttcagcaagctagcgaaacaactgaatccgagccaactcggcgagctcgcagttattcccgtcatctttatcattcagacatgtgtttcatacaccgtgtctatctgcgtatcaaaattatttagatttgggaaacgcccgagtaacttcgtgacagcaatgagcgtttttggcaattcaaattcacttcccatttccctcgtcatctctctttctcaaacgctgaagaacctctcgtgggaccgcgtagtaggagaccatagtggactagtctcttctcgtggtatcctctacttactcatcttccaacaattggggcaaatgcttcgctggacttggggtttccacgttttgctagctaagaagagcgaatacgaagattaccaagatgagataacggaagagggcagatatcgcgacaacaatgtatccagagaggatttgatatcggttcttgagggtagcacggatggcgatgaaccctccgattacgatgccgatacttcagacgacgaagctcactaccatccacctggtcgaacgcctgttgtgggcacgtccagcacatcacttgtcaactccgatgacgaggcaaatgcaacaagaaaacggttagcaaaactggacagcaatgggcacaacggcaccaacggagtacctccacatgatctccacaatatcctctcttttccgcctatgaatgatcctgacgacgtcgagcctccgagcggtattaagggattttacgttcgatcaaagcgggctatgggaagggccacggcaaaaacgcaacatggcatcaagggattctgtcgacgggcctaccatctacttcccgtgggacttcgaactgtattggaaaagacattcaaattcttatccgagttcatgaaccctccgctatgggcaatgctcgtatcgattgtcgtagcttcgattcctcgacttcagcagttgttctttgatgatggatttgtcaaaaacagtgtcacgcgagccgtcacacagagcgccggtgtcgccgttcctctgattttggtcgtattgggtgccaatctcgcgaatagcaccaaggatagcgagacgaaggactcggaggaggcacagattggaacacgtcttcttgttgcgtctctcatcagccggatgatcctacccacgctcatcatggcacctattcttgctcttatcgcaaagcacactccgatcagcatcctagacgacccgattttcatagtggtgtgctttctactcacaggtgctcccagtgctttacagctagcacagatctgccaaatcaacgaggtctacgaaggggtcatgtccaagatcttgttccagagctatgtcgtgtggattctcccatcgacactaatattagtaatgcttgcgctggagactctcgagtgggctggagtctaacaccgtctctacgagtgccggagctagctttgtatttgatataatgagcacatgattttgatgaaggcccaatattcacatcaccggcgttgggggagccgtacggcacggttcgcaaaaacatataaaggcgtcattcgaggtttgggaaggccaatctgtctacgggcacacattagataccaaagatacggtgcaaacccacaagctgtataacatttgggcaaggcgacagagcacagaggcctgacaggcgaatcgctcaataaagaggtctaatgatactttgaaataatacgccaatgcttttcgtcgtgataatagtagccaaaccagctgctgataggtcataatgatgtggaaatgtttcac

SEQ ID NO: 38992 - DNA, 1926 bp, Muscodor strobelii
  misc_feature: SGI cDNA ID NO. 573559
  misc_feature: Reduced expression when VOC is produced
  misc_feature: Encodes the peptide sequence at SEQ ID NO 38993
atggtggcccatccctctcacgaagactttggtctcgcggatgaccagcccatgggcagcccggcttctctcgattcaatggactcgtcggaagccaacacgccgctcgacactccaaacgagtcacccgcagacccgcccaagcgaatgccctcacttcgctccgtatccgatccccaaaacgccgctcagtctatgtcggcttcctcgacgccgctgggtgttctttccagtgctaggcgacccggcgctccaatgcactcctctagtagccgccttccggaagacctcagtgccaaaatgagagctttccatttatcacgccaaggcagttctcctctgggatctcaagtgggctctccaaaaccacctccaccctcagtcatgtctcccggtggagcaattgccggtggaatacctgctggtatgccgcttccaggaggtcttcggaggcccggcgcgccctcgttccctagatccgcgcccgtcatcaacactaatgctcccactggtggtctcgcgggcaagcggcgatttggactcaagctcggggacattaatggtgcccctccacctgcgtctcccgtatctggagcaccagccgcccagacggacccagcgccgaacgtaaacggccacacaacccagatgaagcaattcgaagaatacatagactcagagaaaggctatctgacattcaaaggaaaggccgtcatcactaaccaaggtgtcgacttttctgatggctcagtttttcgcatatcgcttgacgaggtcgagaagttggacgagctaggaaaaggcaattacggcaccgtctacaaggtccggcatacaaagccacggcttccccgctttggtcccgggctcgccagttccaagacggcctctctcccgaaacttcccgatttgcccctcgacccgaagagcgggagcaatacaggcatggtcatggctatgaaagaaatcaggctagagttagacgaagctaagctcgccaccattctcaaagaattggtgatactgcacgagtgcgcctcgccttatgtcattgacttttatggggcattcttccaagagagtgccgtgtacatgtgcattgagttcatggacggcggctcgatcgataagctctactccggcggcattcccgagaatgtcctccgccagatcacatattgtacagtcatgggcctgaaagaattgaaggataaacacaatatcattcaccgagacgtgaagccaacgaatattctttgcaacagcaggggacaagtcaaaatctgcgatttcggcgtaagtgggaaccttgtggccagcatcgccaagaccaatattggatgccaaagctatatggctcctgaacgcatctcaggaggtgctttcatgacttcgggggcttccgacggcacctacagcgtacagagtgatatctggagcttggggttgacaatcatcgagtgtggaatgggcaaatatccatacccacctgaagtgtcctccaccatcttcagtcaactcagtgccatcgtggaaggtgatccgccagacctacccgatagctattccggaacggcgcgcacatttgttcacggctgtctcaataaagtggccaaattaaggcccaattatcaggcgttgttggcttctgaatggttaagcgcattatctaaaccggagacaattacggaagacgacgaagaagaggcggaaaacgacgcaagtgctgaagccgtcgccaacgctgcctctaacgcgaacctcacatccttaaccacagaagaccctgacgttgcggcgtgggttcaagaagtcttggcgaagaaagcaaatggacagtacggcgaggtttccgcaaaaccggctcttcatgctgcgccgctcgacgccgtgagccctctggcaagccctgacattgccaaatag

SEQ ID NO: 38993 - protein, 641 aa, Muscodor strobelii
  misc_feature: SGI Peptide ID NO. 573559
  misc_feature (259)..(553): Pfam Id: PF00069 Pfam Desc: Protein kinase domain
  misc_feature (259)..(487): Pfam Id: PF07714 Pfam Desc: Protein tyrosine kinase
  misc_feature (14)..(640): NCBI GI: 46128627 Blast Desc: FG08691.1 [Gibberella zeae PH-1]
  misc_feature (20)..(640): NCBI GI: 256733630 Blast Desc: NECHADRAFT_36390 [Nectria haematococca mpVI 77-13-4]
  misc_feature (14)..(637): NCBI GI: 171684057 Blast Desc: protein product [Podospora anserina] gi|170941989|emb|CAP67641.1| protein product [Podospora anserina]
  misc_feature (28)..(637): NCBI GI: 149211143 Blast Desc: MGCH7_ch7g1034 [Magnaporthe grisea 70-15] gi|86196989|gb|EAQ71627.1| MGCH7_ch7g1034 [Magnaporthe grisea 70-15]
  misc_feature (14)..(641): NCBI GI: 186694323 Blast Desc: mitogen activated protein kinase kinase [Cryphonectria parasitica]
  misc_feature (53)..(637): NCBI GI: 156031070 Blast Desc: SS1G_14143 [Sclerotinia sclerotiorum 1980] gi|154700534|gb|EDO00273.1| SS1G_14143 [Sclerotinia sclerotiorum 1980]
  misc_feature (14)..(633): NCBI GI: 38567319 Blast Desc: related to tyrosine protein kinase of the MAP kinase kinase family [Neurospora crassa]
  misc_feature (114)..(637): NCBI GI: 145603860 Blast Desc: MGG_10268 [Magnaporthe grisea 70-15] gi|145012001|gb|EDJ96657.1| MGG_10268 [Magnaporthe grisea 70-15]
  misc_feature (14)..(633): NCBI GI: 164428450 Blast Desc: NCU00587 [Neurospora crassa OR74A] gi|28189093|dbj|BAC56235.1| PBS2 like MAPK kinase [Neurospora crassa] gi|157072151|gb|EAA36491.2| NCU00587 [Neurospora crassa
  misc_feature (43)..(630): NCBI GI: 262204926 Blast Desc: Pbs2-type MAP kinase kinase [Cochliobolus heterostrophus]
  misc_feature (215)..(545): SWISSPROT Homolog: EC 2.7.12.2 Mitogen-activated protein kinase kinase
  misc_feature: Useful for introducing or modulating the production of volatile compounds
MVAHPSHEDFGLADDQPMGSPASLDSMDSSEANTPLDTPNESPADPPKRMPSLRSVSDPQNAAQSMSASSTPLGVLSSARRPGAPMHSSSSRLPEDLSAKMRAFHLSRQGSSPLGSQVGSPKPPPPSVMSPGGAIAGGIPAGMPLPGGLRRPGAPSFPRSAPVINTNAPTGGLAGKRRFGLKLGDINGAPPPASPVSGAPAAQTDPAPNVNGHTTQMKQFEEYIDSEKGYLTFKGKAVITNQGVDFSDGSVFRISLDEVEKLDELGKGNYGTVYKVRHTKPRLPRFGPGLASSKTASLPKLPDLPLDPKSGSNTGMVMAMKEIRLELDEAKLATILKELVILHECASPYVIDFYGAFFQESAVYMCIEFMDGGSIDKLYSGGIPENVLRQITYCTVMGLKELKDKHNIIHRDVKPTNILCNSRGQVKICDFGVSGNLVASIAKTNIGCQSYMAPERISGGAFMTSGASDGTYSVQSDIWSLGLTIIECGMGKYPYPPEVSSTIFSQLSAIVEGDPPDLPDSYSGTARTFVHGCLNKVAKLRPNYQALLASEWLSALSKPETITEDDEEEAENDASAEAVANAASNANLTSLTTEDPDVAAWVQEVLAKKANGQYGEVSAKPALHAAPLDAVSPLASPDIAK

SEQ ID NO: 38994 - DNA, 3501 bp, Muscodor strobelii
  misc_feature: SGI EST ID NO. CUFF.94061.3
  misc_feature: Variant of the nucleotide sequence at SEQ ID NO 38992
tcactcgcaaccttggccccatcatccttggaagctagaggtacatactgtacatgaacctcatctccaattttgcacccctcctaccgcacgaccatttgcccagacgatcgtccagtgtgtatcactcctaaagaaaagactgcccgtccttccaactctgaccgtctattctcgtcaaccaatttgaaaattgccactactgcgtatctttgataccgttactccccaaatacattatcgtatcattcaacctctgctcggcgtgcaaccgattagtcgcgcatcacgaagcgaaacaacccttgtcttcgacccactcggcagcaagtaatacagcataacatcctgagttgtcgacatcgtatcgccctcatttacgtcagaccttaggtcggccgttgaatttccgggaccaggttctagacttggccaattcaccagaaaactcgtcgacgatatttcttaccttcgtctcgcatcttgtccagtatcatctacagtacccaaggcgttagatccccgatcagtagcacgaccggaccccgccatacatcgaactattcatcgccgcagcgcaaccacatcggcctggtcctcgactccagctcctgggccttgggcaagcattgagtgctgcttttgtgacttgtttttctaaccagatctcatccagcatcatcaactagctactctgacttccccgccgatagcgattctggtcactaccaacgtccctctggacggctgtccactatctcacgacgcctaactagctatcacctggcataatacaactattgcgctgctctaaacattctcatcatcagtgctcacattaggactggtcatacttgagcattgttcgctggttggtgcacactgctcgactgcgccccccactaaggtcaaggacctcccattattgtttctgcgagctgcgtaggatgttggagtaaacggtcatccgatatcgacttcatcactctcacctcactagacctgtaactacactgtcgcaatggtggcccatccctctcacgaagactttggtctcgcggatgaccagcccatgggcagcccggcttctctcgattcaatggactcgtcggaagccaacacgccgctcgacactccaaacgagtcacccgcagacccgcccaagcgaatgccctcacttcgctccgtatccgatccccaaaacgccgctcagtctatgtcggcttcctcgacgccgctgggtgttctttccagtgctaggcgacccggcgctccaatgcactcctctagtagccgccttccggaagacctcagtgccaaaatgagagctttccatttatcacgccaaggcagttctcctctgggatctcaagtgggctctccaaaaccacctccaccctcagtcatgtctcccggtggagcaattgccggtggaatacctgctggtatgccgcttccaggaggtcttcggaggcccggcgcgccctcgttccctagatccgcgcccgtcatcaacactaatgctcccactggtggtctcgcgggcaagcggcgatttggactcaagctcggggacattaatggtgcccctccacctgcgtctcccgtatctggagcaccagccgcccagacggacccagcgccgaacgtaaacggccacacaacccagatgaagcaattcgaagaatacatagactcagagaaaggctatctgacattcaaaggaaaggccgtcatcactaaccaaggtgtcgacttttctgatggctcagtttttcgcatatcgcttgacgaggtcgagaagttggacgagctaggaaaaggcaattacggcaccgtctacaaggtccggcatacaaagccacggcttccccgctttggtcccgggctcgccagttccaagacggcctctctcccgaaacttcccgatttgcccctcgacccgaagagcgggagcaatacaggcatggtcatggctatgaaagaaatcaggctagagttagacgaagctaagctcgccaccattctcaaagaattggtgatactgcacgagtgcgcctcgccttatgtcattgacttttatggggcattcttccaagagagtgccgtgtacatgtgcattgagttcatggacggcggctcgatcgataagctctactccggcggcattcccgagaatgtcctccgccagatcacatattgtacagtcatgggcctgaaagaattgaaggataaacacaatatcattcaccgagacgtgaagccaacgaatattctttgcaacagcaggggacaagtcaaaatctgcgatttcggcgtaagtgggaaccttgtggccagcatcgccaagaccaatattggatgccaaagctatatggctcctgaacgcatctcaggaggtgctttcatgacttcgggggcttccgacggcacctacagcgtacagagtgatatctggagcttggggttgacaatcatcgagtgtggaatgggcaaatatccatacccacctgaagtgtcctccaccatcttcagtcaactcagtgccatcgtggaaggtgatccgccagacctacccgatagctattccggaacggcgcgcacatttgttcacggctgtctcaataaagtggccaaattaaggcccaattatcaggcgttgttggcttctgaatggttaagcgcattatctaaaccggagacaattacggaagacgacgaagaagaggcggaaaacgacgcaagtgctgaagccgtcgccaacgctgcctctaacgcgaacctcacatccttaaccacagaagaccctgacgttgcggcgtgggttcaagaagtcttggcgaagaaagcaaatggacagtacggcgaggtttccgcaaaaccggctcttcatgctgcgccgctcgacgccgtgagccctctggcaagccctgacattgccaaatagattgctcaggaggtccatggatctgcgatcggcactagacacgaggcgacattgcctccagatgtatatcaagttatggagccggctctctgcttacctctccaacgacgctccgagacatggcatttacacggcgcaaacgggtttgattgtttttgttgaactaagctaggttcgaccactggcggtattgttgtgctcaaaaaaacttgcgtgggagcatttgaacatttcttttgtcttacttgggagcaatgcatggaaaggggtctcctgtacacgcaaatcgggacctggagagtagatactcggcctgtcatgggaaactaggtatatgcaagaatagggtgtgtagccgatgatgaatggagacgataggcataatcagacgacgtgatgggtttcggtcgctaaactgtgctgaatccgccagaaatagacgcaatcatgcttgctctaccgcctcgatatctcttgtagccgttgattaagacatgacgcaaatgtgcccagttaggacgctgctatagtgcgaaaccccgaataacactcag

SEQ ID NO: 38995 - DNA, 756 bp, Muscodor strobelii
  misc_feature: SGI cDNA ID NO. 573560
  misc_feature: Reduced expression when VOC is produced
  misc_feature: Encodes the peptide sequence at SEQ ID NO 38996
atggcgcgatcaggtgtcgtcgcgcccatctccctcctcttcctcgccggcgccatcgtcctcctcttcttcgtaatcctctccggcacagcgcacacctcgccgctacgccaaacctacttcctcaccgccgacacctctggcataagcggcgcccgcgacatcacgcaatggactttcttcaggttctgcggcgccttcaaccaggactgcggtaaagcctttcccgacccacccgtcggctgggcatgggactcgaacccgacgggtgacaatctacccttgcgcctgatcggaagctatggcagccacacgacgagcgagacatatttctacctgtggcgattcggctgggttttctacctcatcggcctattcttcaccgtcgtcgccttcttcacaggtttcatcgcctgctgcggacgtctcgggtccgcaatcgctggtctgaccacagccctcgcgctcttcttcctcaccgtcgccgcgtcactcatgacggcgacttttgttaagatgcgcgatatcttcaagcaaaccggtcgcactgcagatatcggcaagtacgcattcggcttcacgtggggtgcggtagctgccgtgctcatcgctacggttctgttttgcattggggtccgcgggaggaaggatccctatgctgtgtccagcggttctagcttcagccgcaagagaagtacgcggagccgtcggagctacgagatgtccgggaggagagtcaaggctgattatagctaa

SEQ ID NO: 38996 - protein, 251 aa, Muscodor strobelii
  misc_feature: SGI Peptide ID NO. 573560
  misc_feature (108)..(198): Pfam Id: PF06687 Pfam Desc: SUR7 protein
  misc_feature (7)..(65): Pfam Id: PF06687 Pfam Desc: SUR7 protein
  misc_feature (9)..(251): NCBI GI: 116192947 Blast Desc: CHGG_06191 [Chaetomium globosum CBS 148.51] gi|88182104|gb|EAQ89572.1| CHGG_06191 [Chaetomium globosum CBS 148.51]
  misc_feature (12)..(251): NCBI GI: 261353777 Blast Desc: conserved [Verticillium albo-atrum VaMs.102]
  misc_feature (6)..(250): NCBI GI: 85074717 Blast Desc: NCU00586 [Neurospora crassa OR74A] gi|28927539|gb|EAA36490.1| [Neurospora crassa OR74A] gi|38567320|emb|CAE76608.1| conserved [Neurospora crassa]
  misc_feature (23)..(251): NCBI GI: 256734129 Blast Desc: NECHADRAFT_77937 [Nectria haematococca mpVI 77-13-4]
  misc_feature (1)..(251): NCBI GI: 46128629 Blast Desc: FG08692.1 [Gibberella zeae PH-1]
  misc_feature (28)..(251): NCBI GI: 171684065 Blast Desc: protein product [Podospora anserina] gi|170941993|emb|CAP67645.1| protein product [Podospora anserina]
  misc_feature (2)..(251): NCBI GI: 154293228 Blast Desc: BC1G_14412 [Botryotinia fuckeliana B05.10] gi|150845557|gb|EDN20750.1| BC1G_14412 [Botryotinia fuckeliana B05.10]
  misc_feature (10)..(251): NCBI GI: 156061241 Blast Desc: SS1G_02763 [Sclerotinia sclerotiorum 1980] gi|154700167|gb|EDN99905.1| SS1G_02763 [Sclerotinia sclerotiorum 1980]
  misc_feature (8)..(251): NCBI GI: 39969423 Blast Desc: MGG_10322 [Magnaporthe grisea 70-15] gi|149211281|ref|XP_001523015.1| MGCH7_ch7g1100 [Magnaporthe grisea 70-15] gi|86197055|gb|EAQ71693.1| MGCH7_ch7g1100 grisea
  misc_feature (11)..(251): NCBI GI: 189202644 Blast Desc: cortical patch protein [Pyrenophora tritici-repentis Pt-1C-BFP] gi|187984757|gb|EDU50245.1| cortical patch protein [Pyrenophora tritici-repentis Pt-1C-BFP]
  misc_feature: Useful for introducing or modulating the production of volatile compounds
MARSGVVAPISLLFLAGAIVLLFFVILSGTAHTSPLRQTYFLTADTSGISGARDITQWTFFRFCGAFNQDCGKAFPDPPVGWAWDSNPTGDNLPLRLIGSYGSHTTSETYFYLWRFGWVFYLIGLFFTVVAFFTGFIACCGRLGSAIAGLTTALALFFLTVAASLMTATFVKMRDIFKQTGRTADIGKYAFGFTWGAVAAVLIATVLFCIGVRGRKDPYAVSSGSSFSRKRSTRSRRSYEMSGRRVKADYS

SEQ ID NO: 38997 - DNA, 1495 bp, Muscodor strobelii
  misc_feature: SGI EST ID NO. CUFF.93837.0
  misc_feature: Variant of the nucleotide sequence at SEQ ID NO 38995
ctgacattctcgttcaccctattttcatctcatatttcatctgatataacccttgcctgcatttcctcccatcccttgtcttattctcctgcattgcatcgctttttggacgaaacacacaggcatcttacgaacaaaacagctcccctgtacatagcatacctgcgcatcggcatatagcatcattttaggcaccaccttcagaataatcacccaggagggacaccacgcctcaccaccaaaggctcggcctaacgtaagacacgtccgtaatctgtcttagacaataatcgtagtcggctcaacgcttcggcgtcgaggcaacaaacaaacctaattctacgacactcaacgcctaattcctaaatcttttggaaaccttacaactcctaaaatggcgcgatcaggtgtcgtcgcgcccatctccctcctcttcctcgccggcgccatcgtcctcctcttcttcgtaatcctctccggcacagcgcacacctcgccgctacgccaaacctacttcctcaccgccgacacctctggcataagcggcgcccgcgacatcacgcaatggactttcttcaggttctgcggcgccttcaaccaggactgcggtaaagcctttcccgacccacccgtcggctgggcatgggactcgaacccgacgggtgacaatctacccttgcgcctgatcggaagctatggcagccacacgacgagcgagacatatttctacctgtggcgattcggctgggttttctacctcatcggcctattcttcaccgtcgtcgccttcttcacaggtttcatcgcctgctgcggacgtctcgggtccgcaatcgctggtctgaccacagccctcgcgctcttcttcctcaccgtcgccgcgtcactcatgacggcgacttttgttaagatgcgcgatatcttcaagcaaaccggtcgcactgcagatatcggcaagtacgcattcggcttcacgtggggtgcggtagctgccgtgctcatcgctacggttctgttttgcattggggtccgcgggaggaaggatccctatgctgtgtccagcggttctagcttcagccgcaagagaagtacgcggagccgtcggagctacgagatgtccgggaggagagtcaaggctgattatagctaaatggctatccgcctcaggcacgaagcatggtaattccatccataattccgacaggatccagtggcgatgggaatatctcatgctacaataggaaacaccgcaaaaaatttctgcgcaagcaaatgcatgaaggagtcgaggagtaatctgtccatagtagatgaggggagtgacgggagttgataatgacgcatgatgataacttttaatgtcttttcaccaacatatgataccataccatacctcgatcgttacttacaatagaataccatgaatatttaccgtcaaatatgaactcatgcagtgatttgagtttctatcaaaattactcagtagtcgttcaag

SEQ ID NO: 38998 - DNA, 978 bp, Muscodor strobelii
  misc_feature: SGI cDNA ID NO. 573561
  misc_feature: Reduced expression when VOC is produced
  misc_feature: Encodes the peptide sequence at SEQ ID NO 38999
atggctcacaaaagaaaggccagcaacgtatcaactgcaggtgcaggcgggaatcgcaaactggccaagaaacaagaccactccgacgaggacagcgcgaccaacaaggaggtcgacaatagtggcggagaagaagatggagatgaagccaataacactgatgatcatcgcgatgcggagtccgattactctcgaatcagtggcggcacagacctcggcataggagacactgactatgactcggatgacgacaacgaggaagaggaagaggagggatgtgacgaagaatactgcatttgcgaggatgacctacgataccacagttgctgccattatcatcgtagcatagtcgagaaggtctctcaaacccgatctgcgctgcgcgaaagggaggaagccggcaagaaaggacaaaagctgacgctcgacctcgaggttgatccagaagagcctttcggcctcggttttgagacagtggagtcaatcctctcagacaaaggacaataccgcctctatgttgatcctgattcattcgaaccctcggaagaagaggaggcgaagtttgtacggagtatcgacttcctttatacgccccgcggagcgcgcgaaaagaattgggtagctggcgtgcttaccttcgagggcgaggataatatttgccatgattctccaccggaccggtttatcctggaattcgcccgcccgcgccgcgcgagcactcagccgatagaactccgctcatccgatgtccagattgtcttcctcagtgacgaccatatcgaagtcacgctcgataaatatagagcctggtatgggcatactcgacctttccacgcgcctcgtaagatcaagtttgttggtactctcaaaagaccacgacaggtgaggcgagactcttcgcctcgcgagacgtggttaaaccttaaccatcccatgggcgaagtctacgatcgtcgttacgcagaaccttatttctag

SEQ ID NO: 38999 - protein, 325 aa, Muscodor strobelii
  misc_feature: SGI Peptide ID NO. 573561
  misc_feature: Useful for introducing or modulating the production of volatile compounds
MAHKRKASNVSTAGAGGNRKLAKKQDHSDEDSATNKEVDNSGGEEDGDEANNTDDHRDAESDYSRISGGTDLGIGDTDYDSDDDNEEEEEEGCDEEYCICEDDLRYHSCCHYHRSIVEKVSQTRSALREREEAGKKGQKLTLDLEVDPEEPFGLGFETVESILSDKGQYRLYVDPDSFEPSEEEEAKFVRSIDFLYTPRGAREKNWVAGVLTFEGEDNICHDSPPDRFILEFARPRRASTQPIELRSSDVQIVFLSDDHIEVTLDKYRAWYGHTRPFHAPRKIKFVGTLKRPRQVRRDSSPRETWLNLNHPMGEVYDRRYAEPYF

SEQ ID NO: 39000 - DNA, 204 bp, Muscodor strobelii
  misc_feature: SGI cDNA ID NO. 573562
  misc_feature: Encodes the peptide sequence at SEQ ID NO 39001
atggctaccaacgctgccgtaacccagtctcctcctcccatccttcctccgatctggcctgatattcacccagctcaagagcacaccgtcatgaagccacccactacaatcgactacaaccaagtccacgccctgcccggtgccaatggcgcagtccaattccactttgccattgttgcggattctcctgtaagcaaggcttga

SEQ ID NO: 39001 - protein, 67 aa, Muscodor strobelii
  misc_feature: SGI Peptide ID NO. 573562
MATNAAVTQSPPPILPPIWPDIHPAQEHTVMKPPTTIDYNQVHALPGANGAVQFHFAIVADSPVSKA

SEQ ID NO: 39002 - DNA, 1707 bp, Muscodor strobelii
  misc_feature: SGI cDNA ID NO. 573563
  misc_feature: Encodes the peptide sequence at SEQ ID NO 39003
atggcggcaagcgacgagtatggcgacaatgtcgggaaatctgagctccctgttgagactcacgggcctcataccacgggcgacgaccccgccgcccttggacatgttctggagacggaaaaacaggttggcggattgagcttcgaggaatatactgctggtggtatgggtcgacacttgggtggcaagtataaacagatcccgcgcgagttattttttttgaccgtgcttctaagacattgtgctaacttttttgtaattacgagcacaacatttttggttatcggccgcattatcggaaccggtatcttctctaccccgtcatcggtcgtatctagtgttgggagcgtcggcgcagcgctgttcctctgggtattgggtctcttccttgccatctccggattgtgcgtatggctcgaattcgcctgtatgatgccccgcagcggcggcgagaaagtatatctcgaagccgtctaccgcaaaccgaagctcctggcctctgtatttttcgccggacaggctgtcgcacttggatttactgcatctggttgcatagtcttcgcctcgtacgtcgtacaggctgcgaatcgtaaagctactgaatgggaggagcgcggtatcgcaattgcggttatctccttcattactcttgtccatgtattcgttccgaagtggggtgtgcgcggaatgaacttcttcggtgtcttgaaggtcgtcttgctactgttcgttgtcgttaccggatgggttgtgctcggcggcggcgtcaaaagcgtgccagatcctcatgccagctttcgcaacgcatttgcaggatcctcacattctggcaatcaattcgcgaccgcactattcaaggtgttaaactcatatgccggttggtctaacgccatgtacgtcatgaacgaagtcaagaatcccgtaaagacaatcaaaattgccgcgccattaggattgactgtatgcggaatattctatctacttgcaaacgtcgcctactttgcggctgccactccggctgaggttgcggcgagtggagctacagtggcatcctactttttcgaaaaggtgtttggagttgcagcgagacgggcacttagtgttctagttgcgctctctgctttcggcaacgttatgaccgtgacattcgctcagtcacgtgtgaatcaagaactagcgaaagagggtgtcatcccatttcctaagttctgggcgtcgagttggcctttcggctcaccctctgctggactcctcttgcatttcattccgtctttcatcgtcatcgtcgctatacctttcggtaatgcctacaactttatcctcgatcttgaaggctacccaggctcggtaatcaacttccttgtcgtctccggtctgatctatttacgtttcagcgaaccgaatgcacctagaccattcaaggcctggtggccaattatattgttcttcctagccggccaagctttccagcttgttgccccattcttgcgaccccctggaggcaaaggggatacgcctccattaccttattggctttatgctgtagttagtatcgcaattctggcagcaacggtgttctattggttctgttggcaagttgctggtcccgcaattgggaggtatgacttggagccacagcaggaggctctcaaggatggaactcgtgtaataacgtacaagagagtttcaaggggacgcaacgtttaa

SEQ ID NO: 39003 - protein, 568 aa, Muscodor strobelii
  misc_feature: SGI Peptide ID NO. 573563
  misc_feature (89)..(537): Pfam Id: PF00324 Pfam Desc: Amino acid permease
  misc_feature (40)..(563): NCBI GI: 212545224 Blast Desc: high affinity methionine permease [Penicillium marneffei ATCC 18224] gi|210065735|gb|EEA19829.1| high affinity methionine permease [Penicillium marneffei ATCC 18224]
  misc_feature (40)..(563): NCBI GI: 242814973 Blast Desc: high affinity methionine permease [Talaromyces stipitatus ATCC 10500] gi|218714817|gb|EED14240.1| high affinity methionine permease [Talaromyces stipitatus ATCC 10500]
  misc_feature (124)..(563): NCBI GI: 242814978 Blast Desc: high affinity methionine permease [Talaromyces stipitatus ATCC 10500] gi|218714818|gb|EED14241.1| high affinity methionine permease [Talaromyces stipitatus ATCC 10500]
  misc_feature (144)..(564): NCBI GI: 259483413 Blast Desc: TPA: methionine transporter, (Eurofung) [Aspergillus nidulans FGSC A4]
  misc_feature (2)..(561): NCBI GI: 170101252 Blast Desc: high affinity methionine permease [Laccaria bicolor S238N-H82] gi|164643198|gb|EDR07451.1| high affinity methionine permease [Laccaria bicolor S238N-H82]
  misc_feature (191)..(564): NCBI GI: 67900512 Blast Desc: AN7243.2 [Aspergillus nidulans FGSC A4] gi|40742100|gb|EAA61290.1| AN7243.2 [Aspergillus nidulans FGSC A4]
  misc_feature (87)..(562): NCBI GI: 121707313 Blast Desc: high affinity methionine permease [Aspergillus clavatus NRRL 1] gi|119399944|gb|EAW10370.1| high affinity methionine permease [Aspergillus clavatus NRRL 1]
  misc_feature (87)..(568): NCBI GI: 255942835 Blast Desc: Pc18g03480 [Penicillium chrysogenum Wisconsin 54-1255] gi|211586919|emb|CAP94572.1| Pc18g03480 [Penicillium chrysogenum Wisconsin 54-1255]
  misc_feature (87)..(562): NCBI GI: 70994148 Blast Desc: high affinity methionine permease [Aspergillus fumigatus Af293] gi|66849555|gb|EAL89883.1| high affinity methionine permease [Aspergillus fumigatus Af293]
  misc_feature (87)..(553): NCBI GI: 226285929 Blast Desc: high-affinity methionine permease [Paracoccidioides brasiliensis Pb01]
MAASDEYGDNVGKSELPVETHGPHTTGDDPAALGHVLETEKQVGGLSFEEYTAGGMGRHLGGKYKQIPRELFFLTVLLRHCANFFVITSTTFLVIGRIIGTGIFSTPSSVVSSVGSVGAALFLWVLGLFLAISGLCVWLEFACMMPRSGGEKVYLEAVYRKPKLLASVFFAGQAVALGFTASGCIVFASYVVQAANRKATEWEERGIAIAVISFITLVHVFVPKWGVRGMNFFGVLKVVLLLFVVVTGWVVLGGGVKSVPDPHASFRNAFAGSSHSGNQFATALFKVLNSYAGWSNAMYVMNEVKNPVKTIKIAAPLGLTVCGIFYLLANVAYFAAATPAEVAASGATVASYFFEKVFGVAARRALSVLVALSAFGNVMTVTFAQSRVNQELAKEGVIPFPKFWASSWPFGSPSAGLLLHFIPSFIVIVAIPFGNAYNFILDLEGYPGSVINFLVVSGLIYLRFSEPNAPRPFKAWWPIILFFLAGQAFQLVAPFLRPPGGKGDTPPLPYWLYAVVSIAILAATVFYWFCWQVAGPAIGRYDLEPQQEALKDGTRVITYKRVSRGRNV

SEQ ID NO: 39004 - DNA, 1552 bp, Muscodor strobelii
  misc_feature: SGI EST ID NO. CUFF.93798.0
  misc_feature: Variant of the nucleotide sequence at SEQ ID NO 39002
caacatttttggttatcggccgcattatcggaaccggtatcttctctaccccgtcatcggtcgtatctagtgttgggagcgtcggcgcagcgctgttcctctgggtattgggtctcttccttgccatctccggattgtgcgtatggctcgaattcgcctgtatgatgccccgcagcggcggcgagaaagtatatctcgaagccgtctaccgcaaaccgaagctcctggcctctgtatttttcgccggacaggctgtcgcacttggatttactgcatctggttgcatagtcttcgcctcgtacgtcgtacaggctgcgaatcgtaaagctactgaatgggaggagcgcggtatcgcaattgcggttatctccttcattactcttgtccatgtattcgttccgaagtggggtgtgcgcggaatgaacttcttcggtgtcttgaaggtcgtcttgctactgttcgttgtcgttaccggatgggttgtgctcggcggcggcgtcaaaagcgtgccagatcctcatgccagctttcgcaacgcatttgcaggatcctcacattctggcaatcaattcgcgaccgcactattcaaggtgttaaactcatatgccggttggtctaacgccatgtacgtcatgaacgaagtcaagaatcccgtaaagacaatcaaaattgccgcgccattaggattgactgtatgcggaatattctatctacttgcaaacgtcgcctactttgcggctgccactccggctgaggttgcggcgagtggagctacagtggcatcctactttttcgaaaaggtgtttggagttgcagcgagacgggcacttagtgttctagttgcgctctctgctttcggcaacgttatgaccgtgacattcgctcagtcacgtgtgaatcaagaactagcgaaagagggtgtcatcccatttcctaagttctgggcgtcgagttggcctttcggctcaccctctgctggactcctcttgcatttcattccgtctttcatcgtcatcgtcgctatacctttcggtaatgcctacaactttatcctcgatcttgaaggctacccaggctcggtaatcaacttccttgtcgtctccggtctgatctatttacgtttcagcgaaccgaatgcacctagaccattcaaggcctggtggccaattatattgttcttcctagccggccaagctttccagcttgttgccccattcttgcgaccccctggaggcaaaggggatacgcctccattaccttattggctttatgctgtagttagtatcgcaattctggcagcaacggtgttctattggttctgttggcaagttgctggtcccgcaattgggaggtatgacttggagccacagcaggaggctctcaaggatggaactcgtgtaataacgtacaagagagtttcaaggggacgcaacgtttaagctgttataagataccgagaataatcgggtagacccaaaattttaacattatgagataggctagggataattgtttaaatcatgacttgtatcatcaacatttcttacccatg

SEQ ID NO: 39005 - DNA, 345 bp, Muscodor strobelii
  misc_feature: SGI cDNA ID NO. 573564
  misc_feature: Elevated expression when VOC is produced
  misc_feature: Encodes the peptide sequence at SEQ ID NO 39006
atgtctaccttcactcaatccgacaaatctcgccgttgtcgcttgaaaccacgggcattagtctacgattctacattccactcatgcaagatccagattgatgagaaagtccaagaacatcgcgaggactattgggagttcgaattcggccctcggagcggtcgcgccgatacatgggacttgtacatcgacgacaagcaggacaaagcgttcgctgtcgaacccgatcaatcccctggtgatgccgtatatcttgcaaagttgcaattaagcaacctcagcgcatggggcaagtttctgcgcaggtctggtgctctttgcagcggctatatcatcagatcgtga

SEQ ID NO: 39006 - protein, 114 aa, Muscodor strobelii
  misc_feature: SGI Peptide ID NO. 573564
  misc_feature: Useful for introducing or modulating the production of volatile compounds
MSTFTQSDKSRRCRLKPRALVYDSTFHSCKIQIDEKVQEHREDYWEFEFGPRSGRADTWDLYIDDKQDKAFAVEPDQSPGDAVYLAKLQLSNLSAWGKFLRRSGALCSGYIIRS

SEQ ID NO: 39007 - DNA, 1357 bp, Muscodor strobelii
  misc_feature: SGI EST ID NO. CUFF.93831.0
  misc_feature: Variant of the nucleotide sequence at SEQ ID NO 39005
gggctttcgatcaatttggacctttataacgaggctcacgacacgataagattatccgcgcatcaccatatcgtcggaagttgtccttgtttgactcaaaaacgcatcttttacgaatcgcaaacgcattccacttctcttcaatgtctaccttcactcaatccgacaaatctcgccgttgtcgcttgaaaccacgggcattagtctacgattctacattccactcatgcaagatccagattgatgagaaagtccaagaacatcgcgaggactattgggagttcgaattcggccctcggagcggtcgcgccgatacatgggacttgtacatcgacgacaagcaggacaaagcgttcgctgtcgaacccgatcaatcccctggtgatgccgtatatcttgcaaagttgcaattaagcaacctcagcgcatggggcaagtttctgcgcaggtctggtgctctttgcagcggctatatcatcagatcgtgaaccgaaggtctcgtcatcgataggtctgagttctgagcaggtaaacctagagtcgcttagacttgctgtgcattcaaatagagagatattatatcgcgcgtgtttcaagtattgtttcttctagcggttatgcggaggatgatgtagattttcaatccagtcttgtcacgattttgtgacgcatgtctttctctcttgcgagccttctacaacttggtatctatatcactcctctttatcgcggaatatgaacgatcaacggagatgtaaattatcctcgctgaaataattctaaaactgaaactttctgcctccctcgtgattaacgtgtttccttaaccttgaacgtaaaataattagggtgaagtgctattgcgcggctctgcgtagacagtagccccacatttgctgtgagatgaaattgaagtcctacaatcgatgttcctccgtatcgatcattgtagatctacctgtcagcatctagatgagtgtttgcgagtatcgacttgcatgtcagcctgcatcgtacctagaccgaatcatgtttcatcgtggccgccgaccccaacttcgtcaagcatttcaccacgatattcatcatcccatcattacaagtcgaacctgaactaattgcgctaatctatccgtagatatacgccaaattatgaacatattatgatagttgcaattctgctagacctaggcgctgcacgtgaagcgatggaacgggttaaaggccaaataaagtcgggtttccaaattgcaaaatacagaattccaatttacgaaacttcggtggctgatcgctgacttcggcgccatgtgtctttcagaatgcttgttgacggagttgcagcagtcgagtcagc

SEQ ID NO: 39008 - DNA, 990 bp, Muscodor strobelii
  misc_feature: SGI cDNA ID NO. 573565
  misc_feature: Encodes the peptide sequence at SEQ ID NO 39009
atgtcgaagccaatagagatagagtcggtcgcccagttcagcactttgctgagggaatccaaggttgtcgtagctgacttctacgccaactggtgcggcccatgtaagcagatcgcccccgtctacgaacagctgtcgcagtcgatatccaagcccaaggtcatcaccttcgtcaaggtcaacaccgaagccgacggagccaaggacctcgcccaggagtacgccgtcaacgctctccctacctttatcctcttccgcgatggcgagatagtggagaaagtcaaaggagccaacctcccaggcctccgatctctgatcgagaagctgactaaggatgttgactcgggcgagggtgctgctgcttccagctccgggtcgggtggcattgcctggagaggagcagatctcccgcgaggctacacagatatctctgacgttgtggatgtgaaggggcttgagctgctcaatgcaagcaatgattcctctgttcgcactctctttaacaagggcaaacctgctgcattgagcaaggatgccagcgcgagcgtggagaaagattgggttgagagtgagacagatgaccagctactgctctacgcgcctttcaactctgcggtcaagcttcatacattgcagattacctctctgccctcgacaaatgatgacgacgacgatgatgagccccccttgcggcccaagacgatcaagctcttcacgaaccgcccacataaccttggcttcgacgaagccgaagacatcgaccctacccagatcatcgaaattaaggactccgattggaattctagcggcaccgctaacctacctctgcgattcgtccgattccagaatatctccagcctcgtcattttcattgaggttggagatgaagacgagaaggtgcgggtggaccgggtccgcctcattggtgagtctggcgagaagcgggaaatgggaaagctggagaagattggcgacgagcagggagaatga

SEQ ID NO: 39009 - protein, 329 aa, Muscodor strobelii
  misc_feature: SGI Peptide ID NO. 573565
  misc_feature (183)..(311): Pfam Id: PF06201 Pfam Desc: Domain of Function (DUF1000)
  misc_feature (4)..(109): Pfam Id: PF00085 Pfam Desc: Thioredoxin
  misc_feature (1)..(329): NCBI GI: 116180954 Blast Desc: CHGG_01105 [Chaetomium globosum CBS 148.51] gi|88185402|gb|EAQ92870.1| CHGG_01105 [Chaetomium globosum CBS 148.51]
  misc_feature (2)..(326): NCBI GI: 171696308 Blast Desc: protein product [Podospora anserina] gi|170948396|emb|CAP60560.1| protein product [Podospora anserina]
  misc_feature (1)..(325): NCBI GI: 156036326 Blast Desc: SS1G_12852 [Sclerotinia sclerotiorum 1980] gi|154698257|gb|EDN97995.1| SS1G_12852 [Sclerotinia sclerotiorum 1980]
  misc_feature (1)..(329): NCBI GI: 119500714 Blast Desc: thioredoxin, [Neosartorya fischeri NRRL 181] gi|119415279|gb|EAW25217.1| thioredoxin, [Neosartorya fischeri NRRL 181]
  misc_feature (1)..(329): NCBI GI: 70994138 Blast Desc: thioredoxin [Aspergillus fumigatus Af293] gi|66849550|gb|EAL89878.1| thioredoxin, [Aspergillus fumigatus Af293] gi|159125169|gb|EDP50286.1| thioredoxin, [Aspergillus
  misc_feature (1)..(329): NCBI GI: 121707333 Blast Desc: thioredoxin, [Aspergillus clavatus NRRL 1] gi|119399950|gb|EAW10376.1| thioredoxin, [Aspergillus clavatus NRRL 1]
  misc_feature (5)..(329): NCBI GI: 255942847 Blast Desc: Pc18g03540 [Penicillium chrysogenum Wisconsin 54-1255] gi|211586925|emb|CAP94578.1| Pc18g03540 [Penicillium chrysogenum Wisconsin 54-1255]
  misc_feature (1)..(329): NCBI GI: 67522364 Blast Desc: AN1639.2 [Aspergillus nidulans FGSC A4] gi|40745603|gb|EAA64759.1| AN1639.2 [Aspergillus nidulans FGSC A4] gi|259486975|tpe|CBF85273.1| TPA: thioredoxin, AFUA_4G09090)
  misc_feature (5)..(329): NCBI GI: 212540610 Blast Desc: thioredoxin, [Penicillium marneffei ATCC 18224] gi|210067759|gb|EEA21851.1| thioredoxin, [Penicillium marneffei ATCC 18224]
  misc_feature (1)..(329): NCBI GI: 258577525 Blast Desc: conserved [Uncinocarpus reesii 1704] gi|237903210|gb|EEP77611.1| conserved [Uncinocarpus reesii 1704]
MSKPIEIESVAQFSTLLRESKVVVADFYANWCGPCKQIAPVYEQLSQSISKPKVITFVKVNTEADGAKDLAQEYAVNALPTFILFRDGEIVEKVKGANLPGLRSLIEKLTKDVDSGEGAAASSSGSGGIAWRGADLPRGYTDISDVVDVKGLELLNASNDSSVRTLFNKGKPAALSKDASASVEKDWVESETDDQLLLYAPFNSAVKLHTLQITSLPSTNDDDDDDEPPLRPKTIKLFTNRPHNLGFDEAEDIDPTQIIEIKDSDWNSSGTANLPLRFVRFQNISSLVIFIEVGDEDEKVRVDRVRLIGESGEKREMGKLEKIGDEQGE

SEQ ID NO: 39010 - DNA, 2317 bp, Muscodor strobelii
  misc_feature: SGI EST ID NO. CUFF.93869.0
  misc_feature: Variant of the nucleotide sequence at SEQ ID NO 39008
ctctatgtcttggccttgctgagaggtattacacacaatttctcgttcacacgtagttgaaatctttcaaaagagcgtaagccatattcttcgggcgtggtcctgagcgaacttgtttgtaacgcaatattggaaacagaactgcttctggttgcagggtgactatctcaccggggcctgtatttcgtgatacggcggatatgtttgccttgttgacggttcatcgcacgtcccttgctcattggaactacacagcaataagcttatattcgtgtttgtacggacttaattaggtcccagcagtagcgctaggaagagcatgaatattcgacggtgttagtacattgttctatttacaggtacgtacatagttgtatggatgacattgcttacgtggacacacgctgcacggtgggagtacagggtacgcggaagctccaggtggttcgcccctccaccaaccaggtatgacgtgcctttccgcgcctcaacaccaaaaaagtacgacgaagcacgctcgctcctcacaactctagcggtcatcgccccggtgctcaaagcagccatgtcgaagccaatagagatagagtcggtcgcccagttcagcactttgctgagggaatccaaggttgtcgtagctgacttctacgccaactggtgcggcccatgtaagcagatcgcccccgtctacgaacagctgtcgcagtcgatatccaagcccaaggtcatcaccttcgtcaaggtcaacaccgaagccgacggagccaaggacctcgcccaggagtacgccgtcaacgctctccctacctttatcctcttccgcgatggcgagatagtggagaaagtcaaaggagccaacctcccaggcctccgatctctgatcgagaagctgactaaggatgttgactcgggcgagggtgctgctgcttccagctccgggtcgggtggcattgcctggagaggagcagatctcccgcgaggctacacagatatctctgacgttgtggatgtgaaggggcttgagctgctcaatgcaagcaatgattcctctgttcgcactctctttaacaagggcaaacctgctgcattgagcaaggatgccagcgcgagcgtggagaaagattgggttgagagtgagacagatgaccagctactgctctacgcgcctttcaactctgcggtcaagcttcatacattgcagattacctctctgccctcgacaaatgatgacgacgacgatgatgagccccccttgcggcccaagacgatcaagctcttcacgaaccgcccacataaccttggcttcgacgaagccgaagacatcgaccctacccagatcatcgaaattaaggactccgattggaattctagcggcaccgctaacctacctctgcgattcgtccgattccagaatatctccagcctcgtcattttcattgaggttggagatgaagacgagaaggtgcgggtggaccgggtccgcctcattggtgagtctggcgagaagcgggaaatgggaaagctggagaagattggcgacgagcagggagaatgagttataacaagagcaattatgcctgcgagcaacccgcgactagcggtgttgatgtctgaccaaagagaaactcgggtggttggtgctcctatacatctagggattcacgtatagaccctatcccgtaaccttcgcagtgcttcacgggctgttacgagaatagatcacgaatgacaacgtcgatggctgatgaattactgtgtcacatttatcctccaatctgcatgcatctgtacgtcaagttcgcggccaatagaggtgcgttcatgcatcctgggtttgtgccgcggatctgtttcctccccatactccgtgacttactgcggagatttatgatactgatttgccggccgcaaggttgctaatgcagctgcaacgcacaggtaacaaaacagaccgaccaaaccaaacatcagatcattcgaggatcaaaccatccccccctgtgccagagcctttcacgaatagtgccatgggctcatctgcagcgtaagtctcgtgttactagatagtatgtccggagacttggccacggtccaagaagcaacgagaggcttcgcggaggaccgcgcaatggccaaggacgaaccggcttgcaattttaattgttctgtggcaatgattgacgctgcgatagaggcatccatggggtaaaggactcgagcaacacgggaaatgtgagatcatgccagccgcacgaagaaagaaaagaaaggaaaagtccaaagccaggaaattttcgtgcgaatatttctaccctgc

SEQ ID NO: 39011 - DNA, 1047 bp, Muscodor strobelii
  misc_feature: SGI cDNA ID NO. 573566
  misc_feature: Encodes the peptide sequence at SEQ ID NO 39012
atggcaccaacaaaacttctgcttacaggcgtcaccggctacatcggtggatccatcctctctcattatctgtcttcaagtcgggtctctaagtcagtacaaatctccgtgcttacacgcaacgacgatcgagcaaaatcattcgcatcagacagcatcgaagtctacacaatgcgcgatctcgatgacatcgaagcaataaaacatgcagcttcggagaacgacatcgtaatcaacgccgtgtctgcattctactcagaaagcgcaaaagccttcatagaaggtctcagtatcaggaagaaaaacaatccacaggcggaagtttattacattcatacctctggaacattgaatctcgcagatcgccgtatatcagagacttattacgagtcgcgcgtcttcagcgacaaggatcaggatatatactcctatctgaagacccgagagggaattgagccatatggtcaacgcaccaccgatcttgtcgtcgttgaggctgggaaagcttttggtgtgtcaacgactatcattatgtgtccaactatctatggtgtcggaactgggcaattcaatcgctcgtcgattcaatatcctctccagatgaagcaggcggcggcgagaggacaagctgcgtatatcggcgatggcgagggtgtgtgggattatgtgaacatacgtgatctcatcacgttatacgagcttgtcctgcttgactgggttgagggaaagaaagttgcgcctgtgggagagaatgggtttgtattctgtgggacagggaggtccaagtggaaggacgtggctgagaacattgggaaagctgggttgaaactaggtaaactggaatcttcggagccgttgagcattagtctacaggaagcggctcagagctggctcggtggaaatggacaaatcgctgaattgggatttgcgagtacttctaggacttcggcggatgttgcgaaggaactgggatgggaaccgatcaagactcatgaggactgggagaagtcattctatgaggggtttctggaggtgcttaaggcttag

SEQ ID NO: 39012 - protein, 348 aa, Muscodor strobelii
  misc_feature: SGI Peptide ID NO. 573566
  misc_feature (6)..(249): Pfam Id: PF01370 Pfam Desc: NAD dependent epimerase/dehydratase family
  misc_feature (1)..(348): NCBI GI: 46111867 Blast Desc: FG02815.1 [Gibberella zeae PH-1]
  misc_feature (1)..(340): NCBI GI: 242823456 Blast Desc: conserved [Talaromyces stipitatus ATCC 10500] gi|218712993|gb|EED12418.1| conserved [Talaromyces stipitatus ATCC 10500]
  misc_feature (1)..(340): NCBI GI: 242811577 Blast Desc: NAD dependent epimerase/dehydratase family protein [Talaromyces stipitatus ATCC 10500] gi|218714117|gb|EED13540.1| NAD dependent epimerase/dehydratase family protein [Talaromyces
  misc_feature (1)..(340): NCBI GI: 154324056 Blast Desc: BC1G_00427 [Botryotinia fuckeliana B05.10] gi|150842656|gb|EDN17849.1| BC1G_00427 [Botryotinia fuckeliana B05.10]
  misc_feature (1)..(342): NCBI GI: 256729062 Blast Desc: NECHADRAFT_40414 [Nectria haematococca mpVI 77-13-4]
  misc_feature (5)..(348): NCBI GI: 238497742 Blast Desc: NAD dependent epimerase/dehydratase family protein [Aspergillus flavus NRRL3357] gi|220693380|gb|EED49725.1| NAD dependent epimerase/dehydratase family protein [Aspergillus
  misc_feature (5)..(337): NCBI GI: 261356988 Blast Desc: NAD dependent epimerase/dehydratase family protein [Verticillium albo-atrum VaMs.102]
  misc_feature (6)..(347): NCBI GI: 146323121 Blast Desc: NAD dependent epimerase/dehydratase family protein [Aspergillus fumigatus Af293] gi|129556475|gb|EAL86317.2| NAD dependent epimerase/dehydratase family protein [Aspergillus
  misc_feature (5)..(348): NCBI GI: 169768436 Blast Desc: [Aspergillus oryzae RIB40] gi|83766546|dbj|BAE56686.1| protein product [Aspergillus oryzae]
  misc_feature (16)..(338): NCBI GI: 255941262 Blast Desc: Pc16g10940 [Penicillium chrysogenum Wisconsin 54-1255] gi|211586023|emb|CAP93764.1| Pc16g10940 [Penicillium chrysogenum Wisconsin 54-1255]
MAPTKLLLTGVTGYIGGSILSHYLSSSRVSKSVQISVLTRNDDRAKSFASDSIEVYTMRDLDDIEAIKHAASENDIVINAVSAFYSESAKAFIEGLSIRKKNNPQAEVYYIHTSGTLNLADRRISETYYESRVFSDKDQDIYSYLKTREGIEPYGQRTTDLVVVEAGKAFGVSTTIIMCPTIYGVGTGQFNRSSIQYPLQMKQAAARGQAAYIGDGEGVWDYVNIRDLITLYELVLLDWVEGKKVAPVGENGFVFCGTGRSKWKDVAENIGKAGLKLGKLESSEPLSISLQEAAQSWLGGNGQIAELGFASTSRTSADVAKELGWEPIKTHEDWEKSFYEGFLEVLKA

SEQ ID NO: 39013 - DNA, 472 bp, Muscodor strobelii
  misc_feature: SGI EST ID NO. CUFF.93839.0
  misc_feature: Variant of the nucleotide sequence at SEQ ID NO 39011
gtcaacgactatcattatgtgtccaactatctatggtgtcggaactgggcaattcaatcgctcgtcgattcaatatcctctccagatgaagcaggcggcggcgagaggacaagctgcgtatatcggcgatggcgagggtgtgtgggattatgtgaacatacgtgatctcatcacgttatacgagcttgtcctgcttgactgggttgagggaaagaaagttgcgcctgtgggagagaatgggtttgtattctgtgggacagggaggtccaagtggaaggacgtggctgagaacattgggaaagctgggttgaaactaggtaaactggaatcttcggagccgttgagcattagtctacaggaagcggctcagagctggctcggtggaaatggacaaatcgctgaattgggatttgcgagtacttctaggacttcggcggatgttgcgaaggaactgggatgggaaccgatcaag

SEQ ID NO: 39014 - DNA, 384 bp, Muscodor strobelii
  misc_feature: SGI cDNA ID NO. 573567
  misc_feature: Encodes the peptide sequence at SEQ ID NO 39015
atgcaagcttctattggcattttcgttcccctcatggccactgctgtactagcagaaggttgtttctcaggtggtcaatcctggcctgccagtcccatcgtggctctagagaattccatgatcgactgcgaatctgttttccccggtataagctttactcagaacacacagtggcatatctgccacgacttggccgatggaataagggaagacttgactctggaatatattggcagtggaacttcccttggacccaactcagacaattgcagcgctggtttccagggcgagattctaggttgtccaactggaggaattcacacttctggcaattgggtatacacggctgaccctaacgctggcgaatgcgatggctccaactag

SEQ ID NO: 39015 - protein, 127 aa, Muscodor strobelii
  misc_feature: SGI Peptide ID NO. 573567
  misc_feature (14)..(123): NCBI GI: 226282594 Blast Desc: PAAG_01081 [Paracoccidioides brasiliensis Pb01]
  misc_feature (14)..(123): NCBI GI: 225681061 Blast Desc: [Paracoccidioides brasiliensis Pb03]
  misc_feature (14)..(123): NCBI GI: 226292240 Blast Desc: PADG_03744 [Paracoccidioides brasiliensis Pb18]
MQASIGIFVPLMATAVLAEGCFSGGQSWPASPIVALENSMIDCESVFPGISFTQNTQWHICHDLADGIREDLTLEYIGSGTSLGPNSDNCSAGFQGEILGCPTGGIHTSGNWVYTADPNAGECDGSN

SEQ ID NO: 39016 - DNA, 941 bp, Muscodor strobelii
  misc_feature: SGI EST ID NO. CUFF.93842.0
  misc_feature: Variant of the nucleotide sequence at SEQ ID NO 39014
caaaactagagcttcacaaacccagactggcgggctgtctgatagaaatataaaagctctgatttccctgatttgaaatggagagactcttcgatatccattcacgcattgtgttatgatccgcttgaacaactctccggcttaagttgcacatctttcgatcaactctccgagcacccttttcaccatgcaagcttctattggcattttcgttcccctcatggccactgctgtactagcagaaggttgtttctcaggtggtcaatcctggcctgccagtcccatcgtggctctagagaattccatgatcgactgcgaatctgttttccccggtataagctttactcagaacacacagtggcatatctgccacgacttggccgatggaataagggaagacttgactctggaatatattggcagtggaacttcccttggacccaactcagacaattgcagcgctggtttccagggcgagattctaggttgtccaactggaggaattcacacttctggcaattgggtatacacggctgaccctaacgctggcgaatgcgatggctccaactagagagctttttcttatcgcctgccagagttcctcacgaatgactggtgttcaaatcacgtatggttggcttcaagggagccagacatatactaactatttcggcctcgacatgatcacattcatacctctctttctcagaccgccgatctatcacaccagggactcgatatagcaatatttcaagtacaacgattcaacatcgtgggtgtgagagcatgggatatttttaaagcctttctattgtatctagctacatcattaacttatcaattcatggccggtatgtaagatgagaaggtgtatctcacccctttgggcgtcatatcagatgcacaaagtgacaacccgcaggccagccaatgaaaccgtg

SEQ ID NO: 39017 - DNA, 1965 bp, Muscodor strobelii
  misc_feature: SGI cDNA ID NO. 573568
  misc_feature: Encodes the peptide sequence at SEQ ID NO 39018
atgtctgtaaacatccgatcggacccctatctgatcggtgtatctgaaccatatactctcgatagtgaagcggggcaaacgctcattgtgattgaattcaaggacatcttatcctgggctgtcggagctttcgatggtatattttggaatgggcctcaagatgagatttttgggtcactcaaccaaaccatgatccttttccagcccaacagtctcaaccacacagaccttattgatcggccggcgaactatagcatggtttgtagtgaaggtgcttccggtatcttcaactcctctttgacattcttgaactgcctccaactcgctttcgcttcgcaactcttggacgaagatgtcataaccattgacaacgtcgccaccagttggctgagccagaccttacttgtcgacgacctcagctcattcaacggctcgggagtactaaacgaaattacaacatgcatcggccaaacttgtcagaacaccagtgactggtcatgctcgtcattagtacacaagagcttggaagacgccgaaaataatatggacgatgtcacggtttatcttggccacgtttacgatgcttttagtcattattgcgacctcgcaaccccacaactgaacggcgatgttcttgggcctggtgtattaatcgcatttctatcacaattttctgcagttgccttcctctttctcgtctccatcattcatcaattgttcaaaagaggtcgcgagatgtgttctgaaaaacatcatgatcatgctgataatacgctgtacaggccagacgagaagcctgataagtttgttgggtcagtcaaacgaattcctccggcagccgatgctgttattgtagacttccaggaggctcagaccttttttgttctcactatacaaattgctaccttcttcttcttcagttctagcaaggttatacattcatcaaaaacctttgctgaggcgacttcaacccggatatgggccttttttatatcccttctcagcataatacctattctcctaatgcagtcaatactgcaaagctctcgaaggcattggtggtggacaacactgttgactagcatcgtgtcaatattggcctgggttagtttctacgagccgtcgtcggtagactacgctgcgctatggaacgagttaaaatcagagcagaattcgggtgctcagtgcggtggaaaccccgcccccatcacctactgtggagtttacaaatcacagagcatttacaaattggaacaatcgattgacccccgaattgtacatgttgcccttcaacaacagctcatcagtatatatggggttatcagattttgggcgcctgcttttctgttcgtcgaccagctccttgcctatcgcccgttcaagcgataccgtgatcatgtatcgttcttcgtggccaggattgtccgatgggatcattggagtgatcgcgtcaagaacttcgcgaaacgcaaatcgaaaatcgcaatcgcgatcttatggatcttacatcaaggtgtgctattcgtggcactaacctgggggttcttttacctgttgtatatctacaacatatttggcctgccagtatccgattggacgtacggacagctcatcgcagctcttgtttgggttccacttgggctcaagcttttctacttcatcatctttggagtggagagaggtgttgaaaaccgcgttggagctcagttcaaactggtccaagtcagccagacttctaccactacggcctcacttgtcacgcacacaaccacaaccgagaccggcttcgccaagcacggcgccccggtagcccggtacacagccgtaccagaccccagcgactaccagtatcatggatttggcggcctcccgcgtcaagactcttactcaaaatcaacagtgggtatcgacgccccagagtggatattcatcagcatgggccgcacacgatcagtatcaaaatag

SEQ ID NO: 39018 - protein, 654 aa, Muscodor strobelii
  misc_feature: SGI Peptide ID NO. 573568
  misc_feature (63)..(574): NCBI GI: 39945758 Blast Desc: MGG_07999 [Magnaporthe grisea 70-15] gi|145019233|gb|EDK03461.1| MGG_07999 [Magnaporthe grisea 70-15]
  misc_feature (61)..(557): NCBI GI: 46123411 Blast Desc: FG06083.1 [Gibberella zeae PH-1]
  misc_feature (61)..(557): NCBI GI: 256733028 Blast Desc: [Nectria haematococca mpVI 77-13-4]
  misc_feature (88)..(565): NCBI GI: 171692647 Blast Desc: protein product [Podospora anserina] gi|170946272|emb|CAP73073.1| protein product [Podospora anserina]
  misc_feature (77)..(589): NCBI GI: 46102598 Blast Desc: FG00003.1 [Gibberella zeae PH-1]
  misc_feature (22)..(574): NCBI GI: 256733356 Blast Desc: NECHADRAFT_77342 [Nectria haematococca mpVI 77-13-4]
  misc_feature (122)..(605): NCBI GI: 256722683 Blast Desc: NECHADRAFT_87221 [Nectria haematococca mpVI 77-13-4]
  misc_feature (76)..(555): NCBI GI: 46114780 Blast Desc: FG03232.1 [Gibberella zeae PH-1]
  misc_feature (83)..(428): NCBI GI: 256723705 Blast Desc: NECHADRAFT_52208 [Nectria haematococca mpVI 77-13-4]
  misc_feature (83)..(435): NCBI GI: 46126393 Blast Desc: FG07574.1 [Gibberella zeae PH-1]
MSVNIRSDPYLIGVSEPYTLDSEAGQTLIVIEFKDILSWAVGAFDGIFWNGPQDEIFGSLNQTMILFQPNSLNHTDLIDRPANYSMVCSEGASGIFNSSLTFLNCLQLAFASQLLDEDVITIDNVATSWLSQTLLVDDLSSFNGSGVLNEITTCIGQTCQNTSDWSCSSLVHKSLEDAENNMDDVTVYLGHVYDAFSHYCDLATPQLNGDVLGPGVLIAFLSQFSAVAFLFLVSIIHQLFKRGREMCSEKHHDHADNTLYRPDEKPDKFVGSVKRIPPAADAVIVDFQEAQTFFVLTIQIATFFFFSSSKVIHSSKTFAEATSTRIWAFFISLLSIIPILLMQSILQSSRRHWWWTTLLTSIVSILAWVSFYEPSSVDYAALWNELKSEQNSGAQCGGNPAPITYCGVYKSQSIYKLEQSIDPRIVHVALQQQLISIYGVIRFWAPAFLFVDQLLAYRPFKRYRDHVSFFVARIVRWDHWSDRVKNFAKRKSKIAIAILWILHQGVLFVALTWGFFYLLYIYNIFGLPVSDWTYGQLIAALVWVPLGLKLFYFIIFGVERGVENRVGAQFKLVQVSQTSTTTASLVTHTTTTETGFAKHGAPVARYTAVPDPSDYQYHGFGGLPRQDSYSKSTVGIDAPEWIFISMGRTRSVSK

SEQ ID NO: 39019 - DNA, 888 bp, Muscodor strobelii
  misc_feature: SGI cDNA ID NO. 573569
  misc_feature: Encodes the peptide sequence at SEQ ID NO 39020
atggctaatctcactgatcatcctaaaatcacagtatactccgtcccagatgatgctctgcctgctcctctaccctcgcttgatgaaatcgctctaacgcccacaggagaatttgaggcgagcgggtttgggtctcgtagagttgttcgggtaggtgaaaacttcatcgtcaagtgggggacggccttgtctcttgccgagggcgaaacaatgatctttctcaaacacaacaccactttgcctatccccacggtgtacgctttgtattcgatcggggatgtcaatttcattgttatggaacgtatcgatggagcgccgctcaacctaatgcaaagatttcttagcgagggacgaaaaaggtccattgagacgcaactgcgtggacatattcaagaacttcgcagcttggaacaatcaaagttagaggtaggtcctattttctatggtcctcttggtggtgttcgaccgttctctgtgaacaatcaccaacttgaaggtccataccattcagaggaggcttttatcgacagattccttgaggtccacagcggattggccgcatcggctggaccaaagccacaaagagtcattgatgccgaaataccactaatcaaagaatttaaagaagtttgtggccagtctgcaccagtcttctctcatggtgacttggctcttcataatatcattctgcttccggatgactcagtgtgtataatcgattgggagtttgccggatggtatccaccatggtttgagtatgtcaacactggcgttgcttgtaacctcaagtttctggaagagtttccagagcaggtaaggcttgggcgggcactcatagatgccaggcatgagtgggtccgaacaggcctgggttgttatctgatgtaa

SEQ ID NO: 39020 - protein, 295 aa, Muscodor strobelii
  misc_feature: SGI Peptide ID NO. 573569
  misc_feature (35)..(285): Pfam Id: PF01636 Pfam Desc: Phosphotransferase enzyme family
  misc_feature (217)..(245): Pfam Id: PF01633 Pfam Desc: Choline/ethanolamine kinase
  misc_feature (13)..(253): NCBI GI: 261354367 Blast Desc: phosphotransferase enzyme family protein [Verticillium albo-atrum VaMs.102]
  misc_feature (13)..(256): NCBI GI: 116198711 Blast Desc: CHGG_07511 [Chaetomium globosum CBS 148.51] gi|88178790|gb|EAQ86258.1| CHGG_07511 [Chaetomium globosum CBS 148.51]
  misc_feature (13)..(261): NCBI GI: 116201007 Blast Desc: CHGG_08388 [Chaetomium globosum CBS 148.51] gi|88176906|gb|EAQ84374.1| CHGG_08388 [Chaetomium globosum CBS 148.51]
  misc_feature (20)..(287): NCBI GI: 238844848 Blast Desc: phosphotransferase family protein [Microsporum canis CBS 113480]
  misc_feature (20)..(268): NCBI GI: 261201950 Blast Desc: phosphotransferase enzyme family protein [Ajellomyces dermatitidis SLH14081] gi|239590286|gb|EEQ72867.1| phosphotransferase enzyme family protein [Ajellomyces SLH14081]
  misc_feature (20)..(268): NCBI GI: 154287554 Blast Desc: conserved [Ajellomyces capsulatus NAm1] gi|150408213|gb|EDN03754.1| conserved [Ajellomyces capsulatus NAm1]
  misc_feature (25)..(268): NCBI GI: 67901978 Blast Desc: AN7976.2 [Aspergillus nidulans FGSC A4] gi|40740440|gb|EAA59630.1| AN7976.2 [Aspergillus nidulans FGSC A4] gi|259480726|tpe|CBF73633.1| TPA: conserved [Aspergillus FGSC
  misc_feature (47)..(256): NCBI GI: 238839530 Blast Desc: conserved [Microsporum canis CBS 113480]
  misc_feature (1)..(274): NCBI GI: 46114728 Blast Desc: FG03206.1 [Gibberella zeae PH-1]
  misc_feature (20)..(254): NCBI GI: 239611998 Blast Desc: phosphotransferase enzyme family protein [Ajellomyces dermatitidis ER-3]
MANLTDHPKITVYSVPDDALPAPLPSLDEIALTPTGEFEASGFGSRRVVRVGENFIVKWGTALSLAEGETMIFLKHNTTLPIPTVYALYSIGDVNFIVMERIDGAPLNLMQRFLSEGRKRSIETQLRGHIQELRSLEQSKLEVGPIFYGPLGGVRPFSVNNHQLEGPYHSEEAFIDRFLEVHSGLAASAGPKPQRVIDAEIPLIKEFKEVCGQSAPVFSHGDLALHNIILLPDDSVCIIDWEFAGWYPPWFEYVNTGVACNLKFLEEFPEQVRLGRALIDARHEWVRTGLGCYLM

SEQ ID NO: 39021 - DNA, 430 bp, Muscodor strobelii
  misc_feature: SGI EST ID NO. CUFF.93863.0
  misc_feature: Variant of the nucleotide sequence at SEQ ID NO 39019
gtgaaaacttcatcgtcaagtgggggacggccttgtctcttgccgagggcgaaacaatgatctttctcaaacacaacaccactttgcctatccccacggtgtacgctttgtattcgatcggggatgtcaatttcattgttatggaacgtatcgatggagcgccgctcaacctaatgcaaagatttcttagcgagggacgaaaaaggtccattgagacgcaactgcgtggacatattcaagaacttcgcagcttggaacaatcaaagttagaggtaggtcctattttctatggtcctcttggtggtgttcgaccgttctctgtgaacaatcaccaacttgaaggtccataccattcagaggaggcttttatcgacagattccttgaggtccacagcggattggccgcatcggctggaccaaagccacaaag

SEQ ID NO: 39022 - DNA, 1359 bp, Muscodor strobelii
  misc_feature: SGI cDNA ID NO. 573570
  misc_feature: Encodes the peptide sequence at SEQ ID NO 39023
atgggatacctttcttctctatggcttcttgccagtgtgccctacgttcttggcaccattcatcgcattcatcagcgtcaaagttcccatgtgaagccacttctggccagtagcaacggaactctaacggaaaatatccttcagtgggaagtggaagtccaaataaacaaccagactttctatcttcttgtcgacacgggcagcagcgatctctgggtcaccacgacggactttcaatgcatcagctcgtcgaataaccaagaggctccccaggcagactgccactccggcccaacatatgacgtccctacatctacggaatacgtcgcaaatcagacatttggcgcacagtacggtgtgggcgttgctctgggcaaagtggcgtatgccgacgtcactttgaacggcattacagtccctcaccaaaagattgggcttgttgatcgaactgatattttgaacgatgggattgcgagtggtattctcggtctcggatttccggcgttgacttcagcacatcctggtaccacactcgataatactaccttattgttgaatcgcgccatctacgaccctttattcgtcaatatgtataagaaaggactcgcagaatcttggtatagcatctccctggatcgacctcctcagaacgagaccataaatacagtcgggggctggttcggcattggcgaactaccgcctgtccgtcacagtgacgaatgggctgtgaagtcgatggaagtcaccaataatataccaactgtactcacaggtggagtgagaaaaatctcgctcatgacgcttactatcgacgggctcacatggggtgttgcaggctccaaatcagcatcacaaacaacgaatatgacagcattccaggccgtagtcgacactggcaatcccgcgaaccagtttcctaccgatgttgcaaaagcaatcaacagtgctttcgacccacccgcgatctataatgaaacctccgacatttacatcgtcgattgcaacgcaacatcccccgtcctgggagttgtgctcgatggccacacgttctggcataatgccgaagacctcatttttcacgacaagtctggtgacttttgtttctccagtgttcgcaatgctgcagctgggagcggcatcagcgaaagttttcttggaggcgcatttcttcgaagtgctatatcggtatttgattttgggaagagggaaatgcgcttcgcggcaagactcgatgaaagcagctgtagcggcgaagttgactgcaatcatgacggacaacctcatactggaaaggcaattactatcagaccatcttggctctggacctttatggccttattcatccttgcccttttttaa

SEQ ID NO: 39023 - protein, 452 aa, Muscodor strobelii
  misc_feature: SGI Peptide ID NO. 573570
  misc_feature (52)..(409): Pfam Id: PF00026 Pfam Desc: Eukaryotic aspartyl protease
  misc_feature (56)..(202): Pfam Id: PF00026 Pfam Desc: Eukaryotic aspartyl protease
  misc_feature (292)..(409): Pfam Id: PF00026 Pfam Desc: Eukaryotic aspartyl protease
  misc_feature (28)..(411): NCBI GI: 255954741 Blast Desc: Pc21g10910 [Penicillium chrysogenum Wisconsin 54-1255] gi|211589834|emb|CAP95988.1| Pc21g10910 [Penicillium chrysogenum Wisconsin 54-1255]
  misc_feature (25)..(407): NCBI GI: 238507263 Blast Desc: aspartic-type endopeptidase, [Aspergillus flavus NRRL3357] gi|220689546|gb|EED45897.1| aspartic-type endopeptidase, [Aspergillus flavus NRRL3357]
  misc_feature (25)..(407): NCBI GI: 169786291 Blast Desc: [Aspergillus oryzae RIB40] gi|83776354|dbj|BAE66473.1| protein product [Aspergillus oryzae]
  misc_feature (29)..(409): NCBI GI: 238492183 Blast Desc: aspartic-type endopeptidase, [Aspergillus flavus NRRL3357] gi|220695822|gb|EED52164.1| aspartic-type endopeptidase, [Aspergillus flavus NRRL3357]
  misc_feature (11)..(408): NCBI GI: 159128420 Blast Desc: aspartic-type endopeptidase, [Aspergillus fumigatus A1163]
  misc_feature (11)..(408): NCBI GI: 146323147 Blast Desc: aspartic-type endopeptidase [Aspergillus fumigatus Af293] gi|129556488|gb|EAL86405.2| aspartic-type endopeptidase, [Aspergillus fumigatus Af293]
  misc_feature (11)..(408): NCBI GI: 119473775 Blast Desc: aspartic-type endopeptidase, [Neosartorya fischeri NRRL 181] gi|119406916|gb|EAW16866.1| aspartic-type endopeptidase, [Neosartorya fischeri NRRL 181]
  misc_feature (21)..(416): NCBI GI: 67902230 Blast Desc: AN8102.2 [Aspergillus nidulans FGSC A4] gi|40740534|gb|EAA59724.1| AN8102.2 [Aspergillus nidulans FGSC A4] gi|259480865|tpe|CBF73891.1| TPA: aspartic-type AFUA_3G01220)
  misc_feature (48)..(411): NCBI GI: 212538193 Blast Desc: aspartic-type endopeptidase, [Penicillium marneffei ATCC 18224] gi|210068994|gb|EEA23085.1| aspartic-type endopeptidase, [Penicillium marneffei ATCC 18224]
  misc_feature (48)..(414): NCBI GI: 145246316 Blast Desc: An12g03300 [Aspergillus niger] gi|134080122|emb|CAK46103.1| protein product [Aspergillus niger]
  misc_feature (50)..(410): SWISSPROT Homolog: EC 3.4.23.3 Gastricsin
MGYLSSLWLLASVPYVLGTIHRIHQRQSSHVKPLLASSNGTLTENILQWEVEVQINNQTFYLLVDTGSSDLWVTTTDFQCISSSNNQEAPQADCHSGPTYDVPTSTEYVANQTFGAQYGVGVALGKVAYADVTLNGITVPHQKIGLVDRTDILNDGIASGILGLGFPALTSAHPGTTLDNTTLLLNRAIYDPLFVNMYKKGLAESWYSISLDRPPQNETINTVGGWFGIGELPPVRHSDEWAVKSMEVTNNIPTVLTGGVRKISLMTLTIDGLTWGVAGSKSASQTTNMTAFQAVVDTGNPANQFPTDVAKAINSAFDPPAIYNETSDIYIVDCNATSPVLGVVLDGHTFWHNAEDLIFHDKSGDFCFSSVRNAAAGSGISESFLGGAFLRSAISVFDFGKREMRFAARLDESSCSGEVDCNHDGQPHTGKAITIRPSWLWTFMALFILALF

SEQ ID NO: 39024 - DNA, 235 bp, Muscodor strobelii
  misc_feature: SGI EST ID NO. CUFF.93866.0
  misc_feature: Variant of the nucleotide sequence at SEQ ID NO 39022
ggcaaagtggcgtatgccgacgtcactttgaacggcattacagtccctcaccaaaagattgggcttgttgatcgaactgatattttgaacgatgggattgcgagtggtattctcggtctcggatttccggcgttgacttcagcacatcctggtaccacactcgataatactaccttattgttgaatcgcgccatctacgaccctttattcgtcaatatgtataagaaaggactcg

SEQ ID NO: 39025 - DNA, 648 bp, Muscodor strobelii
  misc_feature: SGI cDNA ID NO. 573571
  misc_feature: Encodes the peptide sequence at SEQ ID NO 39026
atggcgccgaagattctgtgcctgcatggcagcggcacgagcgctgatatctttcgcattcaggcaatacgattaagccggttattgcagccacattttgagcttgtctacgccgatgggttcttagagactgggcccggccccggagtcttaccgttcttcgaaggcatggaaccgtacaagcggtggcttacggacaaaaacgacgaggaggaggagaagccttggtcaggtctgagccggctcgtagagattttcaatcgcgacggaccgtttgtcggcatcatcggattctcacagggtgccaaggccgcaactcatttgctccggtggctcgagcagcgcggaaatcagctcgacttcgccgcccttttcggcggcactgtcccttcgcgacagaagatcggcacggcagagtgggctgatctcataaagccaactatcatcacgagaagcgtccacgtcattggggaagacgacccctataggaatgagaatgaggctctggtagaccactacgataaaccctcgaggatggtcattcgcttcccaggaggccatcacatgcctatccaaccagaaatcaacgaaaaactagcgaaactactcatcacttttcacgaagaggcagacgacatgtatccttga

SEQ ID NO: 39026 - protein, 215 aa, Muscodor strobelii
  misc_feature: SGI Peptide ID NO. 573571
  misc_feature (1)..(208): Pfam Id: PF03959 Pfam Desc: Serine hydrolase (FSH1)
  misc_feature (1)..(204): NCBI GI: 171685404 Blast Desc: protein product [Podospora anserina] gi|170942663|emb|CAP68315.1| protein product [Podospora anserina]
  misc_feature (1)..(202): NCBI GI: 85092294 Blast Desc: NCU08233 [Neurospora crassa OR74A] gi|28920727|gb|EAA30087.1| [Neurospora crassa OR74A]
  misc_feature (3)..(211): NCBI GI: 46126847 Blast Desc: FG07801.1 [Gibberella zeae PH-1]
  misc_feature (3)..(210): NCBI GI: 261188761 Blast Desc: oxidoreductase [Ajellomyces dermatitidis SLH14081] gi|239592026|gb|EEQ74607.1| oxidoreductase [Ajellomyces dermatitidis SLH14081]
  misc_feature (3)..(192): NCBI GI: 156033127 Blast Desc: SS1G_13639 [Sclerotinia sclerotiorum 1980] gi|154699042|gb|EDN98780.1| SS1G_13639 [Sclerotinia sclerotiorum 1980]
  misc_feature (3)..(212): NCBI GI: 70996766 Blast Desc: oxidoreductase [Aspergillus fumigatus Af293] gi|66850773|gb|EAL91100.1| oxidoreductase, [Aspergillus fumigatus Af293]
  misc_feature (3)..(209): NCBI GI: 239610318 Blast Desc: oxidoreductase [Ajellomyces dermatitidis ER-3]
  misc_feature (3)..(210): NCBI GI: 46137897 Blast Desc: FG10463.1 [Gibberella zeae PH-1]
  misc_feature (3)..(192): NCBI GI: 39969385 Blast Desc: MGG_10303 [Magnaporthe grisea 70-15] gi|149211223|ref|XP_001522986.1| MGCH7_ch7g1072 [Magnaporthe grisea 70-15] gi|86197027|gb|EAQ71665.1| MGCH7_ch7g1072 grisea
  misc_feature (3)..(209): NCBI GI: 145234743 Blast Desc: An03g01180 [Aspergillus niger] gi|134057693|emb|CAK38091.1| protein product [Aspergillus niger]
MAPKILCLHGSGTSADIFRIQAIRLSRLLQPHFELVYADGFLETGPGPGVLPFFEGMEPYKRWLTDKNDEEEEKPWSGLSRLVEIFNRDGPFVGIIGFSQGAKAATHLLRWLEQRGNQLDFAALFGGTVPSRQKIGTAEWADLIKPTIITRSVHVIGEDDPYRNENEALVDHYDKPSRMVIRFPGGHHMPIQPEINEKLAKLLITFHEEADDMYP

SEQ ID NO: 39027 - DNA, 3579 bp, Muscodor strobelii
  misc_feature: SGI cDNA ID NO. 573572
  misc_feature: Encodes the peptide sequence at SEQ ID NO 39028
atggccgagaaagccgtaactcgcataatagtatgcgttgacgattccgattataacgaggacggaacgttaggctacggaaatgagagcaacatctacagactgaagaatatcgtcgcaacaggcacaaccacggttgatccgcttgggcgctatgttaatcagtatgtacgatatcatcaagctgtcaaagactcgggaggtctgttttcgcggtttggtggccgccaggaaaattcttctgttgatcagcaggtgaaatacattgttcaagatatttgtgagagatcccagggaactcgggttgaactcttcctttacgggtcaggccgaggcgcatacatcatacaggcagttgcttcgcttttacactcaatcggtataccgaaatccatgcacgattttgcacagctctatcaagtcgctctagagcttgaaaaggcgttcaaaaataatgacagccttggcggaacaaagttgatgacccatcttaagtctcatggcaatgatcctccgaacgttcgtttcttaggtcttttcgactcagtcaagacgtctgttgagacatatgagtacgaaccatccttcgtgggctccatccagaatttccgacacgctcttgctttcaacgatgttcagacgacaccatacacatggcaaactccaccggacgatgagatgacaaatcgatccttcatccaggcttggttcatgggtatgcaccgcgatatctgtggtggttcggagcatgatgggctttcattgtatccattccaatggatgttactagagagcatgaaagcagggcttgtcttaagaactgacagtggacggacgggtatactgtcacttgcattcccgcaatttgcaggaaacctgccaaccttcgctgacgacgagaaagcccattggcgcctaaaatacactaacggcatcgagcttagcatgttcgatttgcaaagcgttcacgtcaaatcgaagaatgcctctgatcattccgttagattcaaagccggaggtaatactagaggcatgcgcaagatcttcagaagcaacagaagcctcttgggttggacagaaaagcatgcgtacggaaccattatacatccagctgtgttcactatgttagaccgcaaccctcgatattacgatcaaggtgttttcaaggcaaagaagggagagctatcagcctacttagagtgcatggatgatcaaggcaggcctgtgccatggcttgaaggcatggagctacaagcaagcggagtgaacgcattcagaatattggtatgcggcaaaactggtgtagggaagtccactttgatcaacaaggttttcggagtcgaaatgacagaagagtcaacaacctacagtcagggtgtgcatgacatcaaccaagcattcgaatcggcaaatcacccgggtctcttgatacacgactcgagaggctggcaagctggcagtgatgcagagttggacttgattgcaaaatttctgcgtcatcgagcgtttcaaaagaatccagccgaggctctacatgtgatatggttctgtgtagattcggatgtaagccgaatcgaggaggccgataagcggacatttcagatcatttctcaattctcgagttcggttcctgtttttgtcgtcggaaccaagaaggacaagttagtcgcctaccggaaaatggaactactagaacaatatatggagaagacgggcaacttcaaggaagccagccgcttggctcagcaggaagctagcgatgcagcagatgctcagtttcaagaacttcgaaaccaactctcaaatcttgaacattataaagccgacggatattgctgtatttcgaaagacgacgatagtggcgtgaaaacacttctcaacgatactctggaactcctttccgacgatcgagtgcgtgtcttctgtgtcgcggcccaagtaatggatgttgaacaaaagatagatcaggctattacggaggttatgcgactcggagctcacgccatccgtacagcgatggtaccactcccggcgtctggcttgatcgggacgcctacggtttctcgtattctctgtgagcatgtactgcaatgctttggattccccaaagcaacgccggaggccgtcgaagaggtgatgtcaagagttgtgatgaagaatctgagatccttcatggtcgtttctctcacacagttcggcgccgttagtgctgctgccatcggaacagcaattccgacagccggtattggcgtcctcgttggtctcgccggctgtatcctggcgacaccacctacagcgcgtatgttgctgaagtgcgctgccgacatgattctcatcctagagagatcttttcgataccagggtaaatatgtctcggtgaagcagattgaggatgcggcagcatactatacaacagcgatgacgaagagcctagccggaaggccgattctactacaggagcatgtccatgcgcaactcgatcaaatgatacccctgaagaaattcggcgtgggtttcaagtttggcaagttgagacaaggtctccaagatatcatatacatgaatagatacgataagtcagaggaaagcaaccctgcgagcaggaccaactcgcaccacgtcgcgtccacgacggatctgacaatgacgtcgaccaacaacagtactcccccactgccgagcgcaccgacgccagacggatggagagattggaagacggcaccgacaccagatccgcaatcacaagcgaactcgcctgtgccgaatacttggggcgactggaagcacgacccaacgttgtcaccaccgccgctggctccaataaaacgaaaaagcgtgggttcaccacagcctccaccgaacccatggactagccatccaaagaacgtggcagagctaccgcctgaagaccgagagctcaatatgaaatacctaggtgtgcccttgaatgccacgccagtagcggaactcgactcaacggcgatccattcgttgcctgccgaactagaaggcatgtctctacgggatccaaaccaccacgtctcagagctgcccggcgactacggactaccgggccaaacacaccccgactacgcgccgtcgatccgccgcgggccacgagcgccaacaatgcaactcgacggcaccctctacacacccattgaccctccactatcccatcactcaaacacctacccaccagcccaagccccagctcacgctcacgctcctctgcaaaaatccggttccactggttacatggacagaataaccgactaccacacccaagcgatcggcaaactcagcgcatcaaccgccgacctcgcgatgcggacggtgagctccggaaacctggccatggacaaagtgaactcgacgggggccgggatcgcgacctggacgaggaacaactcgagtctcgccgtagacaagacgacggacttcgcgctaaagacgaagcagagcactaccgacctagcgctgaagacgaaggaaagcacgaccgacttggcgaccaagactaagagctccggtagtgggtttatgaagatgtttagatctaagaagtcttcttcttga

SEQ ID NO: 39028 - protein, 1192 aa, Muscodor strobelii
  misc_feature: SGI Peptide ID NO. 573572
  misc_feature (426)..(553): Pfam Id: PF08477 Pfam Desc: Miro-like protein
  misc_feature (8)..(896): NCBI GI: 256724333 Blast Desc: NECHADRAFT_53363 [Nectria haematococca mpVI 77-13-4]
  misc_feature (1)..(857): NCBI GI: 46114964 Blast Desc: FG03324.1 [Gibberella zeae PH-1]
  misc_feature (103)..(871): NCBI GI: 261356852 Blast Desc: conserved [Verticillium albo-atrum VaMs.102]
  misc_feature (8)..(515): NCBI GI: 169622348 Blast Desc: SNOG_14395 [Phaeosphaeria nodorum SN15] gi|160704751|gb|EAT78266.2| SNOG_14395 [Phaeosphaeria nodorum SN15]
  misc_feature (421)..(594): NCBI GI: 170084701 Blast Desc: [Laccaria bicolor S238N-H82] gi|164651126|gb|EDR15366.1| [Laccaria bicolor S238N-H82]
  misc_feature (422)..(752): NCBI GI: 256728360 Blast Desc: [Nectria haematococca mpVI 77-13-4]
  misc_feature (615)..(857): NCBI GI: 169622346 Blast Desc: SNOG_14394 [Phaeosphaeria nodorum SN15] gi|160704750|gb|EAT78265.2| SNOG_14394 [Phaeosphaeria nodorum SN15]
  misc_feature (425)..(662): NCBI GI: 170115421 Blast Desc: [Laccaria bicolor S238N-H82] gi|164636215|gb|EDR00513.1| [Laccaria bicolor S238N-H82]
  misc_feature (422)..(595): NCBI GI: 170115142 Blast Desc: [Laccaria bicolor S238N-H82] gi|164636242|gb|EDR00539.1| [Laccaria bicolor S238N-H82]
  misc_feature (425)..(662): NCBI GI: 170087806 Blast Desc: [Laccaria bicolor S238N-H82] gi|164650326|gb|EDR14567.1| [Laccaria bicolor S238N-H82]
MAEKAVTRIIVCVDDSDYNEDGTLGYGNESNIYRLKNIVATGTTTVDPLGRYVNQYVRYHQAVKDSGGLFSRFGGRQENSSVDQQVKYIVQDICERSQGTRVELFLYGSGRGAYIIQAVASLLHSIGIPKSMHDFAQLYQVALELEKAFKNNDSLGGTKLMTHLKSHGNDPPNVRFLGLFDSVKTSVETYEYEPSFVGSIQNFRHALAFNDVQTTPYTWQTPPDDEMTNRSFIQAWFMGMHRDICGGSEHDGLSLYPFQWMLLESMKAGLVLRTDSGRTGILSLAFPQFAGNLPTFADDEKAHWRLKYTNGIELSMFDLQSVHVKSKNASDHSVRFKAGGNTRGMRKIFRSNRSLLGWTEKHAYGTIIHPAVFTMLDRNPRYYDQGVFKAKKGELSAYLECMDDQGRPVPWLEGMELQASGVNAFRILVCGKTGVGKSTLINKVFGVEMTEESTTYSQGVHDINQAFESANHPGLLIHDSRGWQAGSDAELDLIAKFLRHRAFQKNPAEALHVIWFCVDSDVSRIEEADKRTFQIISQFSSSVPVFVVGTKKDKLVAYRKMELLEQYMEKTGNFKEASRLAQQEASDAADAQFQELRNQLSNLEHYKADGYCCISKDDDSGVKTLLNDTLELLSDDRVRVFCVAAQVMDVEQKIDQAITEVMRLGAHAIRTAMVPLPASGLIGTPTVSRILCEHVLQCFGFPKATPEAVEEVMSRVVMKNLRSFMVVSLTQFGAVSAAAIGTAIPTAGIGVLVGLAGCILATPPTARMLLKCAADMILILERSFRYQGKYVSVKQIEDAAAYYTTAMTKSLAGRPILLQEHVHAQLDQMIPLKKFGVGFKFGKLRQGLQDIIYMNRYDKSEESNPASRTNSHHVASTTDLTMTSTNNSTPPLPSAPTPDGWRDWKTAPTPDPQSQANSPVPNTWGDWKHDPTLSPPPLAPIKRKSVGSPQPPPNPWTSHPKNVAELPPEDRELNMKYLGVPLNATPVAELDSTAIHSLPAELEGMSLRDPNHHVSELPGDYGLPGQTHPDYAPSIRRGPRAPTMQLDGTLYTPIDPPLSHHSNTYPPAQAPAHAHAPLQKSGSTGYMDRITDYHTQAIGKLSASTADLAMRTVSSGNLAMDKVNSTGAGIATWTRNNSSLAVDKTTDFALKTKQSTTDLALKTKESTTDLATKTKSSGSGFMKMFRSKKSSS

SEQ ID NO: 39029 - DNA, 6145 bp, Muscodor strobelii
  misc_feature: SGI EST ID NO. CUFF.94243.0
  misc_feature: Variant of the nucleotide sequence at SEQ ID NO 39027
ggaggcggacagaattgcggtaaactcggtgagagttactgcaaaagctcaagagagaagatcagccttgtatgctaagtttaggaacagtattaggggccggtaagtgccatggtgggatagcttaatgctgtgagacaacttaggcagggatctgtctcatgctgcctttcagctaacgagccgcccctcaacaacatcctgtccgaattttgacatttttcatcatcatccttctcatatccatctgcctctatatgtgacgtggaggcacggtcgcgtcccctctccttgcagaccaacaacagtcccattcatgttccaaatgtgaaattagcttaccgggacataacaattcattcctgcgagcaggccgaaacacgccatcatggccgagaaagccgtaactcgcataatagtatgcgttgacgattccgattataacgaggacggaacgttaggctacggaaatgagagcaacatctacagactgaagaatatcgtcgcaacaggcacaaccacggttgatccgcttgggcgctatgttaatcagtatgtacgatatcatcaagctgtcaaagactcgggaggtctgttttcgcggtttggtggccgccaggaaaattcttctgttgatcagcaggtgaaatacattgttcaagatatttgtgagagatcccagggaactcgggttgaactcttcctttacgggtcaggccgaggcgcatacatcatacaggcagttgcttcgcttttacactcaatcggtataccgaaatccatgcacgattttgcacagctctatcaagtcgctctagagcttgaaaaggcgttcaaaaataatgacagccttggcggaacaaagttgatgacccatcttaagtctcatggcaatgatcctccgaacgttcgtttcttaggtcttttcgactcagtcaagacgtctgttgagacatatgagtacgaaccatccttcgtgggctccatccagaatttccgacacgctcttgctttcaacgatgttcagacgacaccatacacatggcaaactccaccggacgatgagatgacaaatcgatccttcatccaggcttggttcatgggtatgcaccgcgatatctgtggtggttcggagcatgatgggctttcattgtatccattccaatggatgttactagagagcatgaaagcagggcttgtcttaagaactgacagtggacggacgggtatactgtcacttgcattcccgcaatttgcaggaaacctgccaaccttcgctgacgacgagaaagcccattggcgcctaaaatacactaacggcatcgagcttagcatgttcgatttgcaaagcgttcacgtcaaatcgaagaatgcctctgatcattccgttagattcaaagccggaggtaatactagaggcatgcgcaagatcttcagaagcaacagaagcctcttgggttggacagaaaagcatgcgtacggaaccattatacatccagctgtgttcactatgttagaccgcaaccctcgatattacgatcaaggtgttttcaaggcaaagaagggagagctatcagcctacttagagtgcatggatgatcaaggcaggcctgtgccatggcttgaaggcatggagctacaagcaagcggagtgaacgcattcagaatattggtatgcggcaaaactggtgtagggaagtccactttgatcaacaaggttttcggagtcgaaatgacagaagagtcaacaacctacagtcagggtgtgcatgacatcaaccaagcattcgaatcggcaaatcacccgggtctcttgatacacgactcgagaggctggcaagctggcagtgatgcagagttggacttgattgcaaaatttctgcgtcatcgagcgtttcaaaagaatccagccgaggctctacatgtgatatggttctgtgtagattcggatgtaagccgaatcgaggaggccgataagcggacatttcagatcatttctcaattctcgagttcggttcctgtttttgtcgtcggaaccaagaaggacaagttagtcgcctaccggaaaatggaactactagaacaatatatggagaagacgggcaacttcaaggaagccagccgcttggctcagcaggaagctagcgatgcagcagatgctcagtttcaagaacttcgaaaccaactctcaaatcttgaacattataaagccgacggatattgctgtatttcgaaagacgacgatagtggcgtgaaaacacttctcaacgatactctggaactcctttccgacgatcgagtgcgtgtcttctgtgtcgcggcccaagtaatggatgttgaacaaaagatagatcaggctattacggaggttatgcgactcggagctcacgccatccgtacagcgatggtaccactcccggcgtctggcttgatcgggacgcctacggtttctcgtattctctgtgagcatgtactgcaatgctttggattccccaaagcaacgccggaggccgtcgaagaggtgatgtcaagagttgtgatgaagaatctgagatccttcatggtcgtttctctcacacagttcggcgccgttagtgctgctgccatcggaacagcaattccgacagccggtattggcgtcctcgttggtctcgccggctgtatcctggcgacaccacctacagcgcgtatgttgctgaagtgcgctgccgacatgattctcatcctagagagatcttttcgataccagggtaaatatgtctcggtgaagcagattgaggatgcggcagcatactatacaacagcgatgacgaagagcctagccggaaggccgattctactacaggagcatgtccatgcgcaactcgatcaaatgatacccctgaagaaattcggcgtgggtttcaagtttggcaagttgagacaaggtctccaagatatcatatacatgaatagatacgataagtcagaggaaagcaaccctgcgagcaggaccaactcgcaccacgtcgcgtccacgacggatctgacaatgacgtcgaccaacaacagtactcccccactgccgagcgcaccgacgccagacggatggagagattggaagacggcaccgacaccagatccgcaatcacaagcgaactcgcctgtgccgaatacttggggcgactggaagcacgacccaacgttgtcaccaccgccgctggctccaataaaacgaaaaagcgtgggttcaccacagcctccaccgaacccatggactagccatccaaagaacgtggcagagctaccgcctgaagaccgagagctcaatatgaaatacctaggtgtgcccttgaatgccacgccagtagcggaactcgactcaacggcgatccattcgttgcctgccgaactagaaggcatgtctctacgggatccaaaccaccacgtctcagagctgcccggcgactacggactaccgggccaaacacaccccgactacgcgccgtcgatccgccgcgggccacgagcgccaacaatgcaactcgacggcaccctctacacacccattgaccctccactatcccatcactcaaacacctacccaccagcccaagccccagctcacgctcacgctcctctgcaaaaatccggttccactggttacatggacagaataaccgactaccacacccaagcgatcggcaaactcagcgcatcaaccgccgacctcgcgatgcggacggtgagctccggaaacctggccatggacaaagtgaactcgacgggggccgggatcgcgacctggacgaggaacaactcgagtctcgccgtagacaagacgacggacttcgcgctaaagacgaagcagagcactaccgacctagcgctgaagacgaaggaaagcacgaccgacttggcgaccaagactaagagctccggtagtgggtttatgaagatgtttagatctaagaagtcttcttcttgagacttcccaccgaggggttcaattacgggtttgcttgagaggctttggttcgtcgtgtgagtatataccattttgtgtatttggattaaggtctgggagaaatgtttgagatacctatcagggggttggaaaagtgtgtattaatctcagagattttggtatgaattgaacgttagacgatacaaataccttgctcacatgccctgttggggcatcacctcagtctgagattgcattgctctctcaaatcacatatcttagcatcacatgacaaaatatatacccaagtaggtttggaacaaaatcaattggacgtcatgcagcctatcctacttctttcactaaaatacaggcatcatcttcagccgtgactccgtatctgtcatgctttccttcgttctgccatcgccaggatatgccccccaccccaattctataggtagtactagtagtagttaagtgtttaagtgtttcacaggccagggaggatcatccgtggctacgacatgatatctaggtaggggtatagagaggataaaaagtcggtgtgttgttgtggtttttcatttgtattgttgattacaaggtctccatcttgtcgaggatggcacgggtgaattcgtgggtggtggcctcaccgcccatgtcgcgggtgcggtatttgctacgacatgtgtcagtgagattgctacgtgatggaaaaaaagaaaaaaagaggtgtatatttacccatcggcaatgacgccgtagacggccttggagatgcggttggcatggtcgtcgaggccgaggtggcgcagcagcatggtgccggagaggagcagggcggtggggttggcctggtccttgcccttgatgtcgagcccgacgtggcggcagccgggctcgaagacagcgacatcgcggcccatgttgcagccggggacgatgccgggcccgccgacgagggcggcgccgatgttggagaggatgccgccgtagaggttgggcatgaccatgacgtcgaactgctggggcctagagacggcctgcatgctggcgttgtcgacgatcatgtcgttggtctcgagggtggggtagtccttggcgacctgctggaaggtctggcggaacaggccgtcggcgagcttcatgatgttggccttgtggatgcaggtgatcttcttgcggttgttggcgagggcgaaggagaaggcgaacttggcgatgcgctcgctcttgaggcgggtgatgatcttgagcgactcgacgacgccggggacgctctggtgctcgagccccgagtactcgccctcggtgttctcgcggatgatgacgaggtcgacgtccttgtggcgcgtgtcgtagccggggatgttcttgatcagacagacgctcgcgtagatgtcgagctcctggcgcatggcgacgttgaagctctggtgccccgagcggctgatgggggtgtgcaggatgcccttgagcccgagcttgttccgcttaagagaggcgaccgactcgcggaagacgtcctcggtgatgcccggggcgccgctgtcgacccccgaggcgtcgacctgctcccagtcgacggggacgctgtccgccttgaagatggtcttgacgctctcggcgacctcggccccgatgccgtcgccggggatcagcgtgaccgtgtacttgctgccgaacttggttggcttgaagatgtccgactgcaccgtcgcgaaggagcgggcggcattgtggagctggtgctgggcttgctggcgggaagctgctcgcgcgaggcgctgtggacagagagaaatatgtgtcagtacagtagtagtgcattgcagctttggtgtcaggtatgcattatgggtatgcaatgcaatgggaagtggtgatggtgtggtgtcgagggtgttgagccatatcgtgaggcagagctgagagtgggagagagagaggcgcatgtgaaaactggcaacggcatcacagtatgacgatagcatgcaattgcgaggctgcagacgtacctgggcagtgttggtggagctccgcgacaacatggttgcaactgggctttggagacggaggagagagggagatgtgtcgagcagaagacggcgacagacgacaggaagacaacaagaagtataaaatacttaataacaataacgctcacgatttgtccccggcactaaggttcag

SEQ ID NO: 39030 - DNA, 1161 bp, Muscodor strobelii
  misc_feature: SGI cDNA ID NO. 573573
  misc_feature: Reduced expression when VOC is produced
  misc_feature: Encodes the peptide sequence at SEQ ID NO 39031
atgttgtcgcggagctccaccaacactgcccagcgcctcgcgcgagcagcttcccgccagcaagcccagcaccagctccacaatgccgcccgctccttcgcgacggtgcagtcggacatcttcaagccaaccaagttcggcagcaagtacacggtcacgctgatccccggcgacggcatcggggccgaggtcgccgagagcgtcaagaccatcttcaaggcggacagcgtccccgtcgactgggagcaggtcgacgcctcgggggtcgacagcggcgccccgggcatcaccgaggacgtcttccgcgagtcggtcgcctctcttaagcggaacaagctcgggctcaagggcatcctgcacacccccatcagccgctcggggcaccagagcttcaacgtcgccatgcgccaggagctcgacatctacgcgagcgtctgtctgatcaagaacatccccggctacgacacgcgccacaaggacgtcgacctcgtcatcatccgcgagaacaccgagggcgagtactcggggctcgagcaccagagcgtccccggcgtcgtcgagtcgctcaagatcatcacccgcctcaagagcgagcgcatcgccaagttcgccttctccttcgccctcgccaacaaccgcaagaagatcacctgcatccacaaggccaacatcatgaagctcgccgacggcctgttccgccagaccttccagcaggtcgccaaggactaccccaccctcgagaccaacgacatgatcgtcgacaacgccagcatgcaggccgtctctaggccccagcagttcgacgtcatggtcatgcccaacctctacggcggcatcctctccaacatcggcgccgccctcgtcggcgggcccggcatcgtccccggctgcaacatgggccgcgatgtcgctgtcttcgagcccggctgccgccacgtcgggctcgacatcaagggcaaggaccaggccaaccccaccgccctgctcctctccggcaccatgctgctgcgccacctcggcctcgacgaccatgccaaccgcatctccaaggccgtctacggcgtcattgccgatggcaaataccgcacccgcgacatgggcggtgaggccaccacccacgaattcacccgtgccatcctcgacaagatggagaccttgtaa

SEQ ID NO: 39031 - protein, 386 aa, Muscodor strobelii
  misc_feature: SGI Peptide ID NO. 573573
  misc_feature (51)..(379): Pfam Id: PF00180 Pfam Desc: Isocitrate/isopropylmalate dehydrogenase
  misc_feature (51)..(308): Pfam Id: PF00180 Pfam Desc: Isocitrate/isopropylmalate dehydrogenase
  misc_feature (316)..(379): Pfam Id: PF00180 Pfam Desc: Isocitrate/isopropylmalate dehydrogenase
  misc_feature (6)..(386): NCBI GI: 145604955 Blast Desc: isocitrate dehydrogenase subunit 1, mitochondrial precursor [Magnaporthe grisea 70-15] gi|145012861|gb|EDJ97502.1| isocitrate dehydrogenase subunit 1, mitochondrial precursor
  misc_feature (1)..(386): NCBI GI: 261353864 Blast Desc: isocitrate dehydrogenase subunit 1 [Verticillium albo-atrum VaMs.102]
  misc_feature (1)..(386): NCBI GI: 46122711 Blast Desc: IDH1_AJECA Isocitrate dehydrogenase [NAD] subunit 1, mitochondrial precursor (Isocitric dehydrogenase) (NAD+-specific ICDH) [Gibberella zeae PH-1]
  misc_feature (1)..(386): NCBI GI: 256727312 Blast Desc: [Nectria haematococca mpVI 77-13-4]
  misc_feature (1)..(384): NCBI GI: 154323614 Blast Desc: isocitrate dehydrogenase subunit 1, mitochondrial precursor [Botryotinia fuckeliana B05.10] gi|150842435|gb|EDN17628.1| isocitrate dehydrogenase subunit 1,
  misc_feature (1)..(385): NCBI GI: 156056859 Blast Desc: isocitrate dehydrogenase subunit 1, mitochondrial precursor [Sclerotinia sclerotiorum 1980] gi|154701946|gb|EDO01685.1| isocitrate dehydrogenase subunit 1,
  misc_feature (1)..(384): NCBI GI: 242786372 Blast Desc: NAD()-isocitrate dehydrogenase subunit I [Talaromyces stipitatus ATCC 10500] gi|218720938|gb|EED20357.1| NAD()-isocitrate dehydrogenase subunit I [Talaromyces stipitatus
  misc_feature (1)..(385): NCBI GI: 13124301 Blast Desc: IDH1_AJECA RecName: Full=Isocitrate dehydrogenase [NAD] subunit 1, mitochondrial; AltName: Full=Isocitric dehydrogenase; AltName: Full=NAD(+)-specific ICDH; Flags: subunit
  misc_feature (1)..(384): NCBI GI: 212543337 Blast Desc: NAD(+)-isocitrate dehydrogenase subunit I [Penicillium marneffei ATCC 18224] gi|210066730|gb|EEA20823.1| NAD(+)-isocitrate dehydrogenase subunit I [Penicillium marneffei
  misc_feature (1)..(384): NCBI GI: 255938682 Blast Desc: Pc14g01170 [Penicillium chrysogenum Wisconsin 54-1255] gi|211584732|emb|CAP74258.1| Pc14g01170 [Penicillium chrysogenum Wisconsin 54-1255]
  misc_feature (29)..(385): SWISSPROT Homolog: EC 1.1.1.41 Isocitrate dehydrogenase (NAD(+))
  misc_feature: Useful for introducing or modulating the production of volatile compounds
MLSRSSTNTAQRLARAASRQQAQHQLHNAARSFATVQSDIFKPTKFGSKYTVTLIPGDGIGAEVAESVKTIFKADSVPVDWEQVDASGVDSGAPGITEDVFRESVASLKRNKLGLKGILHTPISRSGHQSFNVAMRQELDIYASVCLIKNIPGYDTRHKDVDLVIIRENTEGEYSGLEHQSVPGVVESLKIITRLKSERIAKFAFSFALANNRKKITCIHKANIMKLADGLFRQTFQQVAKDYPTLETNDMIVDNASMQAVSRPQQFDVMVMPNLYGGILSNIGAALVGGPGIVPGCNMGRDVAVFEPGCRHVGLDIKGKDQANPTALLLSGTMLLRHLGLDDHANRISKAVYGVIADGKYRTRDMGGEATTHEFTRAILDKMETL

SEQ ID NO: 39032 - DNA, 3441 bp, Muscodor strobelii
  misc_feature: SGI EST ID NO. CUFF.94244.1
  misc_feature: Variant of the nucleotide sequence at SEQ ID NO 39030
ctgaaccttagtgccggggacaaatcgtgagcgttattgttattaagtattttatacttcttgttgtcttcctgtcgtctgtcgccgtcttctgctcgacacatctccctctctcctccgtctccaaagcccagttgcaaccatgttgtcgcggagctccaccaacactgcccagcgcctcgcgcgagcagcttcccgccagcaagcccagcaccagctccacaatgccgcccgctccttcgcgacggtgcagtcggacatcttcaagccaaccaagttcggcagcaagtacacggtcacgctgatccccggcgacggcatcggggccgaggtcgccgagagcgtcaagaccatcttcaaggcggacagcgtccccgtcgactgggagcaggtcgacgcctcgggggtcgacagcggcgccccgggcatcaccgaggacgtcttccgcgagtcggtcgcctctcttaagcggaacaagctcgggctcaagggcatcctgcacacccccatcagccgctcggggcaccagagcttcaacgtcgccatgcgccaggagctcgacatctacgcgagcgtctgtctgatcaagaacatccccggctacgacacgcgccacaaggacgtcgacctcgtcatcatccgcgagaacaccgagggcgagtactcggggctcgagcaccagagcgtccccggcgtcgtcgagtcgctcaagatcatcacccgcctcaagagcgagcgcatcgccaagttcgccttctccttcgccctcgccaacaaccgcaagaagatcacctgcatccacaaggccaacatcatgaagctcgccgacggcctgttccgccagaccttccagcaggtcgccaaggactaccccaccctcgagaccaacgacatgatcgtcgacaacgccagcatgcaggccgtctctaggccccagcagttcgacgtcatggtcatgcccaacctctacggcggcatcctctccaacatcggcgccgccctcgtcggcgggcccggcatcgtccccggctgcaacatgggccgcgatgtcgctgtcttcgagcccggctgccgccacgtcgggctcgacatcaagggcaaggaccaggccaaccccaccgccctgctcctctccggcaccatgctgctgcgccacctcggcctcgacgaccatgccaaccgcatctccaaggccgtctacggcgtcattgccgatggcaaataccgcacccgcgacatgggcggtgaggccaccacccacgaattcacccgtgccatcctcgacaagatggagaccttgtaatcaacaatacaaatgaaaaaccacaacaacacaccgactttttatcctctctatacccctacctagatatcatgtcgtagccacggatgatcctccctggcctgtgaaacacttaaacacttaactactactagtactacctatagaattggggtggggggcatatcctggcgatggcagaacgaaggaaagcatgacagatacggagtcacggctgaagatgatgcctgtattttagtgaaagaagtaggataggctgcatgacgtccaattgattttgttccaaacctacttgggtatatattttgtcatgtgatgctaagatatgtgatttgagagagcaatgcaatctcagactgaggtgatgccccaacagggcatgtgagcaaggtatttgtatcgtctaacgttcaattcataccaaaatctctgagattaatacacacttttccaaccccctgataggtatctcaaacatttctcccagaccttaatccaaatacacaaaatggtatatactcacacgacgaaccaaagcctctcaagcaaacccgtaattgaacccctcggtgggaagtctcaagaagaagacttcttagatctaaacatcttcataaacccactaccggagctcttagtcttggtcgccaagtcggtcgtgctttccttcgtcttcagcgctaggtcggtagtgctctgcttcgtctttagcgcgaagtccgtcgtcttgtctacggcgagactcgagttgttcctcgtccaggtcgcgatcccggcccccgtcgagttcactttgtccatggccaggtttccggagctcaccgtccgcatcgcgaggtcggcggttgatgcgctgagtttgccgatcgcttgggtgtggtagtcggttattctgtccatgtaaccagtggaaccggatttttgcagaggagcgtgagcgtgagctggggcttgggctggtgggtaggtgtttgagtgatgggatagtggagggtcaatgggtgtgtagagggtgccgtcgagttgcattgttggcgctcgtggcccgcggcggatcgacggcgcgtagtcggggtgtgtttggcccggtagtccgtagtcgccgggcagctctgagacgtggtggtttggatcccgtagagacatgccttctagttcggcaggcaacgaatggatcgccgttgagtcgagttccgctactggcgtggcattcaagggcacacctaggtatttcatattgagctctcggtcttcaggcggtagctctgccacgttctttggatggctagtccatgggttcggtggaggctgtggtgaacccacgctttttcgttttattggagccagcggcggtggtgacaacgttgggtcgtgcttccagtcgccccaagtattcggcacaggcgagttcgcttgtgattgcggatctggtgtcggtgccgtcttccaatctctccatccgtctggcgtcggtgcgctcggcagtgggggagtactgttgttggtcgacgtcattgtcagatccgtcgtggacgcgacgtggtgcgagttggtcctgctcgcagggttgctttcctctgacttatcgtatctattcatgtatatgatatcttggagaccttgtctcaacttgccaaacttgaaacccacgccgaatttcttcaggggtatcatttgatcgagttgcgcatggacatgctcctgtagtagaatcggccttccggctaggctcttcgtcatcgctgttgtatagtatgctgccgcatcctcaatctgcttcaccgagacatatttaccctggtatcgaaaagatctctctaggatgagaatcatgtcggcagcgcacttcagcaacatacgcgctgtaggtggtgtcgccaggatacagccggcgagaccaacgaggacgccaataccggctgtcggaattgctgttccgatggcagcagcactaacggcgccgaactgtgtgagagaaacgaccatgaaggatctcagattcttcatcacaactcttgacatcacctcttcgacggcctccggcgttgctttggggaatccaaagcattgcagtacatgctcacagagaatacgagaaaccgtaggcgtcccgatcaagccagacgccgggagtggta

SEQ ID NO: 39033 - DNA, 1119 bp, Muscodor strobelii
  misc_feature: SGI cDNA ID NO. 573574
  misc_feature: Encodes the peptide sequence at SEQ ID NO 39034
atgaatgcacaacccttagaccaaaatgccggcgcgatagattacagcgaacgcataaaacggctctggcaggatattgcgggacaatttttgaagacgaagtttcggccgtcgcaacatgaagacaatcacgagaaattaggatcattcttgctattcccagaacttccactagagcttagggaatcaatatgggaactatgtatcccacggcgatgcatatatctctctgatcataacatggttttggacctttactatcgcacctacggccccgtcggaacttctttcgagcctatgccgctcatcggtagagcttgccgagaagcgcgggcggtggttaggcggtacggagggcctgaatctaaagggaatgagaaagggaagacctggttcagtccgagatatgacagcatctgtattggaaatacatggcctctctgtaacgaaattgatatctcaacggccgaggggggcaccagtcaagggctgctgagtcattgccgcaatccgaccattccactgaccatcaaccagcaattcataaatgattaccagagtatcaggacgttgctcgcgtcgttacctgcggattccgagccgcccccaagctcgcaaaaggtcgcgacgatgactgagtggacggtagaccgtatggtggaaagagaagaatgccaagtgatgcttggaggattcaagatcttgatgagtcgccaagaggctgataacttgaaaatgactggcttgtttggtgaaacgaggtccatgaacatcgaggtcgactgcgataacacgcgagaacaaattacgaagctgtttcctgccgccaaattcgggaattgctttggtctaccccaatcttatctggaccaggactacaagtctgatgtggagaaatttgaaaggcaactgatcacgttttggttgatgaagaacggacttgttgacaaagatgagagtattttgactcctgaggatgtcaaaattatgatagcaaggctggatgtagaaggccgagcaacacttgcgcgactgcctaagctcaaatatgtggtagctatgcacatcgagctgtacaaggaatacaaaattagaatagggagtagcaacgagctatag

SEQ ID NO: 39034 - protein, 372 aa, Muscodor strobelii
  misc_feature: SGI Peptide ID NO. 573574
  misc_feature (47)..(144): NCBI GI: 238845992 Blast Desc: conserved [Microsporum canis CBS 113480]
MNAQPLDQNAGAIDYSERIKRLWQDIAGQFLKTKFRPSQHEDNHEKLGSFLLFPELPLELRESIWELCIPRRCIYLSDHNMVLDLYYRTYGPVGTSFEPMPLIGRACREARAVVRRYGGPESKGNEKGKTWFSPRYDSICIGNTWPLCNEIDISTAEGGTSQGLLSHCRNPTIPLTINQQFINDYQSIRTLLASLPADSEPPPSSQKVATMTEWTVDRMVEREECQVMLGGFKILMSRQEADNLKMTGLFGETRSMNIEVDCDNTREQITKLFPAAKFGNCFGLPQSYLDQDYKSDVEKFERQLITFWLMKNGLVDKDESILTPEDVKIMIARLDVEGRATLARLPKLKYVVAMHIELYKEYKIRIGSSNEL

SEQ ID NO: 39035 - DNA, 845 bp, Muscodor strobelii
  misc_feature: SGI EST ID NO. CUFF.93896.0
  misc_feature: Variant of the nucleotide sequence at SEQ ID NO 39033
aggatcattcttgctattcccagaacttccactagagcttagggaatcaatatgggaactatgtatcccacggcgatgcatatatctctctgatcataacatggttttggacctttactatcgcacctacggccccgtcggaacttctttcgagcctatgccgctcatcggtagagcttgccgagaagcgcgggcggtggttaggcggtacggagggcctgaatctaaagggaatgagaaagggaagacctggttcagtccgagatatgacagcatctgtattggaaatacatggcctctctgtaacgaaattgatatctcaacggccgaggggggcaccagtcaagggctgctgagtcattgccgcaatccgaccattccactgaccatcaaccagcaattcataaatgattaccagagtatcaggacgttgctcgcgtcgttacctgcggattccgagccgcccccaagctcgcaaaaggtcgcgacgatgactgagtggacggtagaccgtatggtggaaagagaagaatgccaagtgatgcttggaggattcaagatcttgatgagtcgccaagaggctgataacttgaaaatgactggcttgtttggtgaaacgaggtccatgaacatcgaggtcgactgcgataacacgcgagaacaaattacgaagctgtttcctgccgccaaattcgggaattgctttggtctaccccaatcttatctggaccaggactacaagtctgatgtggagaaatttgaaaggcaactgatcacgttttggttgatgaagaacggacttgttgacaaagatgagagtattttgactcctgaggatgtcaaaa

SEQ ID NO: 39036 - DNA, 1020 bp, Muscodor strobelii
  misc_feature: SGI cDNA ID NO. 573575
  misc_feature: Elevated expression when VOC is produced
  misc_feature: Encodes the peptide sequence at SEQ ID NO 39037
atggacgtctcacagttcgctgtcagttcctccgatcccacctgggagaaaccgcgtttccacgataggcacactattgaccccttttctgcgaaagagacaggcgatcacgatgaactcgatctgagcgaccgcgcgaaaattttggatcgcataagtggagagtttcagactctggtagggagaaacgtgccgctcagcgaggtaggggagttcacgaggcaattagaggttgcaacaacgaacagagagcccatagttcaaccgaacatactggcttggcttaatgacacggatgctctgcggctggcgtgctggaacaacaactcggacatggttcgccttcttctacgaaagggacttttgattacgcaacgggcagttgacttcgcgatttcgaagatgagagagacccatgatacgacagtcatgcaaataatgctcgattccgggtgggacatcaaccgaccgcgcggggagacgagaccgccgttaataagctcgttcctcgagttcccagaccttgttgattggtgccttgaaagaggtgctagactggacatacgtagcccgtcaggattctctatcattgaacacgcagccagtgtcgcttcactcagcaccttaaagaaattgacggaattggccggccatgtcccagacagtgccccagtggcacacgcatcctacacgtatgctcatagcaaccaagctgatcgcatggaagtagcccggtacctattagatcagggttactccgtggacgcattttatagatcgcatcatggatcagatggccatgcgtgcgaagacatgatcactggatctcagaatgcgctccattttgccatttggggcggaaaagaagacatggtgcgattgttattagaaagaggcgctgacagaactttgccggcgaagtctctcgtgaagacagaggggaagacgctgtcgcccatagagttagcaaagaaatttggccatgagaatattgttgcattgttgacgcaagacatatag

SEQ ID NO: 39037 - protein, 339 aa, Muscodor strobelii
  misc_feature: SGI Peptide ID NO. 573575
  misc_feature (275)..(307): Pfam Id: PF00023 Pfam Desc: Ankyrin repeat
  misc_feature (112)..(335): NCBI GI: 255945707 Blast Desc: Pc20g11320 [Penicillium chrysogenum Wisconsin 54-1255] gi|211588356|emb|CAP86461.1| Pc20g11320 [Penicillium chrysogenum Wisconsin 54-1255]
  misc_feature (108)..(337): NCBI GI: 121714523 Blast Desc: Ankyrin repeat protein [Aspergillus clavatus NRRL 1] gi|119403026|gb|EAW13446.1| Ankyrin repeat protein [Aspergillus clavatus NRRL 1]
  misc_feature (144)..(337): NCBI GI: 145256316 Blast Desc: An19g00080 [Aspergillus niger CBS 513.88] gi|134084743|emb|CAK47331.1| protein product [Aspergillus niger]
  misc_feature (99)..(337): NCBI GI: 119473749 Blast Desc: Ankyrin repeat protein [Neosartorya fischeri NRRL 181] gi|119406903|gb|EAW16853.1| Ankyrin repeat protein [Neosartorya fischeri NRRL 181]
  misc_feature (96)..(337): NCBI GI: 270004488 Blast Desc: TcasGA2_TC003843 [Tribolium castaneum]
  misc_feature (96)..(337): NCBI GI: 189235752 Blast Desc: : similar to ankyrin 2,3/unc44 [Tribolium castaneum]
  misc_feature (99)..(301): NCBI GI: 255935353 Blast Desc: Pc13g02630 [Penicillium chrysogenum Wisconsin 54-1255] gi|211583323|emb|CAP91332.1| Pc13g02630 [Penicillium chrysogenum Wisconsin 54-1255]
  misc_feature (112)..(338): NCBI GI: 242760940 Blast Desc: hspc200, [Talaromyces stipitatus ATCC 10500] gi|218723286|gb|EED22703.1| hspc200, [Talaromyces stipitatus ATCC 10500]
  misc_feature (99)..(337): NCBI GI: 242827177 Blast Desc: multiple ankyrin repeats single kh domain protein, [Talaromyces stipitatus ATCC 10500] gi|218712034|gb|EED11462.1| multiple ankyrin repeats single kh domain protein, [Talaromyces
  misc_feature (100)..(338): NCBI GI: 242816801 Blast Desc: ankyrin repeat-containing protein, [Talaromyces stipitatus ATCC 10500] gi|218713284|gb|EED12708.1| ankyrin repeat-containing protein, [Talaromyces stipitatus ATCC 10500]
  misc_feature: Useful for introducing or modulating the production of volatile compounds
MDVSQFAVSSSDPTWEKPRFHDRHTIDPFSAKETGDHDELDLSDRAKILDRISGEFQTLVGRNVPLSEVGEFTRQLEVATTNREPIVQPNILAWLNDTDALRLACWNNNSDMVRLLLRKGLLITQRAVDFAISKMRETHDTTVMQIMLDSGWDINRPRGETRPPLISSFLEFPDLVDWCLERGARLDIRSPSGFSIIEHAASVASLSTLKKLTELAGHVPDSAPVAHASYTYAHSNQADRMEVARYLLDQGYSVDAFYRSHHGSDGHACEDMITGSQNALHFAIWGGKEDMVRLLLERGADRTLPAKSLVKTEGKTLSPIELAKKFGHENIVALLTQDI

SEQ ID NO: 39038 - DNA, 3595 bp, Muscodor strobelii
  misc_feature: SGI EST ID NO. CUFF.93961.0
  misc_feature: Variant of the nucleotide sequence at SEQ ID NO 39036
ttaacacagcccacgaggatcaatgtcattgggagagcaccagacgatgcggcgcagcgctctgttgttggttgtgcttcaactcgctaatcgccatgacgtattactggcagagctgcgctcatggttctatggtccactggacattaaaactacaaccgggaatagtttttcgtaataacttatcttatacctgttcgtatagtcaaggtcctctatccctaacgccggactgttgggaacaacatcatacgtactgtgtctctgctcttccacaatggacgtctcacagttcgctgtcagttcctccgatcccacctgggagaaaccgcgtttccacgataggcacactattgaccccttttctgcgaaagagacaggcgatcacgatgaactcgatctgagcgaccgcgcgaaaattttggatcgcataagtggagagtttcagactctggtagggagaaacgtgccgctcagcgaggtaggggagttcacgaggcaattagaggttgcaacaacgaacagagagcccatagttcaaccgaacatactggcttggcttaatgacacggatgctctgcggctggcgtgctggaacaacaactcggacatggttcgccttcttctacgaaagggacttttgattacgcaacgggcagttgacttcgcgatttcgaagatgagagagacccatgatacgacagtcatgcaaataatgctcgattccgggtgggacatcaaccgaccgcgcggggagacgagaccgccgttaataagctcgttcctcgagttcccagaccttgttgattggtgccttgaaagaggtgctagactggacatacgtagcccgtcaggattctctatcattgaacacgcagccagtgtcgcttcactcagcaccttaaagaaattgacggaattggccggccatgtcccagacagtgccccagtggcacacgcatcctacacgtatgctcatagcaaccaagctgatcgcatggaagtagcccggtacctattagatcagggttactccgtggacgcattttatagatcgcatcatggatcagatggccatgcgtgcgaagacatgatcactggatctcagaatgcgctccattttgccatttggggcggaaaagaagacatggtgcgattgttattagaaagaggcgctgacagaactttgccggcgaagtctctcgtgaagacagaggggaagacgctgtcgcccatagagttagcaaagaaatttggccatgagaatattgttgcattgttgacgcaagacatataggttgctagtcaagaataatttgtaggttcggggcaccattcaaccgcagaagatgttattgatgtcgaggaaaacgaagtggaggtcaacggttgagatgcacatagactaccaaacatatcggaactttccttgagacgttcttcaagcaaagtcacgtccgagtaaatatccggctaacaaaagtgatacaccaaaaccgcatcgcccgtattgccaactgatagttcgtgaggagcgtgccgttgatgatgcgataagatgatcttagcaatctaccaagcttggacaaagagggaaggttgtgggctggatgttatatcttcagaattccctacggaaaggaatgggacttatcattagtagtatagaggtctaatcaagtggtatcgttatgtgagttcgcgccggccccaaattatgacgcagagttcctgctgtgcatcgcctatcattaaatctccccagtaaccagatgctctcccatatccattctaaagcatattacgagaagaagaagccgcacttccagacctgtccaccggtgagtctagacgcgttaataacgaattctcgtacgcagtctgatgatatgacgcaggcatctcgtgtatctctataggttcctcatggacctcggagatataatgtggtggtagctcctgcgctgccatatctcctggcgcttcacttggactccctagcggtggacttttgtatccctctgcagttgcaggacttgggtaataatcagagtcttttcctcccatttccgaaagcgccacccctatttgtccagggggcggatcgtgttcgtcgtttgcatgcgcagaagcctgcgcgagctcctgcttctttctctcctgtcttgggcgaaaccagaagaagaagagtgccgttcctgtgacaacggacacgacaaagacgcctgacacggttccgccaactatggcaccgacattagttgtgtccctcgagttggaagctggcgctgttgatgttgcaggtgtcgtcggtgtggttgtggtcgatgttgatgatgttgatattgtagatgttgtcatcgatgtcgtcggcagcgaggttgacgacgtctgtgccttggcgcaattatccacgctgaagaatatccattctgaaccgtagcagacctgatctgtggcaatactgttgttgttcgccgagcagaattcgtctccatccttgccatataccgtggctatcacaccattactatcgcatgtctaaacgtgaagcaaaatgagaaatttaagtcgtacctgaacaacctttgccaaggctcgtgatcatgaaacttttgtacccattcttcaagctagtacattcgcctgaccccgtcgagttgtcgactgtgatagtaaacttcggatttttacagttggcgtcagtgaatgtctgcaccgttgaagctctagtcaacgggatgaccgccaaggccaaacatgcggcgagggtgaggcaccgcatgctcgtgtgctcaattgcatatagaacgctcgagtacaaggccgaagttcaatgtatcacgaaccaaaaacagaaaagcaagagcgaaagagcattggtgctgaccaggcagctttagatgctacgagctatggcgaactccgcaagtcgattggtttttgcacaggactcggatctgcagcagtctgtatgaattgggtggtgagatatggagagtcatgccaaggccatgaccgggggagcagaccagggtcgtcggcacacgcgatacagagagtctagtaggggtcgtcaactgcgactatctcaaacaatcaggtcgcaattacggcagattttaactgcgccaaaagcaaccatggttccgaaacccctcactacgcggcctcaatctgacacatcgtcgagcccattggttgcctatcgagacaatccggcgaatatagaatgtgttgcccgccgtggcgggatatgccaatgtcagctgaatgcaagaggagaaaatgcaatgctgatcccagttgtacaacacacttgagcgacccaattacgaccagtatcatgcacgccgattacataacccccttgccgagaaccgcaacgatgccatgtcgtcggctactcccatctacacactaaatcctccaggtgcttatgtttgtgagttctagcagacgaccgagccgttaagctaaggactagcgctcggcagagcctcaggtttgtcttattcaaggcttcaagagacaacatatgcacttttgcgtccgactacgtctacacgtaaaacgaatcggcggtcgtctatta

SEQ ID NO: 39039 - DNA, 933 bp, Muscodor strobelii
  misc_feature: SGI cDNA ID NO. 573576
  misc_feature: Reduced expression when VOC is produced
  misc_feature: Encodes the peptide sequence at SEQ ID NO 39040
atgcggtgcctcaccctcgccgcatgtttggccttggcggtcatcccgttgactagagcttcaacggtgcagacattcactgacgccaactgtaaaaatccgaagtttactatcacagtcgacaactcgacggggtcaggcgaatgtactagcttgaagaatgggtacaaaagtttcatgatcacgagccttggcaaaggttgttcagccacggtatatggcaaggatggagacgaattctgctcggcgaacaacaacagtattgccacagatcaggtctgctacggttcagaatggatattcttcagcgtggataattgcgccaaggcacagacgtcgtcaacctcgctgccgacgacatcgatgacaacatctacaatatcaacatcatcaacatcgaccacaaccacaccgacgacacctgcaacatcaacagcgccagcttccaactcgagggacacaactaatgtcggtgccatagttggcggaaccgtgtcaggcgtctttgtcgtgtccgttgtcacaggaacggcactcttcttcttctggtttcgcccaagacaggagagaaagaagcaggagctcgcgcaggcttctgcgcatgcaaacgacgaacacgatccgccccctggacaaataggggtggcgctttcggaaatgggaggaaaagactctgattattacccaagtcctgcaactgcagagggatacaaaagtccaccgctagggagtccaagtgaagcgccaggagatatggcagcgcaggagctaccaccacattatatctccgaggtccatgaggaacctatagagatacacgagatgcctgcgtcatatcatcagactgcgtacgagaattcgttattaacgcgtctagactcaccggtggacaggtctggaagtgcggcttcttcttctcgtaatatgctttag

SEQ ID NO: 39040 - protein, 310 aa, Muscodor strobelii
  misc_feature: SGI Peptide ID NO. 573576
  misc_feature (4)..(242): NCBI GI: 189194329 Blast Desc: PTRG_03170 [Pyrenophora tritici-repentis Pt-1C-BFP] gi|187979067|gb|EDU45693.1| PTRG_03170 [Pyrenophora tritici-repentis Pt-1C-BFP]
  misc_feature: Useful for introducing or modulating the production of volatile compounds
MRCLTLAACLALAVIPLTRASTVQTFTDANCKNPKFTITVDNSTGSGECTSLKNGYKSFMITSLGKGCSATVYGKDGDEFCSANNNSIATDQVCYGSEWIFFSVDNCAKAQTSSTSLPTTSMTTSTISTSSTSTTTTPTTPATSTAPASNSRDTTNVGAIVGGTVSGVFVVSVVTGTALFFFWFRPRQERKKQELAQASAHANDEHDPPPGQIGVALSEMGGKDSDYYPSPATAEGYKSPPLGSPSEAPGDMAAQELPPHYISEVHEEPIEIHEMPASYHQTAYENSLLTRLDSPVDRSGSAASSSRNML

SEQ ID NO: 39041 - DNA, 3591 bp, Muscodor strobelii
  misc_feature: SGI EST ID NO. CUFF.93962.1
  misc_feature: Variant of the nucleotide sequence at SEQ ID NO 39039
taatagacgaccgccgattcgttttacgtgtagacgtagtcggacgcaaaagtgcatatgttgtctcttgaagccttgaataagacaaacctgaggctctgccgagcgctagtccttagcttaacggctcggtcgtctgctagaactcacaaacataagcacctggaggatttagtgtgtagatgggagtagccgacgacatggcatcgttgcggttctcggcaagggggttatgtaatcggcgtgcatgatactggtcgtaattgggtcgctcaagtgtgttgtacaactgggatcagcattgcattttctcctcttgcattcagctgacattggcatatcccgccacggcgggcaacacattctatattcgccggattgtctcgataggcaaccaatgggctcgacgatgtgtcagattgaggccgcgtagtgaggggtttcggaaccatggttgcttttggcgcagttaaaatctgccgtaattgcgacctgattgtttgagatagtcgcagttgacgacccctactagactctctgtatcgcgtgtgccgacgaccctggtctgctcccccggtcatggccttggcatgactctccatatctcaccacccaattcatacagactgctgcagatccgagtcctgtgcaaaaaccaatcgacttgcggagttcgccatagctcgtagcatctaaagctgcctggtcagcaccaatgctctttcgctcttgcttttctgtttttggttcgtgatacattgaacttcggccttgtactcgagcgttctatatgcaattgagcacacgagcatgcggtgcctcaccctcgccgcatgtttggccttggcggtcatcccgttgactagagcttcaacggtgcagacattcactgacgccaactgtaaaaatccgaagtttactatcacagtcgacaactcgacggggtcaggcgaatgtactagcttgaagaatgggtacaaaagtttcatgatcacgagccttggcaaaggttgttcagccacggtatatggcaaggatggagacgaattctgctcggcgaacaacaacagtattgccacagatcaggtctgctacggttcagaatggatattcttcagcgtggataattgcgccaaggcacagacgtcgtcaacctcgctgccgacgacatcgatgacaacatctacaatatcaacatcatcaacatcgaccacaaccacaccgacgacacctgcaacatcaacagcgccagcttccaactcgagggacacaactaatgtcggtgccatagttggcggaaccgtgtcaggcgtctttgtcgtgtccgttgtcacaggaacggcactcttcttcttctggtttcgcccaagacaggagagaaagaagcaggagctcgcgcaggcttctgcgcatgcaaacgacgaacacgatccgccccctggacaaataggggtggcgctttcggaaatgggaggaaaagactctgattattacccaagtcctgcaactgcagagggatacaaaagtccaccgctagggagtccaagtgaagcgccaggagatatggcagcgcaggagctaccaccacattatatctccgaggtccatgaggaacctatagagatacacgagatgcctgcgtcatatcatcagactgcgtacgagaattcgttattaacgcgtctagactcaccggtggacaggtctggaagtgcggcttcttcttctcgtaatatgctttagaatggatatgggagagcatctggttactggggagatttaatgataggcgatgcacagcaggaactctgcgtcataatttggggccggcgcgaactcacataacgataccacttgattagacctctatactactaatgataagtcccattcctttccgtagggaattctgaagatataacatccagcccacaaccttccctctttgtccaagcttggtagattgctaagatcatcttatcgcatcatcaacggcacgctcctcacgaactatcagttggcaatacgggcgatgcggttttggtgtatcacttttgttagccggatatttactcggacgtgactttgcttgaagaacgtctcaaggaaagttccgatatgtttggtagtctatgtgcatctcaaccgttgacctccacttcgttttcctcgacatcaataacatcttctgcggttgaatggtgccccgaacctacaaattattcttgactagcaacctatatgtcttgcgtcaacaatgcaacaatattctcatggccaaatttctttgctaactctatgggcgacagcgtcttcccctctgtcttcacgagagacttcgccggcaaagttctgtcagcgcctctttctaataacaatcgcaccatgtcttcttttccgccccaaatggcaaaatggagcgcattctgagatccagtgatcatgtcttcgcacgcatggccatctgatccatgatgcgatctataaaatgcgtccacggagtaaccctgatctaataggtaccgggctacttccatgcgatcagcttggttgctatgagcatacgtgtaggatgcgtgtgccactggggcactgtctgggacatggccggccaattccgtcaatttctttaaggtgctgagtgaagcgacactggctgcgtgttcaatgatagagaatcctgacgggctacgtatgtccagtctagcacctctttcaaggcaccaatcaacaaggtctgggaactcgaggaacgagcttttcaattgtcaatcactactactggatcagttgtgcttaacgaagtgagcataccttattaacggcggtctcgtctccccgcgcggtcggttgatgtcccacccggaatcgagcattatttgcatgactgtcgtatcatgggtctctctcatcttcgaaatcgcgaagtcaactgcccgttgcgtaatcaaaagtccctttcgtagaagaaggcgaaccatgtccgagttgttgttccagcacgccagccgcagagcatccgtgtcattaagccaagccagtatgttcggttgaactatgggctctctgttcgttgttgcaacctctaattgcctcgtgaactcccctacctcgctgagcggcacgtttctccctaccagagtctgaaactctccacttatgcgatccaaaattttcgcgcggtcgctcagatcgagttcatcgtgatcgcctgtctctttcgcagaaaaggggtcaatagtgtgcctatcgtggaaacgcggtttctcccaggtgggatcggaggaactgacagcgaactgtgagacgtccattgtggaagagcagagacacagtacgtatgatgttgttcccaacagtccggcgttagggatagaggaccttgactatacgaacaggtataagataagttattacgaaaaactattcccggttgtagttttaatgtccagtggaccatagaaccatgagcgcagctctgccagtaatacgtcatggcgattagcgagttgaagcacaaccaacaacagagcgctgcgccgcatcgtctggtgctctcccaatgacattgatcctcgtgggctgtgttaa

SEQ ID NO: 39042 - DNA, 633 bp, Muscodor strobelii
  misc_feature: SGI cDNA ID NO. 573577
  misc_feature: Reduced expression when VOC is produced
  misc_feature: Encodes the peptide sequence at SEQ ID NO 39043
atgcgtttccaaaccgcgtcactcttgatcgtcggctcggccgtcgcgtcgaccgcttgcacaatccagagcggaatcacaactactttctatggcagccccgataacgacccgccaggatccgatgcaacggcttattcatgcggtggccgcaacaaccacgctgggggtaccggcacttacgccgatcccttgggtacctcctacgcccagtgtgaaatcatctacagcccatacttgaagaaatatctgcgtctcgaggatagctgcgcagcttgcaccggcgactggaccgatgtctggacaggaaccgtagcaaacggcggtcaagcccaaatcaactgtgaaaacagcctcacgcccaacgcgaagcagagcgtcatccgtcagcccgctaccaatctagcagtcgacaccaccaagctctggaccggaagcacttgtaacacgggtcacgtctacgccagcaacacgccctcgagttactgcggcggcggtggctcgacgccgccgagtggtggatgccagactggttgctcgtgggctgggcattgtatcggctgcgcgtgcgcaactttcgatgactgctccgatgactacgtatgcacgaacgggctctgcgccgccgcctaa

SEQ ID NO: 39043 - protein, 210 aa, Muscodor strobelii
  misc_feature: SGI Peptide ID NO. 573577
  misc_feature (6)..(163): NCBI GI: 189194331 Blast Desc: conserved [Pyrenophora tritici-repentis Pt-1C-BFP] gi|187979068|gb|EDU45694.1| conserved [Pyrenophora tritici-repentis Pt-1C-BFP]
  misc_feature (8)..(163): NCBI GI: 169600960 Blast Desc: SNOG_03334 [Phaeosphaeria nodorum SN15] gi|160705843|gb|EAT88539.2| SNOG_03334 [Phaeosphaeria nodorum SN15]
  misc_feature (17)..(163): NCBI GI: 212528568 Blast Desc: conserved [Penicillium marneffei ATCC 18224] gi|210073839|gb|EEA27926.1| conserved [Penicillium marneffei ATCC 18224]
  misc_feature (16)..(163): NCBI GI: 70986450 Blast Desc: conserved [Aspergillus fumigatus Af293] gi|66846348|gb|EAL86681.1| conserved [Aspergillus fumigatus Af293] gi|159128110|gb|EDP53225.1| conserved [Aspergillus A1163]
  misc_feature (16)..(163): NCBI GI: 119474571 Blast Desc: NFIA_006280 [Neosartorya fischeri NRRL 181] gi|119407314|gb|EAW17264.1| conserved [Neosartorya fischeri NRRL 181]
  misc_feature (18)..(163): NCBI GI: 242766039 Blast Desc: conserved [Talaromyces stipitatus ATCC 10500] gi|218724290|gb|EED23707.1| conserved [Talaromyces stipitatus ATCC 10500]
  misc_feature (7)..(163): NCBI GI: 121711858 Blast Desc: conserved [Aspergillus clavatus NRRL 1] gi|119401696|gb|EAW12118.1| conserved [Aspergillus clavatus NRRL 1]
  misc_feature (17)..(208): NCBI GI: 145251736 Blast Desc: An16g00670 [Aspergillus niger] gi|134082918|emb|CAK46754.1| protein product [Aspergillus niger]
  misc_feature (15)..(146): NCBI GI: 238499065 Blast Desc: conserved [Aspergillus flavus NRRL3357] gi|220692520|gb|EED48866.1| conserved [Aspergillus flavus NRRL3357]
  misc_feature (15)..(143): NCBI GI: 169778548 Blast Desc: [Aspergillus oryzae RIB40] gi|83772477|dbj|BAE62606.1| protein product [Aspergillus oryzae]
  misc_feature: Useful for introducing or modulating the production of volatile compounds
MRFQTASLLIVGSAVASTACTIQSGITTTFYGSPDNDPPGSDATAYSCGGRNNHAGGTGTYADPLGTSYAQCEIIYSPYLKKYLRLEDSCAACTGDWTDVWTGTVANGGQAQINCENSLTPNAKQSVIRQPATNLAVDTTKLWTGSTCNTGHVYASNTPSSYCGGGGSTPPSGGCQTGCSWAGHCIGCACATFDDCSDDYVCTNGLCAAA

SEQ ID NO: 39044 - DNA, 5000 bp, Muscodor strobelii
  misc_feature: SGI EST ID NO. CUFF.94383.0
  misc_feature: Variant of the nucleotide sequence at SEQ ID NO 39042
accagaccttcgctgcgcgcgtcggcagctcctacgcccagtgtgaaatcatctacagcccatacttgaagaaatatctgcgtctcgaggatagctgcgcagcttgcaccggcgactggaccgatgtctggacaggaaccgtagcaaacggcggtcaagcccaaatcaactgtgaaaacagcctcacgcccaacgcgaagcagagcgtcatccgtcagcccgctaccaatctagcagtcgacaccaccaagctctggaccggaagcacttgtaacacgggtcacgtctacgccagcaacacgccctcgagttactgcggcggcggtggctcgacgccgccgagtggtggatgccagactggttgctcgtgggctgggcattgtatcggctgcgcgtgcgcaactttcgatgactgctccgatgactacgtatgcacgaacgggctctgcgccgccgcctaagtaaaatctacgccgacgtcatagctctggcttcaagacgctctgtctcatcttgttcaggtttagtgaggcaagatgagcccgatgagcaccgagtcctgggcaattgacgattttgttaacggaagcgattgattgtacttggctagacggagtttgtcccttgcggttcgtggtaaacgtaggaaaaggaataaaagttttatcgtcaacatgcaggtttgctagcgatccctggaaaatgcgtgacaacctagaggaacagcagtagcggctaagaaacaaaaattagtgagacacgaatacgacgaactctgttcatcatatacaattgaagacattgcaaagtagggcgcacttgtctaaacagctgtcatgatctcctgacgcagaaaatcgagcttcggacgcaagcacggaatgactgatccagattatcatggtctacaggccaacgtcgacggtgagcatcgcagaatatatggtacagatagggaacacatggcttattttgaatgtcacagtctttcattttcatgtattgagtctgccaatgcctatggatatgcaataacttgccaacgatgtatcctagagcccaatcgcggaaatatcaaagaaagtgtgcactttcctagaaataccggcaatgtggctctaaaagatatgcaactcttaagatgtccctctctcaaccttacatgatctttctattttgatgatccgcatcttacaccaccgtgaaacgaaaaacctctggcccatgtaacccttgaggagataaaagcaataggggtattgagtaaatcagaaaccacttccccgcccgataatgtcgcaaccaccagattgagttgtgaccggccgaacacttttgcagcgggtaattccccataccagcccgccgatatcaggacctgaactccacgctgcggtattgaaaaaggattggtatcagaatgaaaccgccgcgtagaacacatgtgatgttatatcacacgcatgtgaaatgaagagaagagaaaagctttcgtggcccggtagatctggtcatctgacgaaatcagcgcggaaagcctagtgtacatgtatggacataaataaatattatgtcaagagagatgtggaggtagataggttaagtgtgacgcaagcctctgagaagagcctgcaagacatgaaagcaagccaagtatgaattagcagccaagctgaagaccaacgactattgcctgaagactgaagaggataggcagactttgtttcgttattttcgacgtttttttggtggttgatttctggtagtgtaaagttaaggaaatggtgaaaagagcgtattcggtcagtgctgacaagtaaggaaatagttgagttcctctgaagcgaggtgtcgttggaaattgttaagtctggctatcatctcgcagtccgtttatacaacagtcgaaagtatcagtcgttgtgtaatccaacttgtcatgcgtagtcatagtctcactgggcacttcgctcaatggcgcttctgcgctgctcgccagatgggcgaggggagagctcgagaagcttggcgctccctgcgctaaagtttcggacatgacccttgccaaagttaacacttgtagcgcgttgaggctcaaccggagtctgaccttctccatcatcctcgctgtctttggcaatgccgagttctttatcatcactgtcgaaagattgcaagagtccttcttggctcttcatagtttcgcggtgatgcatcaaaggaacttgtcccacttcaccccatttctcttcccacgtgggtgacgaatctgctgcctcctcttcatcactgctaggacgggcctcgcctgtggaatgtcggttgagacgggaagggacgacactgttgaggtattcgtcatcagcaatgttgtcgtcatctgaaggttcagaagcttgagccccggaaccgccggacaaagcagagacagttcggggaggatatggcaaagatgttcgcatcccagacgaggtacgcttacggctcaccctaccggagagccatgatgcctcagaatcaatcgaggcaagagacatagaatgaggtgcaggtgaaggctgggcctcatctcggtgcattgagcttggcgtggctcgcatggcttcagtaggagtgtcatagcgcataacgacgtcatcttggattgctggaaggggttccgttgggactgggtcaacttcaggagaggccatgcgcgaatccggtggtgatatcggcagttctggcaagtcttcacggaaccgcgacatagtgcgcttgggcactccagagctcactttccgaggtggcatgtagttgatgggcagagccggctggcttccaagcatcgaatctcgagaagtgttcgaaaacgatgaggggcccgagccacgtcggttctttccccatttgaacaatgacaaccaaggtcgagacgtcctgctatctgatgttcgactgagcgattccatatcctcatgcctcaaagaaaccgaaggatgcgatatcatgtcgctggatgctgcagggccggattgtctaggtgaccgggatcgagtctttatcgaccggataaggttaagtatcttgggacttgaagagcgacggggagaagcctccactgcatcagcatccggtgaaggggccgtcggctccatgggagaggacacttctggcggtatgctgtctgttctatggaactccatcaaaggcgatggggtcttgtctcgatttggaggttcattgctgtgaagagatgttttactctgccttctggaggaatcgctcggtgacctccgtcttgaagaggtaacaatggccgatgtctggtgcgcatgagaagaatccggcatctcacgacccatgacaccgcgttccatgtttgcgggcggtgtcgaaccattctgagcggccgcagcttcctcggctcgctgtttctctgctctgcgagctaagcgcctctcaacgcgcgcctgttctttttctcttttacgctctctccgtcgcttgtcgcgctccattagctctcgcaggtcggtcgcgtcaaaatcatcagccaaatcatgtatcctcctgcgatctcgcaatgtggcgtcgggcaagcctgcgcgctccgatatccttcttctccccgattgggaccggaccgggccggatcctgtggcggaatcgacgagtgggttcgaagcatatcgtaacgtaggacgtggtgctagagcatcaattgctgaaaccttccaggagatctgctctgagtccgaggacatagctgaatggagagattcgggcagaggcaaggaaatgtcggatgaggggtcacctccgcgaaagcgtctgctctccctcattggtcgattcgaagtccagagatctggagctggtcgaacgggcatgaactggctcatggccctgatctctgcttcacggtcatgatcctccttgcggcgcttgctcgacttcttccgaggcaagggctgaccttgcctcttgtttctagaacggttgtggtgtaaagttgggactcgcattgcgatttcgtcgtaagacatggagccctgtgcgcggccgtatctggtctggctcgtcggcggggggccggactgcttccttagtttgttgacacgaagcgaatcctgccggcctggagagaaactgtaggctcgactccgacggcgcgtgttgctcggtgagtcgcctgggatgtctctgccgcgagccgcatttgcgggttccgtctcgatccttgataccccgcgggcttggaagccatacggggccttggggttggagccatcgaggggagccgtacgcgcgcgccgcttggtccctctacggcggaagggccacatggccatggttgtggccagctacgagcgtacggctaattggcgacgggccaggctgtgagactggtgacggctatcgatcgatggggtgtagagattgctgcacagtcgtgaaagccatgtgggcgaaatgttctagatgggatactcggattgctttgttcgtcgagacgcgcaacacagatcgctacattagacaagtttacagtccgggcagtcgcaaactctcaagccggagcaccgttggtgggcggagagacggggtgcggcaggccaagtaagttgcaacggtcgggagtcaattcgtgcgccacggaggatcggtcggcatttgtaaggtggcaatgtctgcgggcaattggcactgcgagtgggcgagtgagtgactacaatgtagatgcgtttcgtgtcgacgcgacggtgatgggggaacgaccgagggggtagatgagatatggaaggaaggtttaaagggaggaaggagaggtcgagccggaatgcaggcaggtaggtaagggcacagctgggctgcgagaatggagtcgtttcaagggtggtgtgggcagtttggatgtgcatgtggatgtgggcagtggatgtgggcagtggatgtgggcagaagtgccgccgtcgagtgagtgggtgactgtggtatgtgtggtgtgtgtgtgtgtg

SEQ ID NO: 39045 - DNA, 1389 bp, Muscodor strobelii
  misc_feature: SGI cDNA ID NO. 573578
  misc_feature: Encodes the peptide sequence at SEQ ID NO 39046
atggcattcaatccgcgagtgtcgataataccggcgtcgcaaacgcagtcgcgcacgcgcaagaaggaggacgaggcggccgatgcattcatgcgcttaccggacaaggagatcgtcggatgtataacagacatcggcatccccttcaccgtcgcggatctccagaagcccaaccccgtccaagtccagatgatcttcgagtggttcgccgaactcctgctcaacgcgacgcgggagaccgtcgagcccgccatgcgcgctgccgccgaagacgtatgcggcgaattcatcgacatcgtgcccccagacacgcgcaatctgatgggtttctacgtctcgttgcgaaggcttctgcttgaatgcggcatcgccgattttagtttctcggacctctacaagccgacacatccgcgcctcgtcaagatcttcagctacttgattaactttgtgcgattccgcgagtctcagaccaacgtcatcgacgcccatttcaataaggccgagcaaatcaaagcacgcatcgagtcgctatatggagagaaccaggacaatgaaggtcgtctcgatgacatgcgacataaccgcaaagccatggagatgcaagttcgcgagaagaccgaacgaaatgaggaactgaagaagacacttctggaactacgccgaaatcaagagaaggtagcggcccgactagaggatgcaaaagcgaagaaaggagagctacagcagacactcgagcagaagacgacagagaagatgatgcttcgccaagaaagcgccaagttacggccctatacacttcaaagcccacaggcgttacagacgagtctcaccgagttgaacaacaccctcagcacaggcaaggcacacatcgactccctcgaccgaagagctcgtgcactacaaacttcaacagactcattcggcgtcgtgtctaccgacgtagcatcctgcatcaagctgctggacgaaatttccgtcgagctggccagggaagaagacgacatcgctaagcgaacaaagcaacgcgacgctttgtccgagcgaggaaataacgcacgcgaagtcgagcgcacagaggcgctgctgcagagacagctcggtaaatggaatgaacgaacggagaaactacgcgagcagagtcgtggaaaggctgcggaagctaaggagaagttagaggagcttaaagctagacacaagaaattggctgaagagcgcgctaccaagaataccgagattgagaggcggagagttcggattgagcagacggagaagaagatgtgggacctgaaagagaacatcgagaatgaggtgcgcagtgctcatgatgagtatctcaagatggagtcgcacataaaactgtatatcacggagatggagcaagcgatttga

SEQ ID NO: 39046 - protein, 462 aa, Muscodor strobelii
  misc_feature: SGI Peptide ID NO. 573578
  misc_feature (25)..(170): Pfam Id: PF03800 Pfam Desc: Nuf2 family
  misc_feature (25)..(154): Pfam Id: PF03800 Pfam Desc: Nuf2 family
  misc_feature (1)..(462): NCBI GI: 116195100 Blast Desc: CHGG_04148 [Chaetomium globosum CBS 148.51] gi|88180061|gb|EAQ87529.1| CHGG_04148 [Chaetomium globosum CBS 148.51]
  misc_feature (1)..(462): NCBI GI: 46121821 Blast Desc: FG05288.1 [Gibberella zeae PH-1] gi|110815888|sp|Q4IBX0.1|NUF2_GIBZE RecName: Full= kinetochore protein NUF2
  misc_feature (1)..(462): NCBI GI: 85106902 Blast Desc: NCU06568 [Neurospora crassa OR74A] gi|74616892|sp|Q7S9H0.1|NUF2_NEUCR RecName: Full= kinetochore protein nuf-2 gi|28923876|gb|EAA33039.1| conserved [Neurospora
  misc_feature (1)..(429): NCBI GI: 156049621 Blast Desc: SS1G_08517 [Sclerotinia sclerotiorum 1980] gi|154692916|gb|EDN92654.1| SS1G_08517 [Sclerotinia sclerotiorum 1980]
  misc_feature (1)..(462): NCBI GI: 119479061 Blast Desc: kinetochore protein nuf2 [Neosartorya fischeri NRRL 181] gi|119407713|gb|EAW17662.1| kinetochore protein nuf2 [Neosartorya fischeri NRRL 181]
  misc_feature (1)..(462): NCBI GI: 146324167 Blast Desc: Ndc80 complex component Nuf2 [Aspergillus fumigatus Af293] gi|150416242|sp|Q4WVA0.3|NUF2_ASPFU RecName: Full= kinetochore protein nuf2 gi|129558035|gb|EAL91476.2| Ndc80 Nuf2,
  misc_feature (1)..(462): NCBI GI: 169775299 Blast Desc: [Aspergillus oryzae RIB40] gi|238496073|ref|XP_002379272.1| Ndc80 complex component Nuf2, [Aspergillus flavus NRRL3357] gi|110815884|sp|Q2UEA0.1|NUF2_ASPOR
  misc_feature (1)..(426): NCBI GI: 170940135 Blast Desc: protein product [Podospora anserina]
  misc_feature (1)..(462): NCBI GI: 121713642 Blast Desc: kinetochore protein nuf2 [Aspergillus clavatus NRRL 1] gi|119402585|gb|EAW13006.1| kinetochore protein nuf2 [Aspergillus clavatus NRRL 1]
  misc_feature (1)..(462): NCBI GI: 145255302 Blast Desc: An18g04640 [Aspergillus niger] gi|134084513|emb|CAK43266.1| protein product [Aspergillus niger]
MAFNPRVSIIPASQTQSRTRKKEDEAADAFMRLPDKEIVGCITDIGIPFTVADLQKPNPVQVQMIFEWFAELLLNATRETVEPAMRAAAEDVCGEFIDIVPPDTRNLMGFYVSLRRLLLECGIADFSFSDLYKPTHPRLVKIFSYLINFVRFRESQTNVIDAHFNKAEQIKARIESLYGENQDNEGRLDDMRHNRKAMEMQVREKTERNEELKKTLLELRRNQEKVAARLEDAKAKKGELQQTLEQKTTEKMMLRQESAKLRPYTLQSPQALQTSLTELNNTLSTGKAHIDSLDRRARALQTSTDSFGVVSTDVASCIKLLDEISVELAREEDDIAKRTKQRDALSERGNNAREVERTEALLQRQLGKWNERTEKLREQSRGKAAEAKEKLEELKARHKKLAEERATKNTEIERRRVRIEQTEKKMWDLKENIENEVRSAHDEYLKMESHIKLYITEMEQAI

SEQ ID NO: 39047 - DNA, 2616 bp, Muscodor strobelii
  misc_feature: SGI EST ID NO. CUFF.93955.0
  misc_feature: Variant of the nucleotide sequence at SEQ ID NO 39045
caagcatccatcccactgttgaacacacaaactcaaatcctatcgcaggccgcgcaacctacaacatcgactcctagcttcatatagcaaggactattccagtgaccgtagctgcaattccaccatggcattcaatccgcgagtgtcgataataccggcgtcgcaaacgcagtcgcgcacgcgcaagaaggaggacgaggcggccgatgcattcatgcgcttaccggacaaggagatcgtcggatgtataacagacatcggcatccccttcaccgtcgcggatctccagaagcccaaccccgtccaagtccagatgatcttcgagtggttcgccgaactcctgctcaacgcgacgcgggagaccgtcgagcccgccatgcgcgctgccgccgaagacgtatgcggcgaattcatcgacatcgtgcccccagacacgcgcaatctgatgggtttctacgtctcgttgcgaaggcttctgcttgaatgcggcatcgccgattttagtttctcggacctctacaagccgacacatccgcgcctcgtcaagatcttcagctacttgattaactttgtgcgattccgcgagtctcagaccaacgtcatcgacgcccatttcaataaggccgagcaaatcaaagcacgcatcgagtcgctatatggagagaaccaggacaatgaaggtcgtctcgatgacatgcgacataaccgcaaagccatggagatgcaagttcgcgagaagaccgaacgaaatgaggaactgaagaagacacttctggaactacgccgaaatcaagagaaggtagcggcccgactagaggatgcaaaagcgaagaaaggagagctacagcagacactcgagcagaagacgacagagaagatgatgcttcgccaagaaagcgccaagttacggccctatacacttcaaagcccacaggcgttacagacgagtctcaccgagttgaacaacaccctcagcacaggcaaggcacacatcgactccctcgaccgaagagctcgtgcactacaaacttcaacagactcattcggcgtcgtgtctaccgacgtagcatcctgcatcaagctgctggacgaaatttccgtcgagctggccagggaagaagacgacatcgctaagcgaacaaagcaacgcgacgctttgtccgagcgaggaaataacgcacgcgaagtcgagcgcacagaggcgctgctgcagagacagctcggtaaatggaatgaacgaacggagaaactacgcgagcagagtcgtggaaaggctgcggaagctaaggagaagttagaggagcttaaagctagacacaagaaattggctgaagagcgcgctaccaagaataccgagattgagaggcggagagttcggattgagcagacggagaagaagatgtgggacctgaaagagaacatcgagaatgaggtgcgcagtgctcatgatgagtatctcaagatggagtcgcacataaaactgtatatcacggagatggagcaagcgatttgaggcttagtttgctctatattcatggttcatgttctgtacgcatattatgatgttatgagagggaaggccaaagataccattaggcgttgggcgtgtttcggtttaagaagtggcagatttactacgacgtgcgcaggaaatgcgtcattggtactttactaaggctgtgttatgagaatggatcagtcatgatattcgctctatcacaagtattccactttctcgctcattcgtgatcgtcatcagtgtcccagagtgctctctgaaaacgacaccatcggcctagcaccctgccaacctcgaccgttctcccgctccaagccccgtcttcggtctccaatccaaagcgccgcactccgccactcaggataggcactgtctccgaaagggttgcctcaaacgcaatagtaggctcgctcttcttaggctcaataatgagagcctgccaagatatcctgtgtgctatttcaaccagggcggaagccgtattgctcagaccctgagcgctccattcgcttgtatcgcggtgcaggtcaaggaagccgtataagatgagatgcggctttgtgtcttcggttgcttggaatttgggcggtggtatcgacacttttgagtcttctggtgtaaagactgagagatatgcacgcaagtgtgtcacggttggtgtgtagactacgcggatatgtcgtgatgctgcgatttggtggagtggtgacgacaacagggcatgcttcgctgtatcggtagttcgcttgtcccgagcgggttctagttctcgtgattgatctggctggtcttcatccgtgactgagttcgtctctttgggttggttctgaacgtcatgtgcgagtgagttgagaaagtcggttcgtgaggagcatataatgagcgttgtgggatagacatggtgttctaagatgtatgagagaagctcagtcggcaatgctggggatatgaatattggtcttgtcgtcatgaggatgaaagagcgggaaggttgagaacgggaatgaaagtagaaaaacgatgctctgaagtatcatcatcgtagcagaaattcttatcatcgcataacagcgaacatatttatgtggttgtactga

SEQ ID NO: 39048 - DNA, 750 bp, Muscodor strobelii
  misc_feature: SGI cDNA ID NO. 573579
  misc_feature: Encodes the peptide sequence at SEQ ID NO 39049
atgacgacaagaccaatattcatatccccagcattgccgactgagcttctctcatacatcttagaacaccatgtctatcccacaacgctcattatatgctcctcacgaaccgactttctcaactcactcgcacatgacgttcagaaccaacccaaagagacgaactcagtcacggatgaagaccagccagatcaatcacgagaactagaacccgctcgggacaagcgaactaccgatacagcgaagcatgccctgttgtcgtcaccactccaccaaatcgcagcatcacgacatatccgcgtagtctacacaccaaccgtgacacacttgcgtgcatatctctcagtctttacaccagaagactcaaaagtgtcgataccaccgcccaaattccaagcaaccgaagacacaaagccgcatctcatcttatacggcttccttgacctgcaccgcgatacaagcgaatggagcgctcagggtctgagcaatacggcttccgccctggttgaaatagcacacaggatatcttggcaggctctcattattgagcctaagaagagcgagcctactattgcgtttgaggcaaccctttcggagacagtgcctatcctgagtggcggagtgcggcgctttggattggagaccgaagacggggcttggagcgggagaacggtcgaggttggcagggtgctaggccgatggtgtcgttttcagagagcactctgggacactgatgacgatcacgaatga

SEQ ID NO: 39049 - protein, 249 aa, Muscodor strobelii
  misc_feature: SGI Peptide ID NO. 573579
  misc_feature (5)..(243): NCBI GI: 170940134 Blast Desc: protein product [Podospora anserina]
  misc_feature (1)..(238): NCBI GI: 256727379 Blast Desc: NECHADRAFT_34126 [Nectria haematococca mpVI 77-13-4]
  misc_feature (1)..(238): NCBI GI: 46121819 Blast Desc: FG05287.1 [Gibberella zeae PH-1]
  misc_feature (14)..(243): NCBI GI: 156049619 Blast Desc: SS1G_08516 [Sclerotinia sclerotiorum 1980] gi|154692915|gb|EDN92653.1| SS1G_08516 [Sclerotinia sclerotiorum 1980]
  misc_feature (6)..(242): NCBI GI: 154292031 Blast Desc: BC1G_14390 [Botryotinia fuckeliana B05.10] gi|150846307|gb|EDN21500.1| BC1G_14390 [Botryotinia fuckeliana B05.10]
  misc_feature (35)..(239): NCBI GI: 145613145 Blast Desc: MGG_01847 [Magnaporthe grisea 70-15] gi|145020287|gb|EDK04416.1| MGG_01847 [Magnaporthe grisea 70-15]
  misc_feature (14)..(237): NCBI GI: 146324169 Blast Desc: conserved [Aspergillus fumigatus Af293] gi|129558034|gb|EBA27435.1| conserved [Aspergillus fumigatus Af293] gi|159126756|gb|EDP51872.1| conserved [Aspergillus A1163]
  misc_feature (15)..(238): NCBI GI: 242762600 Blast Desc: conserved [Talaromyces stipitatus ATCC 10500] gi|218723606|gb|EED23023.1| conserved [Talaromyces stipitatus ATCC 10500]
  misc_feature (8)..(238): NCBI GI: 212529626 Blast Desc: conserved [Penicillium marneffei ATCC 18224] gi|210074368|gb|EEA28455.1| conserved [Penicillium marneffei ATCC 18224]
  misc_feature (2)..(237): NCBI GI: 119479059 Blast Desc: NFIA_075910 [Neosartorya fischeri NRRL 181] gi|119407712|gb|EAW17661.1| conserved [Neosartorya fischeri NRRL 181]
MTTRPIFISPALPTELLSYILEHHVYPTTLIICSSRTDFLNSLAHDVQNQPKETNSVTDEDQPDQSRELEPARDKRTTDTAKHALLSSPLHQIAASRHIRVVYTPTVTHLRAYLSVFTPEDSKVSIPPPKFQATEDTKPHLILYGFLDLHRDTSEWSAQGLSNTASALVEIAHRISWQALIIEPKKSEPTIAFEATLSETVPILSGGVRRFGLETEDGAWSGRTVEVGRVLGRWCRFQRALWDTDDDHE

SEQ ID NO: 39050 - DNA, 2358 bp, Muscodor strobelii
  misc_feature: SGI cDNA ID NO. 573580
  misc_feature: Encodes the peptide sequence at SEQ ID NO 39051
atggagtccatctcacggatctccaatctgctcgagagcgctcgggacctcactctcgatgctgctcaagcagctcgaagcacccgtgtcactaccaggtctctgcctaccgcccagctcaagaagctccttgacagccgcaatgatcgtgagatcctagatggcctgcggcgggtcatcgctatgatgtactgccagcagcgcacccttcccttcttctcctccgtcgtcaagaatgtcgcctcgcccaacatcgaaatcaagaagctcgtctacatatacctaatccaccatgccgaacaagaacccgatcttgccctgttgtccatcaacaccatccagaagtccctgtcagataccaatcctcaagtccgagccttggccctccgcaccatgtccggcatccgcgtccctgtcatcagccagatcgtatcgttagctatcaagaagggtgtgggggacatgtcgccacatgtgcgaaaggctgccgctctatccatcccaaagtgttaccgcctcgaacctaccaccctccctcagttgcttgaatacctgaccacgcttcttggggacaagcagtacttcgtcgccggtgcagctgttagtgcatttatggagatatgtccggagcgcatagacctgatccataaacactacagaagtctcgtgaagaaaatagtcgacatggacgagtggagccaactggccatgctgagaatgatgaccatgtatgcgcgcaagtgctttcctcggcggacgaaaagtgcgaaagcgcaggataaagctgctgatctacgagatttctatggcgaatcacaacccgacgctccccctttggccgatgatggacagattgtgatcctagatccggacctggttcttctactaaacggaataaaacctttactgcaaagtcggaactcaggcgtagtaatcgcagttgctcggtgttatgcggaaattggcacgccagaatacaccaagagtgctgtcgggcctctaattgccttacttcggggcgcgcaagatattgaacaaattgcgctctacaacatcgtatccgtgtgtctagcacacccgtcatccttcgtcaaacatgcctcgcacttcctcgtccgtgccacagatactgcgccaatatgggaactcaagctcgaagttctcgcgctgatatttccccacagcccacctcagacaaaaagtctgatactcaatgaactggaacatttctcccgaggtacaaataagtctttggtccgagaagctgttcgtgcaataggccgatgcgctcaggcagatcctgcgacggcgccacggtgcatgcggctgctgttgggacaaataacaagtctcgacggtactctcgcggcagaatcactgacagttatacggcatctcatccaactcgaacccgaagcacatctcaacaccgttgtccgtctagcaaagaatctcgattccgccaccgatccccaagcccgtgcaacaattatctggctcgtaggggagttctctggtttaaacagcgaggacaacattgcagcggatgtattacgcatcttgctcaaagacttcgcaaacgagtcagaagtagcaaaacgacagattgtattactggcagccaaggtgtatcttcatgtcctcaataaggaggcggagaagctggatattccttcggcggaagacgaccacgaggtagcgctaccaggtttcacgcccccaactgaacaccccgttgcgaaactttgggactacgtgacgttactggtacgttacgacgtatcgtacgatctgcgcgaccgcacacgtctctataaagccctacttgcagttccacagctcgcaaccctcatgctccttgcgcccaagcctgcgccccaagctccaagcccgtcggaaacccgcaaaggctttacgctaggttcctcgacgctcgtgctggcgcgtggaggaacggtccatggattgcgcgggtatgaggcactgccagattgggtcgaggaaggccaagagcctgatccgaaactcaggaacgatggcactgggaaggagtatatgcccgagggtaagagagcggtgcctgcttctgagatcttgggagatgccgggaagaatggtggtgctggtgttgctgttggtgcagcggcagtaggtgttgggaacatgacacttgacgagttcttggctgaggacgaggaagaagagtctgaggaggaggaggagagtagtgaagaggaagaagaggatgatgacgaggacgacgaagacgacgaggaagaagaggaggaagaggatgatgaaagtgagcatgaggaggataatgataaagccgaattggaaggcttcctcgactcttga

SEQ ID NO: 39051 - protein, 785 aa, Muscodor strobelii
  misc_feature: SGI Peptide ID NO. 573580
  misc_feature (32)..(613): Pfam Id: PF01602 Pfam Desc: Adaptin N terminal region
  misc_feature (5)..(733): NCBI GI: 164424991 Blast Desc: NCU06569 [Neurospora crassa OR74A] gi|157070743|gb|EAA33040.2| NCU06569 [Neurospora crassa OR74A]
  misc_feature (1)..(729): NCBI GI: 46121817 Blast Desc: FG05286.1 [Gibberella zeae PH-1]
  misc_feature (17)..(729): NCBI GI: 170940133 Blast Desc: protein product [Podospora anserina]
  misc_feature (1)..(729): NCBI GI: 256726816 Blast Desc: [Nectria haematococca mpVI 77-13-4]
  misc_feature (1)..(729): NCBI GI: 156049617 Blast Desc: SS1G_08515 [Sclerotinia sclerotiorum 1980] gi|154692914|gb|EDN92652.1| SS1G_08515 [Sclerotinia sclerotiorum 1980]
  misc_feature (1)..(729): NCBI GI: 154292029 Blast Desc: BC1G_14389 [Botryotinia fuckeliana B05.10] gi|150846306|gb|EDN21499.1| BC1G_14389 [Botryotinia fuckeliana B05.10]
  misc_feature (1)..(759): NCBI GI: 261201848 Blast Desc: AP-3 adaptor complex subunit beta [Ajellomyces dermatitidis SLH14081] gi|239590235|gb|EEQ72816.1| AP-3 adaptor complex subunit beta [Ajellomyces dermatitidis SLH14081]
  misc_feature (10)..(759): NCBI GI: 239611948 Blast Desc: AP-3 adaptor complex subunit beta [Ajellomyces dermatitidis ER-3]
  misc_feature (1)..(729): NCBI GI: 240106771 Blast Desc: HEAT repeat containing protein [Coccidioides posadasii C735 delta SOWgp]
  misc_feature (1)..(729): NCBI GI: 119174310 Blast Desc: CIMG_09137 [Coccidioides immitis RS]
MESISRISNLLESARDLTLDAAQAARSTRVTTRSLPTAQLKKLLDSRNDREILDGLRRVIAMMYCQQRTLPFFSSVVKNVASPNIEIKKLVYIYLIHHAEQEPDLALLSINTIQKSLSDTNPQVRALALRTMSGIRVPVISQIVSLAIKKGVGDMSPHVRKAAALSIPKCYRLEPTTLPQLLEYLTTLLGDKQYFVAGAAVSAFMEICPERIDLIHKHYRSLVKKIVDMDEWSQLAMLRMMTMYARKCFPRRTKSAKAQDKAADLRDFYGESQPDAPPLADDGQIVILDPDLVLLLNGIKPLLQSRNSGVVIAVARCYAEIGTPEYTKSAVGPLIALLRGAQDIEQIALYNIVSVCLAHPSSFVKHASHFLVRATDTAPIWELKLEVLALIFPHSPPQTKSLILNELEHFSRGTNKSLVREAVRAIGRCAQADPATAPRCMRLLLGQITSLDGTLAAESLTVIRHLIQLEPEAHLNTVVRLAKNLDSATDPQARATIIWLVGEFSGLNSEDNIAADVLRILLKDFANESEVAKRQIVLLAAKVYLHVLNKEAEKLDIPSAEDDHEVALPGFTPPTEHPVAKLWDYVTLLVRYDVSYDLRDRTRLYKALLAVPQLATLMLLAPKPAPQAPSPSETRKGFTLGSSTLVLARGGTVHGLRGYEALPDWVEEGQEPDPKLRNDGTGKEYMPEGKRAVPASEILGDAGKNGGAGVAVGAAAVGVGNMTLDEFLAEDEEEESEEEEESSEEEEEDDDEDDEDDEEEEEEEDDESEHEEDNDKAELEGFLDS

SEQ ID NO: 39052 - DNA, 2716 bp, Muscodor strobelii
  misc_feature: SGI EST ID NO. CUFF.93958.0
  misc_feature: Variant of the nucleotide sequence at SEQ ID NO 39050
cggcattgcgggatgtcttgggacggagcaaccccgcgaacagctccgggttctctgctgttaggtagctgtcacgctgttttggcgtagtaaccttcgacgtcacttacgccaacgctcgaagagtcgactcacaaacggcgacagcagctcgtcagctcgctgatggtccgtataccgcgagccggccgccatggagtccatctcacggatctccaatctgctcgagagcgctcgggacctcactctcgatgctgctcaagcagctcgaagcacccgtgtcactaccaggtctctgcctaccgcccagctcaagaagctccttgacagccgcaatgatcgtgagatcctagatggcctgcggcgggtcatcgctatgatgtactgccagcagcgcacccttcccttcttctcctccgtcgtcaagaatgtcgcctcgcccaacatcgaaatcaagaagctcgtctacatatacctaatccaccatgccgaacaagaacccgatcttgccctgttgtccatcaacaccatccagaagtccctgtcagataccaatcctcaagtccgagccttggccctccgcaccatgtccggcatccgcgtccctgtcatcagccagatcgtatcgttagctatcaagaagggtgtgggggacatgtcgccacatgtgcgaaaggctgccgctctatccatcccaaagtgttaccgcctcgaacctaccaccctccctcagttgcttgaatacctgaccacgcttcttggggacaagcagtacttcgtcgccggtgcagctgttagtgcatttatggagatatgtccggagcgcatagacctgatccataaacactacagaagtctcgtgaagaaaatagtcgacatggacgagtggagccaactggccatgctgagaatgatgaccatgtatgcgcgcaagtgctttcctcggcggacgaaaagtgcgaaagcgcaggataaagctgctgatctacgagatttctatggcgaatcacaacccgacgctccccctttggccgatgatggacagattgtgatcctagatccggacctggttcttctactaaacggaataaaacctttactgcaaagtcggaactcaggcgtagtaatcgcagttgctcggtgttatgcggaaattggcacgccagaatacaccaagagtgctgtcgggcctctaattgccttacttcggggcgcgcaagatattgaacaaattgcgctctacaacatcgtatccgtgtgtctagcacacccgtcatccttcgtcaaacatgcctcgcacttcctcgtccgtgccacagatactgcgccaatatgggaactcaagctcgaagttctcgcgctgatatttccccacagcccacctcagacaaaaagtctgatactcaatgaactggaacatttctcccgaggtacaaataagtctttggtccgagaagctgttcgtgcaataggccgatgcgctcaggcagatcctgcgacggcgccacggtgcatgcggctgctgttgggacaaataacaagtctcgacggtactctcgcggcagaatcactgacagttatacggcatctcatccaactcgaacccgaagcacatctcaacaccgttgtccgtctagcaaagaatctcgattccgccaccgatccccaagcccgtgcaacaattatctggctcgtaggggagttctctggtttaaacagcgaggacaacattgcagcggatgtattacgcatcttgctcaaagacttcgcaaacgagtcagaagtagcaaaacgacagattgtattactggcagccaaggtgtatcttcatgtcctcaataaggaggcggagaagctggatattccttcggcggaagacgaccacgaggtagcgctaccaggtttcacgcccccaactgaacaccccgttgcgaaactttgggactacgtgacgttactggtacgttacgacgtatcgtacgatctgcgcgaccgcacacgtctctataaagccctacttgcagttccacagctcgcaaccctcatgctccttgcgcccaagcctgcgccccaagctccaagcccgtcggaaacccgcaaaggctttacgctaggttcctcgacgctcgtgctggcgcgtggaggaacggtccatggattgcgcgggtatgaggcactgccagattgggtcgaggaaggccaagagcctgatccgaaactcaggaacgatggcactgggaaggagtatatgcccgagggtaagagagcggtgcctgcttctgagatcttgggagatgccgggaagaatggtggtgctggtgttgctgttggtgcagcggcagtaggtgttgggaacatgacacttgacgagttcttggctgaggacgaggaagaagagtctgaggaggaggaggagagtagtgaagaggaagaagaggatgatgacgaggacgacgaagacgacgaggaagaagaggaggaagaggatgatgaaagtgagcatgaggaggataatgataaagccgaattggaaggcttcctcgactcttgaatagccacctctatcaatacataccttgtcgagtatgtcaacagatacagtcaaaagcagacaaagtcctagaaaggtggtgtacatatggacgtattggagtatccattggaccactatatgcctacatcctaatccaatatcaaccaaagtagacttcaagac

SEQ ID NO: 39053 - DNA, 1269 bp, Muscodor strobelii
  misc_feature: SGI cDNA ID NO. 573581
  misc_feature: Encodes the peptide sequence at SEQ ID NO 39054
atggctgcctcgcgacagcttcctgagaagcacaaccccctcatgacagaggaggtcccgatctatgccgatctcgtatcgcgtcggcgcctgggccaaacgcagctgacacctaagatggtcgctgccagttctgtcggagatgtcgacccatcgcatctcggcgtattcgactacgcacacctacgcgcgccccttcccaaaggcatttcctcgggcatttttaagtcgtctcctagctcgtacttcttgatgcgccgaagtcaggatgggtacgtctctgcgactggaatgttcaaagccacgtttccgtacgcagcggccagtgaagaggaggctgagcgcaaatatatgaagtctctgcccaccaccagtcccgaagagacagctggcaatgtctggattcctccggagcacgccatggcgcttgccgaagagtatcgtatcacgccgtggatctctgccctcctcgattctgccgatatctctgtcacgagtgcgtccgacagccctcccaagaagatctctgcaccacctaagtttgattttacggtcttagctcagccggcgcttgtcgcacctccgacaccttcatcgattcctcgaagtactcgtggccgccgctccgcgagtcccgcgaagaagagagtcattgcctccccgcgaaagcgatcaactaaagtatccgcatcacagacaagctctaacgacgcatcggtgcaagaagaaactgagactgaatccatgatcaatggcgcaaagacagaggacaccgtttcaactgcacccagcgacgagatcacaatgaagaccattgagaaggagcctgaagttgtacttgcgcccgtggaagaagagcccaaggttcaaatcaaggtcggccaagaagtagagtttaatgctggcgtggagacaaagcacactacggttgaagttgagcttccagttactgatggaccgccaagcgccgaggaagccgcagctatgatcgagaaagctaaagagatggtggcattggcagcggcagagaatgcggagggccatgaatccacggctttggtttctaagggaaagcgcaaggcagatgatatcacggcagaggatgaggaggatggtgtcacaggcaagcctgtcgaggaacccagatccaaaaaggtcaagactgaagtgcagctgcggaaggagcgtgtcaggaatcgtgctttagtcggcctcagtgcaaccctggccgttggtgctctcattccatacgttatgggcgttttctag

SEQ ID NO: 39054 - protein, 422 aa, Muscodor strobelii
  misc_feature: SGI Peptide ID NO. 573581
  misc_feature (83)..(165): Pfam Id: PF02292 Pfam Desc: APSES domain
  misc_feature (133)..(165): Pfam Id: PF02292 Pfam Desc: APSES domain
  misc_feature (3)..(422): NCBI GI: 256727382 Blast Desc: NECHADRAFT_32232 [Nectria haematococca mpVI 77-13-4]
  misc_feature (3)..(422): NCBI GI: 46121811 Blast Desc: FG05283.1 [Gibberella zeae PH-1]
  misc_feature (5)..(422): NCBI GI: 261352808 Blast Desc: conserved [Verticillium albo-atrum VaMs.102]
  misc_feature (1)..(414): NCBI GI: 116195124 Blast Desc: CHGG_04160 [Chaetomium globosum CBS 148.51] gi|88180073|gb|EAQ87541.1| CHGG_04160 [Chaetomium globosum CBS 148.51]
  misc_feature (4)..(419): NCBI GI: 85106870 Blast Desc: NCU06560 [Neurospora crassa OR74A] gi|28923868|gb|EAA33031.1| [Neurospora crassa OR74A]
  misc_feature (4)..(419): NCBI GI: 12802359 Blast Desc: AF309689_4 transcription factor G6G8.4 [Neurospora crassa]
  misc_feature (1)..(422): NCBI GI: 156049609 Blast Desc: SS1G_08511 [Sclerotinia sclerotiorum 1980] gi|154692910|gb|EDN92648.1| SS1G_08511 [Sclerotinia sclerotiorum 1980]
  misc_feature (1)..(412): NCBI GI: 145613391 Blast Desc: MGG_01688 [Magnaporthe grisea 70-15] gi|145020471|gb|EDK04600.1| MGG_01688 [Magnaporthe grisea 70-15]
  misc_feature (1)..(414): NCBI GI: 170940128 Blast Desc: protein product [Podospora anserina]
  misc_feature (5)..(419): NCBI GI: 121713650 Blast Desc: APSES transcription factor, [Aspergillus clavatus NRRL 1] gi|119402589|gb|EAW13010.1| APSES transcription factor, [Aspergillus clavatus NRRL 1]
MAASRQLPEKHNPLMTEEVPIYADLVSRRRLGQTQLTPKMVAASSVGDVDPSHLGVFDYAHLRAPLPKGISSGIFKSSPSSYFLMRRSQDGYVSATGMFKATFPYAAASEEEAERKYMKSLPTTSPEETAGNVWIPPEHAMALAEEYRITPWISALLDSADISVTSASDSPPKKISAPPKFDFTVLAQPALVAPPTPSSIPRSTRGRRSASPAKKRVIASPRKRSTKVSASQTSSNDASVQEETETESMINGAKTEDTVSTAPSDEITMKTIEKEPEVVLAPVEEEPKVQIKVGQEVEFNAGVETKHTTVEVELPVTDGPPSAEEAAAMIEKAKEMVALAAAENAEGHESTALVSKGKRKADDITAEDEEDGVTGKPVEEPRSKKVKTEVQLRKERVRNRALVGLSATLAVGALIPYVMGVF

SEQ ID NO: 39055 - DNA, 2337 bp, Muscodor strobelii
  misc_feature: SGI EST ID NO. CUFF.94103.1
  misc_feature: Variant of the nucleotide sequence at SEQ ID NO 39053
gaaccatcttgtagtcgagcacactgcacgccaatgccagcagaggcgagaggttcaaccacgccagcgaacacgcgcatacagtagcagttcatcacccttggaccatctctgcccccccttctttccctgggtttctccaggcgatcgtctcccccctttcgcccttttcccttttctgaccaagcccatccatcctgttcctccccagtcgaggacctgagaaaggacggacgagaaaaaaacccatccgttttgcgctccgtgtcacccaaccctgatcacctcgtctcaccaattgtcgctttctcgagtcaattggcgctggcgactgcctcgggttgctgacaatcttcatcatcttccatctgcagtttccttgccgcagattctccatctcttcttttcaaactttttcttttcccgtccccagaaccctgttacccatctgtccttgtcccttaacttctttttaatcatcatattacagaacttattgcttccgattgccgtctcggtggtcgatagctacacatttaatactgtcgcgttggtcactggtcactcgacacacccgacaaaatggctgcctcgcgacagcttcctgagaagcacaaccccctcatgacagaggaggtcccgatctatgccgatctcgtatcgcgtcggcgcctgggccaaacgcagctgacacctaagatggtcgctgccagttctgtcggagatgtcgacccatcgcatctcggcgtattcgactacgcacacctacgcgcgccccttcccaaaggcatttcctcgggcatttttaagtcgtctcctagctcgtacttcttgatgcgccgaagtcaggatgggtacgtctctgcgactggaatgttcaaagccacgtttccgtacgcagcggccagtgaagaggaggctgagcgcaaatatatgaagtctctgcccaccaccagtcccgaagagacagctggcaatgtctggattcctccggagcacgccatggcgcttgccgaagagtatcgtatcacgccgtggatctctgccctcctcgattctgccgatatctctgtcacgagtgcgtccgacagccctcccaagaagatctctgcaccacctaagtttgattttacggtcttagctcagccggcgcttgtcgcacctccgacaccttcatcgattcctcgaagtactcgtggccgccgctccgcgagtcccgcgaagaagagagtcattgcctccccgcgaaagcgatcaactaaagtatccgcatcacagacaagctctaacgacgcatcggtgcaagaagaaactgagactgaatccatgatcaatggcgcaaagacagaggacaccgtttcaactgcacccagcgacgagatcacaatgaagaccattgagaaggagcctgaagttgtacttgcgcccgtggaagaagagcccaaggttcaaatcaaggtcggccaagaagtagagtttaatgctggcgtggagacaaagcacactacggttgaagttgagcttccagttactgatggaccgccaagcgccgaggaagccgcagctatgatcgagaaagctaaagagatggtggcattggcagcggcagagaatgcggagggccatgaatccacggctttggtttctaagggaaagcgcaaggcagatgatatcacggcagaggatgaggaggatggtgtcacaggcaagcctgtcgaggaacccagatccaaaaaggtcaagactgaagtgcagctgcggaaggagcgtgtcaggaatcgtgctttagtcggcctcagtgcaaccctggccgttggtgctctcattccatacgttatgggcgttttctagaagagggactcatagccttatgaccttttatggttgaccgagtctcacgcacccggcgacttggtacatgtggtgccctagcttcctttgctctcattcatcttattggcagagactggaggttggagtcgccttctcgatcttatcttgacgatctatggagagagcctcgggtgttggcagctactctaaagctgcattgctagtcgttccccccctttttcactcacatacccccaaagctggatatccagctcgctatcagcctcaaaatggcacttgtataaatcccttgcacaccaacacggaggactagtctggcatgacgagaacggcgttccaccaataagataagaaataataatcactcgctcacaagcatattattgtgttcctatcttttgacatgtcgtaaatgaggcccttctgatactgacatcaaagttgactctacataatatgacttataatcgggttggatgcgca

SEQ ID NO: 39056 - DNA, 1002 bp, Muscodor strobelii
  misc_feature: SGI cDNA ID NO. 573582
  misc_feature: Encodes the peptide sequence at SEQ ID NO 39057
atgagagctcatcgcatcatccgaagcactatcggtgtccagcgacgcgggttctcggcctcgtcgaggcggcttgacaactatggcttcataggtcttggccagatgggctaccagatggccaagaacctccagtctaagctctcaccctctgactcagtccacctcttcgacatcaacaaagctgccacggagaagctggctcgcgagatgcgatcatctcaagccggcggcgctacagttcagatatccgagagcgtaagcgacgctgccaaatacgctgatacaatcatcaccgtcttgcccgagccatcacacgtcaagggtgtctactcggagatattaaaactaaacctcccgcccgggaacaggatattcattgactcctcgaccatcgacccctcgtcatctcgcgaggtcgcaaaatgggtctcggatgcaaagcagggccaattcgtcgacgccccaatgtcaggcggtgttgttggcgccacagccggcacactaactttcatgcttggctcacccacagagctcgtctccaagattgagccaatcttattgcgcatggggaagcgtgtcttgcactgcggtgtgcaaggcaccggtcttagcgcgaagctggccaacaattatctattggccatcaacaacatcgcgacagccgaggcgatgaacctcggcatccgatggggccttgagcccaaggttctcgccaatatcatcaatgtcagcactggcaaatgctggccgagtgaagtcaataaccccgtcaagggcgttattgaagccgctcccgcaaaccgtgattattctggaggctttggcataagtctcatgaagaaggatctcaagcttgcaatcgtcgccgctgaagaggcgaacgcgaaactcgagcttgctgccaaggcccgtgaggtctacgaagaagccgagcagctcgacaactgcaagggacgggatttctcggttgtatatcgattccttggtgggaaggaataa

SEQ ID NO: 39057 - protein, 333 aa, Muscodor strobelii
  misc_feature: SGI Peptide ID NO. 573582
  misc_feature (25)..(199): Pfam Id: PF03446 Pfam Desc: NAD binding domain of 6-phosphogluconate dehydrogenase
  misc_feature (1)..(333): NCBI GI: 12802360 Blast Desc: AF309689_5 3-hydroxyisobutyrate dehydrogenase G6G8.5 [Neurospora crassa]
  misc_feature (13)..(333): NCBI GI: 256727381 Blast Desc: [Nectria haematococca mpVI 77-13-4]
  misc_feature (15)..(333): NCBI GI: 46121813 Blast Desc: FG05284.1 [Gibberella zeae PH-1]
  misc_feature (5)..(333): NCBI GI: 116195126 Blast Desc: CHGG_04161 [Chaetomium globosum CBS 148.51] gi|88180074|gb|EAQ87542.1| CHGG_04161 [Chaetomium globosum CBS 148.51]
  misc_feature (1)..(333): NCBI GI: 164424982 Blast Desc: NCU06559 [Neurospora crassa OR74A] gi|157070739|gb|EAA33030.2| conserved [Neurospora crassa OR74A]
  misc_feature (15)..(333): NCBI GI: 39952089 Blast Desc: 3-hydroxyisobutyrate dehydrogenase, [Magnaporthe grisea 70-15] gi|145020472|gb|EDK04601.1| 3-hydroxyisobutyrate dehydrogenase, [Magnaporthe grisea 70-15]
  misc_feature (40)..(333): NCBI GI: 154303695 Blast Desc: BC1G_08732 [Botryotinia fuckeliana B05.10] gi|150854526|gb|EDN29718.1| BC1G_08732 [Botryotinia fuckeliana B05.10]
  misc_feature (36)..(331): NCBI GI: 156049321 Blast Desc: SS1G_08367 [Sclerotinia sclerotiorum 1980] gi|154692766|gb|EDN92504.1| SS1G_08367 [Sclerotinia sclerotiorum 1980]
  misc_feature (16)..(329): NCBI GI: 240106515 Blast Desc: 3-hydroxyisobutyrate dehydrogenase, [Coccidioides posadasii C735 delta SOWgp]
  misc_feature (16)..(329): NCBI GI: 119191316 Blast Desc: CIMG_00035 [Coccidioides immitis RS]
  misc_feature (27)..(329): SWISSPROT Homolog: EC 1.1.1.31 3-hydroxyisobutyrate dehydrogenase
MRAHRIIRSTIGVQRRGFSASSRRLDNYGFIGLGQMGYQMAKNLQSKLSPSDSVHLFDINKAATEKLAREMRSSQAGGATVQISESVSDAAKYADTIITVLPEPSHVKGVYSEILKLNLPPGNRIFIDSSTIDPSSSREVAKWVSDAKQGQFVDAPMSGGVVGATAGTLTFMLGSPTELVSKIEPILLRMGKRVLHCGVQGTGLSAKLANNYLLAINNIATAEAMNLGIRWGLEPKVLANIINVSTGKCWPSEVNNPVKGVIEAAPANRDYSGGFGISLMKKDLKLAIVAAEEANAKLELAAKAREVYEEAEQLDNCKGRDFSVVYRFLGGKE

SEQ ID NO: 39058 - DNA, 1912 bp, Muscodor strobelii
  misc_feature: SGI EST ID NO. CUFF.93968.0
  misc_feature: Variant of the nucleotide sequence at SEQ ID NO 39056
ccttgcctccttcccttacattgtaattgtgatgtctttctcgggtcttgctgtgaatgtgggcgtcccctcggctacatgtgaactgatgcaatccgttcttggtgacagctttaaccaagcttactgtaaggaataccagcatgccacatgactagacaaaaatgaacaccttctgtggtgtactggacatgaattagaatctgatgagcgaatggtgtggtcccagattgagaattgtttgtagaacacgacttatatgagttgcagttgtgaagagtgaaatgactttagcgagatggccttgttcagtggcccgagctttgccagcctctgcgcactagaagcagagagcaagcgagcatttattcagctaaaatttttccgtcggtcaaattgcaccctcagtttcttccctcctctctctctcactttcaagtgcgagagaacaagcaacacccacaatggcaggaagctgccatgggaatgtagtgtttctctcattatttatatcatttcggacaatatgcgatcctcgtgaccatgttacgtggttcctgttcgggcagccggtccaggggctggctggctcagcttagagccggccattgccggttgacgggtaacagtaccccgcgagctgctgtcaatagcccatggatttccaccgattcctcggagctcttgcctacctgctggcaagctgcaatccttcttgacacctacctaccaagagctcttgtatcaattgccttggattgcagtcatcatcaatgggcatgcaattgcacacagggcacctgaggtagcagagttagtttgggttgttgcgtgcatcgctgtcgtcctcatccctcttctacgaccatgagagctcatcgcatcatccgaagcactatcggtgtccagcgacgcgggttctcggcctcgtcgaggcggcttgacaactatggcttcataggtcttggccagatgggctaccagatggccaagaacctccagtctaagctctcaccctctgactcagtccacctcttcgacatcaacaaagctgccacggagaagctggctcgcgagatgcgatcatctcaagccggcggcgctacagttcagatatccgagagcgtaagcgacgctgccaaatacgctgatacaatcatcaccgtcttgcccgagccatcacacgtcaagggtgtctactcggagatattaaaactaaacctcccgcccgggaacaggatattcattgactcctcgaccatcgacccctcgtcatctcgcgaggtcgcaaaatgggtctcggatgcaaagcagggccaattcgtcgacgccccaatgtcaggcggtgttgttggcgccacagccggcacactaactttcatgcttggctcacccacagagctcgtctccaagattgagccaatcttattgcgcatggggaagcgtgtcttgcactgcggtgtgcaaggcaccggtcttagcgcgaagctggccaacaattatctattggccatcaacaacatcgcgacagccgaggcgatgaacctcggcatccgatggggccttgagcccaaggttctcgccaatatcatcaatgtcagcactggcaaatgctggccgagtgaagtcaataaccccgtcaagggcgttattgaagccgctcccgcaaaccgtgattattctggaggctttggcataagtctcatgaagaaggatctcaagcttgcaatcgtcgccgctgaagaggcgaacgcgaaactcgagcttgctgccaaggcccgtgaggtctacgaagaagccgagcagctcgacaactgcaagggacgggatttctcggttgtatatcgattccttggtgggaaggaataagctattagtgtacaagcgatgaatataccgatctagacaaaat

SEQ ID NO: 39059 - DNA, 2727 bp, Muscodor strobelii
  misc_feature: SGI cDNA ID NO. 573583
  misc_feature: Encodes the peptide sequence at SEQ ID NO 39060
atggcggaagaacagtctcggtctccctcgcctgaggtctctggcgtgtcaactcgaaacgagtatgaattacgagtcctctttgacaagttcagcaccggagagccaggggccttgaagaaatacgtcgcggcgctttctggtatcgacccagagcaattggattcgtacacactccgggagactccctttgaggcaaaacaaggagacggagcaaaaattgaatatgtcgggagagtctacgatgtgcaacccgaaggcgacaaggagcggctcaacgagcggctcggtgctggggaaaatgggccccgctacatccacagcttcgggacggctggccggcgtatctcatccgcttatgatccgctggatagttctaagcagcaattcagattgttgaggttgacgccatgcgagcagggtatcgtgcatcagctgcaactggagactttctccctacaggatgctccgccgtatatgacgctttcgtacgtctggggaaatcctgatcgctttatgcaagtcaagtgcaacaatggaatcttcgcagttacgcagaatctgttcagaaccatcgataaggtgtttaggagatatcccacgcaatggatctgggttgatggtctttgtatcaaccagcttgatatagaggagcgagctcaacaggtgcagatgatgggcgacatatacaggaaagcatccctggtcgttgctcatccggggcactacttgtaccaagctaacgtaccgcctggacgtcttgaagatatcgatgattttgattgtccggggctgaaaggagattttgatgcattcttccatccaattgacaaggattccgaaagctcgtcagcacccacaccttcggatgaagacatgaaatctatgatacagtcgatgaggcaaaagaagcccgagtcggattcaaaggacgaatttccacaggaggcactgagcatcatgacctatcttctcgatctgtggcataagaacccggataggcctgactcagagtgggcaaaatgtgatcttcctgatccatccactgacgaaggtgccacgatctggatgaatcttcttaatttctggaacgaggattggtactcaagagcttgggtcttccaggaagtggttctcgcgaagaaattagtcattcttaaaggcgatgctgcgatcgacttcgagcagatcctggatttctggtcgcaggctaggaaatgcatgttgccgagggttctgcgaattgggactatcgctgatgagttcaggaaagccatgcatctcatacctgactttgggcggtttcgtgataggctgaaggaggccgagaaaagcgaggagccagatgaatctttggttttaccgctcacgaacaaagataaaaacaaggaagtatcgggcctcataatcgagaaaccggatctcctcgagttgctgcagttattgagaaataacagagctagcgatgcacgagacaagatctatgccgtcattggattggcgaaacacgaaatagcccgctcgattatcccggattattccccggaaaatactgcgtctcatctttttatcgacgtggcgagtcgtttcattcaagccgggctcggagccgaagttctcagctacgcaggtctcgatcagcggctcgacgacctgccctcgtgggtacccgactggactctacagtcacgatctgagctcgcgacagatttgtaccgaagcgggggtgaccatacatctccaaaaatgagcatcgaagaagtcgatggtagatcttgtctgtccattcgtggagtggttctagctaaagtcgattttctgagtgcgggctggcgttactactcacgtgataaaaacttgcataagcttgtgaatcttaacaataatcctaaagctgagatgccagatcttaatgatgaggatagtcggaatattctgctcagcgttgcgactggcctcgaggagaaattgaactccaagagatatgggggagaagattgggagagtgttctttcgaggacgttgacggccgattgtttcggtctgaaaggcaggactgggatctcgaagttgaaggaaaggaagagtgtcggtcttgaggaagacataacggaaccggaatccaacatagcagccgagtttcgagactcattccaagcttatcgcgagttctacgctcgtggtccgtcagaggaagacgatctggacagagttcggatccatcagacaggacgatggatgtggatcatgaattttgacactgaacacgagtcagatctacagaaacggttatcgtcttttgccttttcgatgcaagccgttcagcgaggtcgacgagtcgctgtccttttacctcgagaggatgagcatggcagcagtagtgtcgaaaatacaagcgatggagatgaagaggacgacggtggatttattgcaactgttccttggaatacagagaatggcgatgtggttgtcctctttgagggctttaaaacgccttttgtgcttcggacgtgcagtacaaatgatggcggtcctcttgatgggaaatttcgtcttgtaggcgactgctatgtacacggtatcatggacggagagttgttggacaggtctgaagatgcattacggggtttgtcgtcagatcaagtcagcgttgatgatagtggtgctcaatatgctgtccgcactgcgaggggatttgggagctttgaagatattaccgtggtctga

SEQ ID NO: 39060 - protein, 908 aa, Muscodor strobelii
  misc_feature: SGI Peptide ID NO. 573583
  misc_feature (159)..(376): Pfam Id: PF06985 Pfam Desc: Heterokaryon incompatibility protein (HET)
  misc_feature (204)..(239): Pfam Id: PF06985 Pfam Desc: Heterokaryon incompatibility protein (HET)
  misc_feature (117)..(868): NCBI GI: 256728445 Blast Desc: NECHADRAFT_54320 [Nectria haematococca mpVI 77-13-4]
  misc_feature (147)..(560): NCBI GI: 46114550 Blast Desc: FG03117.1 [Gibberella zeae PH-1]
  misc_feature (120)..(559): NCBI GI: 171677524 Blast Desc: protein product [Podospora anserina] gi|170936830|emb|CAP61488.1| protein product [Podospora anserina]
  misc_feature (111)..(561): NCBI GI: 256724019 Blast Desc: NECHADRAFT_86353 [Nectria haematococca mpVI 77-13-4]
  misc_feature (145)..(865): NCBI GI: 145245067 Blast Desc: An11g08370 [Aspergillus niger] gi|134079496|emb|CAK46028.1| protein product [Aspergillus niger]
  misc_feature (120)..(601): NCBI GI: 154292443 Blast Desc: BC1G_14540 [Botryotinia fuckeliana B05.10] gi|150846126|gb|EDN21319.1| BC1G_14540 [Botryotinia fuckeliana B05.10]
  misc_feature (118)..(652): NCBI GI: 261360716 Blast Desc: ankyrin and HET domain-containing protein [Verticillium albo-atrum VaMs.102]
  misc_feature (116)..(667): NCBI GI: 170940109 Blast Desc: protein product [Podospora anserina]
  misc_feature (117)..(559): NCBI GI: 238500760 Blast Desc: conserved [Aspergillus flavus NRRL3357] gi|220691851|gb|EED48198.1| conserved [Aspergillus flavus NRRL3357]
  misc_feature (159)..(650): NCBI GI: 256720327 Blast Desc: NECHADRAFT_89157 [Nectria haematococca mpVI 77-13-4]
MAEEQSRSPSPEVSGVSTRNEYELRVLFDKFSTGEPGALKKYVAALSGIDPEQLDSYTLRETPFEAKQGDGAKIEYVGRVYDVQPEGDKERLNERLGAGENGPRYIHSFGTAGRRISSAYDPLDSSKQQFRLLRLTPCEQGIVHQLQLETFSLQDAPPYMTLSYVWGNPDRFMQVKCNNGIFAVTQNLFRTIDKVFRRYPTQWIWVDGLCINQLDIEERAQQVQMMGDIYRKASLVVAHPGHYLYQANVPPGRLEDIDDFDCPGLKGDFDAFFHPIDKDSESSSAPTPSDEDMKSMIQSMRQKKPESDSKDEFPQEALSIMTYLLDLWHKNPDRPDSEWAKCDLPDPSTDEGATIWMNLLNFWNEDWYSRAWVFQEVVLAKKLVILKGDAAIDFEQILDFWSQARKCMLPRVLRIGTIADEFRKAMHLIPDFGRFRDRLKEAEKSEEPDESLVLPLTNKDKNKEVSGLIIEKPDLLELLQLLRNNRASDARDKIYAVIGLAKHEIARSIIPDYSPENTASHLFIDVASRFIQAGLGAEVLSYAGLDQRLDDLPSWVPDWTLQSRSELATDLYRSGGDHTSPKMSIEEVDGRSCLSIRGVVLAKVDFLSAGWRYYSRDKNLHKLVNLNNNPKAEMPDLNDEDSRNILLSVATGLEEKLNSKRYGGEDWESVLSRTLTADCFGLKGRTGISKLKERKSVGLEEDITEPESNIAAEFRDSFQAYREFYARGPSEEDDLDRVRIHQTGRWMWIMNFDTEHESDLQKRLSSFAFSMQAVQRGRRVAVLLPREDEHGSSSVENTSDGDEEDDGGFIATVPWNTENGDVVVLFEGFKTPFVLRTCSTNDGGPLDGKFRLVGDCYVHGIMDGELLDRSEDALRGLSSDQVSVDDSGAQYAVRTARGFGSFEDITVV

SEQ ID NO: 39061 - DNA, 2128 bp, Muscodor strobelii
  misc_feature: SGI EST ID NO. CUFF.93974.0
  misc_feature: Variant of the nucleotide sequence at SEQ ID NO 39059
ccggggcactacttgtaccaagctaacgtaccgcctggacgtcttgaagatatcgatgattttgattgtccggggctgaaaggagattttgatgcattcttccatccaattgacaaggattccgaaagctcgtcagcacccacaccttcggatgaagacatgaaatctatgatacagtcgatgaggcaaaagaagcccgagtcggattcaaaggacgaatttccacaggaggcactgagcatcatgacctatcttctcgatctgtggcataagaacccggataggcctgactcagagtgggcaaaatgtgatcttcctgatccatccactgacgaaggtgccacgatctggatgaatcttcttaatttctggaacgaggattggtactcaagagcttgggtcttccaggaagtggttctcgcgaagaaattagtcattcttaaaggcgatgctgcgatcgacttcgagcagatcctggatttctggtcgcaggctaggaaatgcatgttgccgagggttctgcgaattgggactatcgctgatgagttcaggaaagccatgcatctcatacctgactttgggcggtttcgtgataggctgaaggaggccgagaaaagcgaggagccagatgaatctttggttttaccgctcacgaacaaagataaaaacaaggaagtatcgggcctcataatcgagaaaccggatctcctcgagttgctgcagttattgagaaataacagagctagcgatgcacgagacaagatctatgccgtcattggattggcgaaacacgaaatagcccgctcgattatcccggattattccccggaaaatactgcgtctcatctttttatcgacgtggcgagtcgtttcattcaagccgggctcggagccgaagttctcagctacgcaggtctcgatcagcggctcgacgacctgccctcgtgggtacccgactggactctacagtcacgatctgagctcgcgacagatttgtaccgaagcgggggtgaccatacatctccaaaaatgagcatcgaagaagtcgatggtagatcttgtctgtccattcgtggagtggttctagctaaagtcgattttctgagtgcgggctggcgttactactcacgtgataaaaacttgcataagcttgtgaatcttaacaataatcctaaagctgagatgccagatcttaatgatgaggatagtcggaatattctgctcagcgttgcgactggcctcgaggagaaattgaactccaagagatatgggggagaagattgggagagtgttctttcgaggacgttgacggccgattgtttcggtctgaaaggcaggactgggatctcgaagttgaaggaaaggaagagtgtcggtcttgaggaagacataacggaaccggaatccaacatagcagccgagtttcgagactcattccaagcttatcgcgagttctacgctcgtggtccgtcagaggaagacgatctggacagagttcggatccatcagacaggacgatggatgtggatcatgaattttgacactgaacacgagtcagatctacagaaacggttatcgtcttttgccttttcgatgcaagccgttcagcgaggtcgacgagtcgctgtccttttacctcgagaggatgagcatggcagcagtagtgtcgaaaatacaagcgatggagatgaagaggacgacggtggatttattgcaactgttccttggaatacagagaatggcgatgtggttgtcctctttgagggctttaaaacgccttttgtgcttcggacgtgcagtacaaatgatggcggtcctcttgatgggaaatttcgtcttgtaggcgactgctatgtacacggtatcatggacggagagttgttggacaggtctgaagatgcattacggggtttgtcgtcagatcaagtcagcgttgatgatagtggtgctcaatatgctgtccgcactgcgaggggatttgggagctttgaagatattaccgtggtctgatttgcatacgccacttcagggctgtaacatactggaagaacacaacggagcaatacaacctaacatctcaacatcgcagagttcgacatgtacatatctgaattgcagttttcggaaa

SEQ ID NO: 39062 - DNA, 468 bp, Muscodor strobelii
  misc_feature: SGI cDNA ID NO. 573584
  misc_feature: Encodes the peptide sequence at SEQ ID NO 39063
atgaagacccaattcgctttcctctccctcttcagcgccgctttggcacttccggcacttcctgccgacggcagccagcccaatgggtggaatcttctgaacttcaaagctgaatgcatcccgcgctccgtatgcacatactcctttgacatcgaatacctcaccgagtcgatcctcgctcactgcagcgtcgccgcacaaccatacggtatcggtgtgctaccggagattcccacaagacaatgtgacgacaatgcggcgttcatctggtccattgcgtttgcgagttcggaagagggcggtcgtgatttgactatcagagaacgagtcaactcgacgacacaagtgggcaacaccaagaacctccctggtgatgcatttgagattgtccaggacggcgcgactcaatatcagaattataccggaccctcgagcatcactttccctgtcgtctacattgatgtttga

SEQ ID NO: 39063 - protein, 155 aa, Muscodor strobelii
  misc_feature: SGI Peptide ID NO. 573584
  misc_feature (9)..(142): NCBI GI: 171676838 Blast Desc: protein product [Podospora anserina] gi|170936486|emb|CAP61146.1| protein product [Podospora anserina]
  misc_feature (4)..(148): NCBI GI: 118175976 Blast Desc: hypersensitive response-inducing protein [Ophiostoma ulmi]
MKTQFAFLSLFSAALALPALPADGSQPNGWNLLNFKAECIPRSVCTYSFDIEYLTESILAHCSVAAQPYGIGVLPEIPTRQCDDNAAFIWSIAFASSEEGGRDLTIRERVNSTTQVGNTKNLPGDAFEIVQDGATQYQNYTGPSSITFPVVYIDV

SEQ ID NO: 39064 - DNA, 1788 bp, Muscodor strobelii
  misc_feature: SGI cDNA ID NO. 573585
  misc_feature: Reduced expression when VOC is produced
  misc_feature: Encodes the peptide sequence at SEQ ID NO 39065
atgggtcaacacgaactgcagccgccgtcggtggcagagcagttacaacaaaactcgtcacaagagccgactcttgctccgagccaccgggatagtgtgagcgaaaagttgtctgccgcagcacctagctccgacagttcgagcaaatcggtagttgaaaacgaagcagagaaaaccaatgatatagccaaggtccagacggccgcgactagcaatggcgacgccctacagccaaccgagactagagaagacggctccgaatatcctaagggagccaagttggttctcattaccgtcgcgttgtgtctaagcgtcttcctcacggctcttgacaactctattatcgccacagccatccccgccatcacgaacgagttccatagtctcccagatgttggttggtacggttcggcgtacctgctcacgactgcatcgcttcagctgttgttcggaaaattctacacgtatttcagtcttaaatgggtctatctcattgccatcggcatcttcgagatcggcagtttgatctgtagtgtggcacctaactccaccgctctcattgttggtcgtgccatcgccggtttaggctctgccggtatcttctccggtgccctcctgatcttggcctacagtgtgccgctacaaaagcgtcccatttatagcggagccatcggcggtgtctacggcattgcatcagtcgccggcccacttctcggtggtgctttcactgataacgttacctggcgatggtgcttctacatcaacctgcccatcggtgcggtcactatcatcgctattgccatctttttcccgcctcctgtccagaagaagcctgaaagcgagacattgatgaagacagtgatgcgcttcgatcccattggcacccttctcttcattcccgccatcgttagtcttctcctcgctctccagtggggtggtgttaagtacccctggaataatgctcgaattgtcgccctgttcgttgttttcggagtcttgctcctcggcttcttcttcgttcagtggaagcagcaggaaaatgccacagtcccacctcgtatcatcaagaagcggagtgtgatggccgcaggtggtttcgcgtttttcatcggtgcctctttcttcctcttcgtctactacgttccgacatggttccaggctgtgcagagcgtgagtgccgtcgagtctggtatccgcaatctgccgatgcttctcgctgttgtcgtctcgtccatcgtatccggtggtcttgtcaccgcctttggttactataccccattcatgatcgccggcactgttcttgcctctattggagctggcctgctcactcttctcaccccgggtatcagcgagggcaggtggattggataccaaatcatctttggcttcggtgtcggtcttggtctccagcaacctcttattgctgtgcagacagtactcgacataaaagacattcccgttggaactgcagctgtcgtcttcctgcaaacaattggcggtgctctgttcgtctcggttggaaacaacgtctttgacaataagctagtgcaggagctcacaaaacgtgtccctagcatttctcctcaagaggtcatcggagctggtgcgacgaatcttcagaagtcaatctcacctgatctattgcctgctgtcaaactctcatacagcaatgccttgacccaggcattcatcgtcgcccttgcactcgccgctttctctatctttggttctctggccattgagtggaagtccgtcaagggcaagaagattgagcctggcttggcttaa

SEQ ID NO: 39065 - protein, 595 aa, Muscodor strobelii
  misc_feature: SGI Peptide ID NO. 573585
  misc_feature (101)..(504): Pfam Id: PF07690 Pfam Desc: Major Facilitator Superfamily
  misc_feature (101)..(281): Pfam Id: PF07690 Pfam Desc: Major Facilitator Superfamily
  misc_feature (17)..(595): NCBI GI: 149773773 Blast Desc: efflux pump [Xylaria sp. BCC 1067]
  misc_feature (4)..(591): NCBI GI: 156036306 Blast Desc: conserved [Sclerotinia sclerotiorum 1980] gi|154698247|gb|EDN97985.1| conserved [Sclerotinia sclerotiorum 1980]
  misc_feature (16)..(591): NCBI GI: 14389419 Blast Desc: AF238225_1 DHA14-like major facilitator [Botryotinia fuckeliana]
  misc_feature (8)..(595): NCBI GI: 164422928 Blast Desc: NCU10945 [Neurospora crassa OR74A] gi|157069875|gb|EAA28867.2| conserved [Neurospora crassa OR74A]
  misc_feature (21)..(595): NCBI GI: 116214429 Blast Desc: CHGG_11055 [Chaetomium globosum CBS 148.51] gi|88175410|gb|EAQ82879.1| CHGG_11055 [Chaetomium globosum CBS 148.51]
  misc_feature (48)..(590): NCBI GI: 212528424 Blast Desc: conserved [Penicillium marneffei ATCC 18224] gi|210073767|gb|EEA27854.1| conserved [Penicillium marneffei ATCC 18224]
  misc_feature (43)..(590): NCBI GI: 242778085 Blast Desc: efflux pump antibiotic resistance protein, [Talaromyces stipitatus ATCC 10500] gi|218722786|gb|EED22204.1| efflux pump antibiotic resistance protein, [Talaromyces ATCC
  misc_feature (43)..(593): NCBI GI: 255936771 Blast Desc: Pc13g09900 [Penicillium chrysogenum Wisconsin 54-1255] gi|211584032|emb|CAP92059.1| Pc13g09900 [Penicillium chrysogenum Wisconsin 54-1255]
  misc_feature (46)..(591): NCBI GI: 238844737 Blast Desc: major facilitator superfamily transporter [Microsporum canis CBS 113480]
  misc_feature (1)..(595): NCBI GI: 171679743 Blast Desc: protein product [Podospora anserina] gi|170939497|emb|CAP64725.1| protein product [Podospora anserina]
  misc_feature: Useful for introducing or modulating the production of volatile compounds
MGQHELQPPSVAEQLQQNSSQEPTLAPSHRDSVSEKLSAAAPSSDSSSKSVVENEAEKTNDIAKVQTAATSNGDALQPTETREDGSEYPKGAKLVLITVALCLSVFLTALDNSIIATAIPAITNEFHSLPDVGWYGSAYLLTTASLQLLFGKFYTYFSLKWVYLIAIGIFEIGSLICSVAPNSTALIVGRAIAGLGSAGIFSGALLILAYSVPLQKRPIYSGAIGGVYGIASVAGPLLGGAFTDNVTWRWCFYINLPIGAVTIIAIAIFFPPPVQKKPESETLMKTVMRFDPIGTLLFIPAIVSLLLALQWGGVKYPWNNARIVALFVVFGVLLLGFFFVQWKQQENATVPPRIIKKRSVMAAGGFAFFIGASFFLFVYYVPTWFQAVQSVSAVESGIRNLPMLLAVVVSSIVSGGLVTAFGYYTPFMIAGTVLASIGAGLLTLLTPGISEGRWIGYQIIFGFGVGLGLQQPLIAVQTVLDIKDIPVGTAAVVFLQTIGGALFVSVGNNVFDNKLVQELTKRVPSISPQEVIGAGATNLQKSISPDLLPAVKLSYSNALTQAFIVALALAAFSIFGSLAIEWKSVKGKKIEPGLA

SEQ ID NO: 39066 - DNA, 2391 bp, Muscodor strobelii
  misc_feature: SGI EST ID NO. CUFF.93980.0
  misc_feature: Variant of the nucleotide sequence at SEQ ID NO 39064
gcgggcacgagtccctccgccgtatgccgtatctttttgggcgggaccgtgagtgtgctggtaatggtacataattttagatctgctcattttcacattgtctgtacttaagacgagtgccgtccccggctttcagaatcgtgcatagtcgttcccatccacgacccttacgctaatacatcagataaggtgaccgacccagcaaacagcaccttcaacacgacatagtttcacatccacgacccacttaagctaaacacattggagaccgcaaggcagcaagacaccacacaacatctctcgatgggtcaacacgaactgcagccgccgtcggtggcagagcagttacaacaaaactcgtcacaagagccgactcttgctccgagccaccgggatagtgtgagcgaaaagttgtctgccgcagcacctagctccgacagttcgagcaaatcggtagttgaaaacgaagcagagaaaaccaatgatatagccaaggtccagacggccgcgactagcaatggcgacgccctacagccaaccgagactagagaagacggctccgaatatcctaagggagccaagttggttctcattaccgtcgcgttgtgtctaagcgtcttcctcacggctcttgacaactctattatcgccacagccatccccgccatcacgaacgagttccatagtctcccagatgttggttggtacggttcggcgtacctgctcacgactgcatcgcttcagctgttgttcggaaaattctacacgtatttcagtcttaaatgggtctatctcattgccatcggcatcttcgagatcggcagtttgatctgtagtgtggcacctaactccaccgctctcattgttggtcgtgccatcgccggtttaggctctgccggtatcttctccggtgccctcctgatcttggcctacagtgtgccgctacaaaagcgtcccatttatagcggagccatcggcggtgtctacggcattgcatcagtcgccggcccacttctcggtggtgctttcactgataacgttacctggcgatggtgcttctacatcaacctgcccatcggtgcggtcactatcatcgctattgccatctttttcccgcctcctgtccagaagaagcctgaaagcgagacattgatgaagacagtgatgcgcttcgatcccattggcacccttctcttcattcccgccatcgttagtcttctcctcgctctccagtggggtggtgttaagtacccctggaataatgctcgaattgtcgccctgttcgttgttttcggagtcttgctcctcggcttcttcttcgttcagtggaagcagcaggaaaatgccacagtcccacctcgtatcatcaagaagcggagtgtgatggccgcaggtggtttcgcgtttttcatcggtgcctctttcttcctcttcgtctactacgttccgacatggttccaggctgtgcagagcgtgagtgccgtcgagtctggtatccgcaatctgccgatgcttctcgctgttgtcgtctcgtccatcgtatccggtggtcttgtcaccgcctttggttactataccccattcatgatcgccggcactgttcttgcctctattggagctggcctgctcactcttctcaccccgggtatcagcgagggcaggtggattggataccaaatcatctttggcttcggtgtcggtcttggtctccagcaacctcttattgctgtgcagacagtactcgacataaaagacattcccgttggaactgcagctgtcgtcttcctgcaaacaattggcggtgctctgttcgtctcggttggaaacaacgtctttgacaataagctagtgcaggagctcacaaaacgtgtccctagcatttctcctcaagaggtcatcggagctggtgcgacgaatcttcagaagtcaatctcacctgatctattgcctgctgtcaaactctcatacagcaatgccttgacccaggcattcatcgtcgcccttgcactcgccgctttctctatctttggttctctggccattgagtggaagtccgtcaagggcaagaagattgagcctggcttggcttaagcctctcgcatcaattcttacggcgacaatagactaataagctttgtacaacgcaactaataatcggtcgatcccgttggacgggggcggttctctggaaggatgggttggcatggagcattcagcgaaagtgaacgtctcgatttgaggcactgcattggtggcgttaggtacaggaagaaaattgctcaaagcaatcatagaaatttttttatgttgtttaattcatgaatggttgatagaagcatttagaggctttcttgctcataataccataaattctccactaatactatttcg

SEQ ID NO: 39067 - DNA, 1146 bp, Muscodor strobelii
  misc_feature: SGI cDNA ID NO. 573586
  misc_feature: Encodes the peptide sequence at SEQ ID NO 39068
atgggcgacgtcagcggagctacggtggtggaaattcccaaggaatgcatcgccgcagtcgtagtcaacgaggggccagactttcatgttgaagtcagaaatgttcctgtgccggagattggtaaatatcgtgatcgaaccgttgtttctttgctgatctcgataaaaggccccgaagatgtactcatcaagttgaacgccacaggcttatgcatgtcggatgttcatttcatgttgaacgactggcacacaacacccaagatgtcagtcttcaacacacaatgtgcagggcatgagggcgctggagtgattgtcaagatcggagagcgcgttaagaatctaagggttggccagcgagccggctataaaccaatccgagatgtttgtcacagttgttacgagtgccagagtggccaagagacatactgcttcaaagcaactttcgcggggcttcaagtcgacggatcatataaacaatacgtcacatcgcccgagagatacacaactctcatcccagatggcgtcagtgactacgtagcagggccgatcatgtgttcgggagccactgcatatacatctctaaaggaatccggcttaagaccaggagattgggctgtttttccaggaggcggcggtggtgttgggatccaaggagttcaacttgcggtcgcaatgggctttcggccaatcgttgtagataccggagcggagagggaatctctggccagggaaatgggggctgaagaattcgtggatttcaaaaaagtagaattccctcccaaaagggtgatagaacttaccaacggcggtgcccatggtgctttcattacagcaatgcaatcttacccaatcgcgctcgactacttgggttatagaaggggcgcggtcgtgatgtgtattggtattccaacccaggagttccaaatgacgattgatccgaatcgtctttgcactagaaatcaatctgtaaagggaacattagttgggactcatgctaatgtagtggaaacgttggagtttgccagacgagggaaactccgtttaaaaccaacggtggttggtgtttcgaaattcaacgagtcggtacagaaactcaagaatggccaggtagctgggcgcattgtcgtcgacttcaatttaccttaa

SEQ ID NO: 39068 - protein, 381 aa, Muscodor strobelii
  misc_feature: SGI Peptide ID NO. 573586
  misc_feature (58)..(171): Pfam Id: PF08240 Pfam Desc: Alcohol dehydrogenase GroES-like domain
  misc_feature (201)..(343): Pfam Id: PF00107 Pfam Desc: Zinc-binding dehydrogenase
  misc_feature (11)..(379): NCBI GI: 189206680 Blast Desc: alcohol dehydrogenase 1 [Pyrenophora tritici-repentis Pt-1C-BFP] gi|187975767|gb|EDU42393.1| alcohol dehydrogenase 1 [Pyrenophora tritici-repentis Pt-1C-BFP]
  misc_feature (11)..(381): NCBI GI: 169621267 Blast Desc: SNOG_13842 [Phaeosphaeria nodorum SN15] gi|160704214|gb|EAT78866.2| SNOG_13842 [Phaeosphaeria nodorum SN15]
  misc_feature (11)..(379): NCBI GI: 27466728 Blast Desc: alcohol dehydrogenase [Cercospora zeae-maydis]
  misc_feature (1)..(379): NCBI GI: 255933546 Blast Desc: Pc12g13440 [Penicillium chrysogenum Wisconsin 54-1255] gi|211582771|emb|CAP80971.1| Pc12g13440 [Penicillium chrysogenum Wisconsin 54-1255]
  misc_feature (8)..(379): NCBI GI: 259486245 Blast Desc: TPA: conserved [Aspergillus nidulans FGSC A4]
  misc_feature (10)..(379): NCBI GI: 115386962 Blast Desc: conserved [Aspergillus terreus NIH2624] gi|114191020|gb|EAU32720.1| conserved [Aspergillus terreus NIH2624]
  misc_feature (11)..(379): NCBI GI: 238485404 Blast Desc: alcohol dehydrogenase, [Aspergillus flavus NRRL3357] gi|220698819|gb|EED55158.1| alcohol dehydrogenase, [Aspergillus flavus NRRL3357]
  misc_feature (7)..(379): NCBI GI: 119501647 Blast Desc: alcohol dehydrogenase [Neosartorya fischeri NRRL 181] gi|119415746|gb|EAW25683.1| alcohol dehydrogenase [Neosartorya fischeri NRRL 181]
  misc_feature (11)..(379): NCBI GI: 169771987 Blast Desc: [Aspergillus oryzae RIB40] gi|83768322|dbj|BAE58461.1| protein product [Aspergillus oryzae]
  misc_feature (11)..(379): NCBI GI: 240111599 Blast Desc: alcohol dehydrogenase, [Coccidioides posadasii C735 delta SOWgp]
  misc_feature (58)..(377): SWISSPROT Homolog: EC 1.1.1.1 Alcohol dehydrogenase
MGDVSGATVVEIPKECIAAVVVNEGPDFHVEVRNVPVPEIGKYRDRTVVSLLISIKGPEDVLIKLNATGLCMSDVHFMLNDWHTTPKMSVFNTQCAGHEGAGVIVKIGERVKNLRVGQRAGYKPIRDVCHSCYECQSGQETYCFKATFAGLQVDGSYKQYVTSPERYTTLIPDGVSDYVAGPIMCSGATAYTSLKESGLRPGDWAVFPGGGGGVGIQGVQLAVAMGFRPIVVDTGAERESLAREMGAEEFVDFKKVEFPPKRVIELTNGGAHGAFITAMQSYPIALDYLGYRRGAVVMCIGIPTQEFQMTIDPNRLCTRNQSVKGTLVGTHANVVETLEFARRGKLRLKPTVVGVSKFNESVQKLKNGQVAGRIVVDFNLP

SEQ ID NO: 39069 - DNA, 789 bp, Muscodor strobelii
  misc_feature: SGI EST ID NO. CUFF.93990.0
  misc_feature: Variant of the nucleotide sequence at SEQ ID NO 39067
gggaacattagttgggactcatgctaatgtagtggaaacgttggagtttgccagacgagggaaactccgtttaaaaccaacggtggttggtgtttcgaaattcaacgagtcggtacagaaactcaagaatggccaggtagctgggcgcattgtcgtcgacttcaatttaccttaagcggaaatagaagtgtaataggatgcatgtgggatggtaatgggtggggcgtggcacgggtaaatctgaaagtcgtagcgagggttcaggacacggagggatcgtagcgtcagcaatccttccacgggagaatcctaatcatcctcaacgggttggctgggtgaagccatctcagcatccttcgtcaacttcggaccgctgtagcttaaatggacgttcgtacattcagaccgcgaacgtgctcgtagtgtctcaggaaaggtgcgtgtagtgcgatgatgatggcctcactccagaaagttagtcttccaatatccgaaaattcggacgcctttccatctccaatagaggtcagatcatgaatcacatcatcgatagccgtatcagcgtgatgataccctgcccacctaggcgcgcaggtggacgcggggcaaacctgtctgggcattgagtgctgttcacacgtcgacacacatgacgtactctatgatcattgaatcaagcgatggatcatggtatgtatggcaatcgaactctgagccaaatacccttgattcaaacatcgcatttggtaacgcctgcaggatcatgccttatcaccttagccgttgtgg

SEQ ID NO: 39070 - DNA, 1119 bp, Muscodor strobelii
  misc_feature: SGI cDNA ID NO. 573587
  misc_feature: Encodes the peptide sequence at SEQ ID NO 39071
atgggcgacgtcagcggagctacggtggtggaaattcccaaggaatgcatcgccgcagtcgtagtcaacgaggggccagactttcatgttgaagtcagaaatgttcctgtgccggagattggtaaatatcgtgatcgaaccgttgtttctttgctgatctcgataaaaggccccgaagatgtactcatcaagttgaacgccacaggcttatgcatgtcggatgttcatttcatgttgaacgactggcacacaacacccaagatgtcagtcttcaacacacaatgtgcagggcatgagggcgctggagtgattgtcaagatcggagagcgcgttaagaatctaagggttggccagcgagccggctataaaccaatccgagatgtttgtcacagttgttacgagtgccagagtggccaagagacatactgcttcaaagcaactttcgcggggcttcaagtcgacggatcatataaacaatacgtcacatcgcccgagagatacacaactctcatcccagatggcgtcagtgactacgtagcagggccgatcatgtgttcgggagccactgcatatacatctctaaaggaatccggcttaagaccaggagattgggctgtttttccaggaggcggcggtggtgttgggatccaaggagttcaacttgcggtcgcaatgggctttcggccaatcgttgtagataccggagcggagagggaatctctggccagggaaatgggggctgaagaattcgtggatttcaaaaaagtagaattccctcccaaaagggtgatagaacttaccaacggcggtgcccatggtgctttcattacagcaatgcaatcttacccaatcgcgctcgactacttgggttatagaaggggcgcggtcgtgatgtgtattggtattccaacccaggagttccaaatgacgattgatccgaatcgtctttgcactagaaatcaatctgtaaagggaacattagttgggactcatgctaatgtagtggaaacgttggagtttgccagacgagggaaactccgtttaaaaccaacggtggttggtgtttcgaaattcaacgagtcggtacagaaactcaagaatggccaggtagctgggtaa

SEQ ID NO: 39071 - protein, 372 aa, Muscodor strobelii
  misc_feature: SGI Peptide ID NO. 573587
  misc_feature (58)..(171): Pfam Id: PF08240 Pfam Desc: Alcohol dehydrogenase GroES-like domain
  misc_feature (201)..(343): Pfam Id: PF00107 Pfam Desc: Zinc-binding dehydrogenase
  misc_feature (11)..(372): NCBI GI: 189206680 Blast Desc: alcohol dehydrogenase 1 [Pyrenophora tritici-repentis Pt-1C-BFP] gi|187975767|gb|EDU42393.1| alcohol dehydrogenase 1 [Pyrenophora tritici-repentis Pt-1C-BFP]
  misc_feature (11)..(372): NCBI GI: 169621267 Blast Desc: SNOG_13842 [Phaeosphaeria nodorum SN15] gi|160704214|gb|EAT78866.2| SNOG_13842 [Phaeosphaeria nodorum SN15]
  misc_feature (11)..(372): NCBI GI: 27466728 Blast Desc: alcohol dehydrogenase [Cercospora zeae-maydis]
  misc_feature (1)..(372): NCBI GI: 255933546 Blast Desc: Pc12g13440 [Penicillium chrysogenum Wisconsin 54-1255] gi|211582771|emb|CAP80971.1| Pc12g13440 [Penicillium chrysogenum Wisconsin 54-1255]
  misc_feature (8)..(372): NCBI GI: 259486245 Blast Desc: TPA: conserved [Aspergillus nidulans FGSC A4]
  misc_feature (10)..(372): NCBI GI: 115386962 Blast Desc: conserved [Aspergillus terreus NIH2624] gi|114191020|gb|EAU32720.1| conserved [Aspergillus terreus NIH2624]
  misc_feature (11)..(372): NCBI GI: 238485404 Blast Desc: alcohol dehydrogenase, [Aspergillus flavus NRRL3357] gi|220698819|gb|EED55158.1| alcohol dehydrogenase, [Aspergillus flavus NRRL3357]
  misc_feature (7)..(372): NCBI GI: 119501647 Blast Desc: alcohol dehydrogenase [Neosartorya fischeri NRRL 181] gi|119415746|gb|EAW25683.1| alcohol dehydrogenase [Neosartorya fischeri NRRL 181]
  misc_feature (11)..(372): NCBI GI: 169771987 Blast Desc: [Aspergillus oryzae RIB40] gi|83768322|dbj|BAE58461.1| protein product [Aspergillus oryzae]
  misc_feature (11)..(372): NCBI GI: 240111599 Blast Desc: alcohol dehydrogenase, [Coccidioides posadasii C735 delta SOWgp]
  misc_feature (58)..(372): SWISSPROT Homolog: EC 1.1.1.1 Alcohol dehydrogenase
MGDVSGATVVEIPKECIAAVVVNEGPDFHVEVRNVPVPEIGKYRDRTVVSLLISIKGPEDVLIKLNATGLCMSDVHFMLNDWHTTPKMSVFNTQCAGHEGAGVIVKIGERVKNLRVGQRAGYKPIRDVCHSCYECQSGQETYCFKATFAGLQVDGSYKQYVTSPERYTTLIPDGVSDYVAGPIMCSGATAYTSLKESGLRPGDWAVFPGGGGGVGIQGVQLAVAMGFRPIVVDTGAERESLAREMGAEEFVDFKKVEFPPKRVIELTNGGAHGAFITAMQSYPIALDYLGYRRGAVVMCIGIPTQEFQMTIDPNRLCTRNQSVKGTLVGTHANVVETLEFARRGKLRLKPTVVGVSKFNESVQKLKNGQVAG

SEQ ID NO: 39072 - DNA, 194 bp, Muscodor strobelii
  misc_feature: SGI EST ID NO. CUFF.93993.0
  misc_feature: Variant of the nucleotide sequence at SEQ ID NO 39070
aacttgcggtcgcaatgggctttcggccaatcgttgtagataccggagcggagagggaatctctggccagggaaatgggggctgaagaattcgtggatttcaaaaaagtagaattccctcccaaaagggtgatagaacttaccaacggcggtgcccatggtgctttcattacagcaatgcaatcttacccaatc

SEQ ID NO: 39073 - DNA, 1125 bp, Muscodor strobelii
  misc_feature: SGI cDNA ID NO. 573588
  misc_feature: Encodes the peptide sequence at SEQ ID NO 39074
atgtccgaatcacagagtgcttccgcaccccggatcttgttgaccggagcaaccgggtttatcggcggaacggtcttgacccaactcctcaattccacctctccagcaatccaaagtcatccgatcacttgtctagtgcgtggagcggaccgagcaaacaagctgcggaatgcatacgggcaccgagttaaccccgtagtctaccgagacctagatgacctagaaacaactaccgccatcgcatcacagcacgatgtagtaatcagcacaacactgggctatcacgctgcatccgcaagagcaatactcgagggtcttgcgcaacgccagaaggcgcatccggagagagacatatggttcatccacacttccggcgcatccaacatcggcggacgagctatcaccaaactatgggtcgatgacccatcacccggcggtcgtgagttccacgacgagcgcgatgacgtctacgggtacgaagtagatcgtgaagcaagacaaccatacattcagcgatccaccgagctatctgtcgtagacggcgggatcgaactcggtgtgaaaactctcgtcatgatggcgccgatggtatacggtgtcggtactgggctgttcaataagcgcagtgtgcagataccggcttatatttacactgctctcgattatggacaagccgttgtcctcggtgagggggtaggcgggatcgatcatgttcatgtacaggatattgccgagctttatgagcttctcgcggtcaagatcctcgagggaaatgggaaagatctgcctactggtaagaaaggcatcatcttcagctccaatggaaacgactcatggggtaacattgcgaaacaagtcgctgaagcgtgtcatgctgccggggctttaaggaccacggaagtgaagcacgtgggcttgtccgagggcgctcgcttgttcacgcagtcgtatttgggaggcgaagctgacgacatgatgatcgaactaggactagcgagtaatgcgagaaccgtgccatctgtggcccgcggactgggctggaagccaacacggggtgaggagtattggaaaaaggggtttgcggatgatgtcgctgcggttctccaggagagaaataagcgatga

SEQ ID NO: 39074 - protein, 374 aa, Muscodor strobelii
  misc_feature: SGI Peptide ID NO. 573588
  misc_feature (12)..(265): Pfam Id: PF01370 Pfam Desc: NAD dependent epimerase/dehydratase family
  misc_feature (14)..(50): Pfam Id: PF07993 Pfam Desc: Male sterility protein
  misc_feature (8)..(371): NCBI GI: 238497742 Blast Desc: NAD dependent epimerase/dehydratase family protein [Aspergillus flavus NRRL3357] gi|220693380|gb|EED49725.1| NAD dependent epimerase/dehydratase family protein [Aspergillus
  misc_feature (8)..(371): NCBI GI: 169768436 Blast Desc: [Aspergillus oryzae RIB40] gi|83766546|dbj|BAE56686.1| protein product [Aspergillus oryzae]
  misc_feature (11)..(364): NCBI GI: 261356988 Blast Desc: NAD dependent epimerase/dehydratase family protein [Verticillium albo-atrum VaMs.102]
  misc_feature (10)..(369): NCBI GI: 46111867 Blast Desc: FG02815.1 [Gibberella zeae PH-1]
  misc_feature (8)..(364): NCBI GI: 242823456 Blast Desc: conserved [Talaromyces stipitatus ATCC 10500] gi|218712993|gb|EED12418.1| conserved [Talaromyces stipitatus ATCC 10500]
  misc_feature (8)..(372): NCBI GI: 154324056 Blast Desc: BC1G_00427 [Botryotinia fuckeliana B05.10] gi|150842656|gb|EDN17849.1| BC1G_00427 [Botryotinia fuckeliana B05.10]
  misc_feature (8)..(370): NCBI GI: 242811577 Blast Desc: NAD dependent epimerase/dehydratase family protein [Talaromyces stipitatus ATCC 10500] gi|218714117|gb|EED13540.1| NAD dependent epimerase/dehydratase family protein [Talaromyces
  misc_feature (11)..(257): NCBI GI: 154290685 Blast Desc: BC1G_15601 [Botryotinia fuckeliana B05.10] gi|150847453|gb|EDN22646.1| BC1G_15601 [Botryotinia fuckeliana B05.10]
  misc_feature (12)..(357): NCBI GI: 256729062 Blast Desc: NECHADRAFT_40414 [Nectria haematococca mpVI 77-13-4]
  misc_feature (7)..(374): NCBI GI: 146323121 Blast Desc: NAD dependent epimerase/dehydratase family protein [Aspergillus fumigatus Af293] gi|129556475|gb|EAL86317.2| NAD dependent epimerase/dehydratase family protein [Aspergillus
MSESQSASAPRILLTGATGFIGGTVLTQLLNSTSPAIQSHPITCLVRGADRANKLRNAYGHRVNPVVYRDLDDLETTTAIASQHDVVISTTLGYHAASARAILEGLAQRQKAHPERDIWFIHTSGASNIGGRAITKLWVDDPSPGGREFHDERDDVYGYEVDREARQPYIQRSTELSVVDGGIELGVKTLVMMAPMVYGVGTGLFNKRSVQIPAYIYTALDYGQAVVLGEGVGGIDHVHVQDIAELYELLAVKILEGNGKDLPTGKKGIIFSSNGNDSWGNIAKQVAEACHAAGALRTTEVKHVGLSEGARLFTQSYLGGEADDMMIELGLASNARTVPSVARGLGWKPTRGEEYWKKGFADDVAAVLQERNKR

SEQ ID NO: 39075 - DNA, 1520 bp, Muscodor strobelii
  misc_feature: SGI EST ID NO. CUFF.94004.0
  misc_feature: Variant of the nucleotide sequence at SEQ ID NO 39073
gcaggttgaggtcaagtatccggggtagagtattattaatgccggaccttaggagataccgtataaagcccgaaacatcaagtgtttgtgaagacaattatcaacacgcttagaggatgtcttgaataaactataaaatgctcttgcaattagattcataaagacgagtatcaatgcgaaaatagagtatcagctcttcagtaaaacctcctcataaaagatactgacctcaaggactgacactccaatccggtgatctcttccaatgtccgaatcacagagtgcttccgcaccccggatcttgttgaccggagcaaccgggtttatcggcggaacggtcttgacccaactcctcaattccacctctccagcaatccaaagtcatccgatcacttgtctagtgcgtggagcggaccgagcaaacaagctgcggaatgcatacgggcaccgagttaaccccgtagtctaccgagacctagatgacctagaaacaactaccgccatcgcatcacagcacgatgtagtaatcagcacaacactgggctatcacgctgcatccgcaagagcaatactcgagggtcttgcgcaacgccagaaggcgcatccggagagagacatatggttcatccacacttccggcgcatccaacatcggcggacgagctatcaccaaactatgggtcgatgacccatcacccggcggtcgtgagttccacgacgagcgcgatgacgtctacgggtacgaagtagatcgtgaagcaagacaaccatacattcagcgatccaccgagctatctgtcgtagacggcgggatcgaactcggtgtgaaaactctcgtcatgatggcgccgatggtatacggtgtcggtactgggctgttcaataagcgcagtgtgcagataccggcttatatttacactgctctcgattatggacaagccgttgtcctcggtgagggggtaggcgggatcgatcatgttcatgtacaggatattgccgagctttatgagcttctcgcggtcaagatcctcgagggaaatgggaaagatctgcctactggtaagaaaggcatcatcttcagctccaatggaaacgactcatggggtaacattgcgaaacaagtcgctgaagcgtgtcatgctgccggggctttaaggaccacggaagtgaagcacgtgggcttgtccgagggcgctcgcttgttcacgcagtcgtatttgggaggcgaagctgacgacatgatgatcgaactaggactagcgagtaatgcgagaaccgtgccatctgtggcccgcggactgggctggaagccaacacggggtgaggagtattggaaaaaggggtttgcggatgatgtcgctgcggttctccaggagagaaataagcgatgaggttcctcgatgctatataagtgcggaatagatttctagccacttgtggtatgatctaaatcagaacttctagtatcttccaacgtgcttgctctcctgactcctccttcgggaccggcttacactagaa

SEQ ID NO: 39076 - DNA, 3255 bp, Muscodor strobelii
  misc_feature: SGI cDNA ID NO. 573589
  misc_feature: Encodes the peptide sequence at SEQ ID NO 39077
atggcgactaccgactcaacggccaccaaggcggcgcccaagatggaaaataccgagaagcgtgacaccctcatcgccgacgagctgcgctaccagcaggaatgggacgcggccaagctcttcgagaccgacgcaccgggccccaacgaacccaagcagcccaaattcttctctaccatggcctatccctacatgaacggcgtcctccatgccggccacgccttcacatggagcaagcaggagttcatgacgggatatgcccgcatgaaaggcgaaaggaccctctacccccagggttaccatctgactggcatgcccatcaaggctgccgccgacaagttggcacgcgaaatcgagttatttggccagaacttcgacaatattcccgccccagacctccaacagctgtctctcgacaaggaaccgaaagaggccggggccgccaagactgatatgagcaagtttgccggcagtaagagcaaagctgttgctaagactggcaatgtcaagtatcaatatgagatcatgctgtctctgggcataccgcgcgaagagatccacctttttgcgaaccccgaacattggggccgtgttttccccgagaaatgcaaggaggacctccgaagcatcggctctcgtatcgactggcgccgatctatggtgacaactccggcaaacccattctatgactcgttcgtccgatggcagatgaaccgtctgaaaagcttaaacaaaatcaaatttggcaaacgcttcactgtctacagtcctaaagatggccaagcttgcttagatcatgaccggagcgctggtgaaggcatcgctgtccaagaatatgtcgccttgaaactgaagaccttggagtggtcagaaaaggccaagggaatcatcggtgataagatccctgctgatgccaatgtgttcttcattgctgccactctccgaccggagactatgtacggtcaaacatgctgctttattgggcccacagtcgcgtatggcatcttccgcgtgccgaaagaggatggaaaggacgagtactacttctgcagcgatcgggccgcccggaacatggcgtaccaaggtatcttcccctggggcgagtaccagcaagtcgtcgagcttgtcgggtcagacgttgtcggcactctcgtaaatggccccctttctgttcacgataagggaatctacatcctccccatggcaactgtgaagccgacgaagggaactggtgtcgtcacgtgtgtgccctccgacagtcccgacgactatgcgactgttttggacctcactaagaaatccgaattctacggcatcaagaaggaatgggtagacaaagagattttgcctatcattaaaacgccgagctcggatcttatcgcaaaatatctatacgagactatgaagataagctcgcctaaggacgctaagcagctggctgaggcaaaagagcaagcatataaagaaggtttctaccaaggcaccatgctcttcggcgaattcaagggcaagtcggttcaagaggcgaagcctctggtcaggcagcagctcatagacgcgggtctggcgttcaactacggtgagccagatgggcaggtcatcagtagatcaggtgatgagtgcgttgcagcatatcttgatcaatggtacttcaattatggtaccgctgccaatggcggcgaccaggagtggtacgaggctgccattggtgcaattgaatcagggcggacaaacaccttttaccctgagggaaagcatgcgatgacgcaagctctgaattggctcgccgcatgggcctgcagtcgctctttcggccttggaacaaaactgccatgggactcgacgcagcttgtagagagtttatcagacagcagtgtctacatggcatattacacagttgctcactatttgcataatgatatatatggcgagacgcctggtatatcatcaaagcctatcgcggtagagcagatggctgaggaagtgtgggattacgttttcaaacggagtgatagggttgaaagcgatattcccagcgtcgatcttgaggccatgaggaacgaattctcatactggtacccgctcgatgttcgagtttctggcaaagatttggtcaacaaccatctgatgttctgtctctaccatcacctggctttgtggggtgagcccccacgcggcatcagactcaatggtcatctcatgctcaatggcgagaagatggctaagtctactggaaatttccttaccttgaaagacgcagttaagaagtatggtgctgatgccacgagaatctctctggcggatggtggtgacggcatcgaggatgccaatctcgaagagtccgtggcgaacgcgacaatcctgcgtctatatgagctcagaaagtggtgccaagagaccgtggaggactctactctcaggaccggtgaattcaatcttttcgacaaactcttctcgaatgagctcaacatcctggtcgcccaaacgaagcagcactacgacgacacatcattcaaactcgcactcaagtcgggtttctatgactttaccgcttccagagattggtatcgcgacattacaaaggccgttggcgtgactatgcatcatgacctggtcaagcgttatgttgagttacaggcacttcttctcactcctattgctccccacttcagtgaatatgtttaccgtgaagtcttgaagcactccggtagcgtccacaatgctctctggcctgaagttcccgaagcggatactgtgttaagtgccacattcaactacatttcaagcgtcacgtataacatcctaagtgcggaaggtctccaatcaaagaagctggccaaaggaaagaccttgacttatgacacgaaggaaccaaagcgactcaccatctctgtcgcgacttccttccctgcatggcaagaaaatgctattggtcttatggaccaggagtaccaaaagagtggcacgatcgataccaagagtattcttaagagtattgacaagaaagacatgaagaaggtcatgccattcgttcagcacctcaagaggcgtatagattccggagagaaggcagcggatgtctttgctcttcgtctacctttcgatgaggctgctaccttgagggagattgtgccgcgactgaagctcacagttcagaaacttgagtctgttgaaatcgtctctgcggagggcgaagcggagggtaaagtggccactcccggaaatcctacttttgtctttgagaacataaaatag

SEQ ID NO: 39077 - protein, 1084 aa, Muscodor strobelii
  misc_feature: SGI Peptide ID NO. 573589
  misc_feature (815)..(951): Pfam Id: PF08264 Pfam Desc: Anticodon-binding domain
  misc_feature (30)..(96): Pfam Id: PF00133 Pfam Desc: tRNA synthetases class I (I, L, M and V)
  misc_feature (730)..(757): Pfam Id: PF01406 Pfam Desc: tRNA synthetases class I (C) catalytic domain
  misc_feature (730)..(763): Pfam Id: PF09334 Pfam Desc: tRNA synthetases class I (M)
  misc_feature (14)..(1084): NCBI GI: 189200184 Blast Desc: leucyl-tRNA synthetase [Pyrenophora tritici-repentis Pt-1C-BFP] gi|187983528|gb|EDU49016.1| leucyl-tRNA synthetase [Pyrenophora tritici-repentis Pt-1C-BFP]
  misc_feature (14)..(1084): NCBI GI: 169609124 Blast Desc: SNOG_07648 [Phaeosphaeria nodorum SN15] gi|111063994|gb|EAT85114.1| SNOG_07648 [Phaeosphaeria nodorum SN15]
  misc_feature (2)..(1084): NCBI GI: 154291650 Blast Desc: BC1G_15093 [Botryotinia fuckeliana B05.10] gi|150846674|gb|EDN21867.1| BC1G_15093 [Botryotinia fuckeliana B05.10]
  misc_feature (6)..(1083): NCBI GI: 225683976 Blast Desc: leucyl-tRNA synthetase [Paracoccidioides brasiliensis Pb03]
  misc_feature (6)..(1083): NCBI GI: 85110062 Blast Desc: NCU09463 [Neurospora crassa OR74A] gi|135140|sp|P10857.2|SYLC_NEUCR RecName: Full=Leucyl-tRNA synthetase, cytoplasmic; AltName: Full=Leucine--tRNA ligase;
  misc_feature (6)..(1083): NCBI GI: 240280549 Blast Desc: leucyl-tRNA synthetase [Ajellomyces capsulatus H143]
  misc_feature (1)..(1084): NCBI GI: 46123263 Blast Desc: FG06009.1 [Gibberella zeae PH-1]
  misc_feature (6)..(1083): NCBI GI: 225560899 Blast Desc: leucyl-tRNA synthetase [Ajellomyces capsulatus G186AR]
  misc_feature (1)..(1084): NCBI GI: 256732550 Blast Desc: NECHADRAFT_68206 [Nectria haematococca mpVI 77-13-4]
  misc_feature (7)..(1083): NCBI GI: 70992585 Blast Desc: leucyl-tRNA synthetase [Aspergillus fumigatus Af293] gi|66848774|gb|EAL89103.1| leucyl-tRNA synthetase [Aspergillus fumigatus Af293] gi|159124712|gb|EDP49830.1| leucyl-tRNA A1163]
  misc_feature (6)..(1083): SWISSPROT Homolog: EC 6.1.1.4 Leucine--tRNA ligase
MATTDSTATKAAPKMENTEKRDTLIADELRYQQEWDAAKLFETDAPGPNEPKQPKFFSTMAYPYMNGVLHAGHAFTWSKQEFMTGYARMKGERTLYPQGYHLTGMPIKAAADKLAREIELFGQNFDNIPAPDLQQLSLDKEPKEAGAAKTDMSKFAGSKSKAVAKTGNVKYQYEIMLSLGIPREEIHLFANPEHWGRVFPEKCKEDLRSIGSRIDWRRSMVTTPANPFYDSFVRWQMNRLKSLNKIKFGKRFTVYSPKDGQACLDHDRSAGEGIAVQEYVALKLKTLEWSEKAKGIIGDKIPADANVFFIAATLRPETMYGQTCCFIGPTVAYGIFRVPKEDGKDEYYFCSDRAARNMAYQGIFPWGEYQQVVELVGSDVVGTLVNGPLSVHDKGIYILPMATVKPTKGTGVVTCVPSDSPDDYATVLDLTKKSEFYGIKKEWVDKEILPIIKTPSSDLIAKYLYETMKISSPKDAKQLAEAKEQAYKEGFYQGTMLFGEFKGKSVQEAKPLVRQQLIDAGLAFNYGEPDGQVISRSGDECVAAYLDQWYFNYGTAANGGDQEWYEAAIGAIESGRTNTFYPEGKHAMTQALNWLAAWACSRSFGLGTKLPWDSTQLVESLSDSSVYMAYYTVAHYLHNDIYGETPGISSKPIAVEQMAEEVWDYVFKRSDRVESDIPSVDLEAMRNEFSYWYPLDVRVSGKDLVNNHLMFCLYHHLALWGEPPRGIRLNGHLMLNGEKMAKSTGNFLTLKDAVKKYGADATRISLADGGDGIEDANLEESVANATILRLYELRKWCQETVEDSTLRTGEFNLFDKLFSNELNILVAQTKQHYDDTSFKLALKSGFYDFTASRDWYRDITKAVGVTMHHDLVKRYVELQALLLTPIAPHFSEYVYREVLKHSGSVHNALWPEVPEADTVLSATFNYISSVTYNILSAEGLQSKKLAKGKTLTYDTKEPKRLTISVATSFPAWQENAIGLMDQEYQKSGTIDTKSILKSIDKKDMKKVMPFVQHLKRRIDSGEKAADVFALRLPFDEAATLREIVPRLKLTVQKLESVEIVSAEGEAEGKVATPGNPTFVFENIK

SEQ ID NO: 39078 - DNA, 4359 bp, Muscodor strobelii
  misc_feature: SGI EST ID NO. CUFF.94008.0
  misc_feature: Variant of the nucleotide sequence at SEQ ID NO 39076
tgggcaaacactgccccaccatcccacctttggagtcataacgttttttcgcgtcgccgttgactcaacgctccaattccgatcgcaaagacagacttcgacagtcatcgtttgggtaacctgctgtctggctgcggcgacaattcaacgcatcttcgttctacccgagaggactcgcgacatcatggcgactaccgactcaacggccaccaaggcggcgcccaagatggaaaataccgagaagcgtgacaccctcatcgccgacgagctgcgctaccagcaggaatgggacgcggccaagctcttcgagaccgacgcaccgggccccaacgaacccaagcagcccaaattcttctctaccatggcctatccctacatgaacggcgtcctccatgccggccacgccttcacatggagcaagcaggagttcatgacgggatatgcccgcatgaaaggcgaaaggaccctctacccccagggttaccatctgactggcatgcccatcaaggctgccgccgacaagttggcacgcgaaatcgagttatttggccagaacttcgacaatattcccgccccagacctccaacagctgtctctcgacaaggaaccgaaagaggccggggccgccaagactgatatgagcaagtttgccggcagtaagagcaaagctgttgctaagactggcaatgtcaagtatcaatatgagatcatgctgtctctgggcataccgcgcgaagagatccacctttttgcgaaccccgaacattggggccgtgttttccccgagaaatgcaaggaggacctccgaagcatcggctctcgtatcgactggcgccgatctatggtgacaactccggcaaacccattctatgactcgttcgtccgatggcagatgaaccgtctgaaaagcttaaacaaaatcaaatttggcaaacgcttcactgtctacagtcctaaagatggccaagcttgcttagatcatgaccggagcgctggtgaaggcatcgctgtccaagaatatgtcgccttgaaactgaagaccttggagtggtcagaaaaggccaagggaatcatcggtgataagatccctgctgatgccaatgtgttcttcattgctgccactctccgaccggagactatgtacggtcaaacatgctgctttattgggcccacagtcgcgtatggcatcttccgcgtgccgaaagaggatggaaaggacgagtactacttctgcagcgatcgggccgcccggaacatggcgtaccaaggtatcttcccctggggcgagtaccagcaagtcgtcgagcttgtcgggtcagacgttgtcggcactctcgtaaatggccccctttctgttcacgataagggaatctacatcctccccatggcaactgtgaagccgacgaagggaactggtgtcgtcacgtgtgtgccctccgacagtcccgacgactatgcgactgttttggacctcactaagaaatccgaattctacggcatcaagaaggaatgggtagacaaagagattttgcctatcattaaaacgccgagctcggatcttatcgcaaaatatctatacgagactatgaagataagctcgcctaaggacgctaagcagctggctgaggcaaaagagcaagcatataaagaaggtttctaccaaggcaccatgctcttcggcgaattcaagggcaagtcggttcaagaggcgaagcctctggtcaggcagcagctcatagacgcgggtctggcgttcaactacggtgagccagatgggcaggtcatcagtagatcaggtgatgagtgcgttgcagcatatcttgatcaatggtacttcaattatggtaccgctgccaatggcggcgaccaggagtggtacgaggctgccattggtgcaattgaatcagggcggacaaacaccttttaccctgagggaaagcatgcgatgacgcaagctctgaattggctcgccgcatgggcctgcagtcgctctttcggccttggaacaaaactgccatgggactcgacgcagcttgtagagagtttatcagacagcagtgtctacatggcatattacacagttgctcactatttgcataatgatatatatggcgagacgcctggtatatcatcaaagcctatcgcggtagagcagatggctgaggaagtgtgggattacgttttcaaacggagtgatagggttgaaagcgatattcccagcgtcgatcttgaggccatgaggaacgaattctcatactggtacccgctcgatgttcgagtttctggcaaagatttggtcaacaaccatctgatgttctgtctctaccatcacctggctttgtggggtgagcccccacgcggcatcagactcaatggtcatctcatgctcaatggcgagaagatggctaagtctactggaaatttccttaccttgaaagacgcagttaagaagtatggtgctgatgccacgagaatctctctggcggatggtggtgacggcatcgaggatgccaatctcgaagagtccgtggcgaacgcgacaatcctgcgtctatatgagctcagaaagtggtgccaagagaccgtggaggactctactctcaggaccggtgaattcaatcttttcgacaaactcttctcgaatgagctcaacatcctggtcgcccaaacgaagcagcactacgacgacacatcattcaaactcgcactcaagtcgggtttctatgactttaccgcttccagagattggtatcgcgacattacaaaggccgttggcgtgactatgcatcatgacctggtcaagcgttatgttgagttacaggcacttcttctcactcctattgctccccacttcagtgaatatgtttaccgtgaagtcttgaagcactccggtagcgtccacaatgctctctggcctgaagttcccgaagcggatactgtgttaagtgccacattcaactacatttcaagcgtcacgtataacatcctaagtgcggaaggtctccaatcaaagaagctggccaaaggaaagaccttgacttatgacacgaaggaaccaaagcgactcaccatctctgtcgcgacttccttccctgcatggcaagaaaatgctattggtcttatggaccaggagtaccaaaagagtggcacgatcgataccaagagtattcttaagagtattgacaagaaagacatgaagaaggtcatgccattcgttcagcacctcaagaggcgtatagattccggagagaaggcagcggatgtctttgctcttcgtctacctttcgatgaggctgctaccttgagggagattgtgccgcgactgaagctcacagttcagaaacttgagtctgttgaaatcgtctctgcggagggcgaagcggagggtaaagtggccactcccggaaatcctacttttgtctttgagaacataaaatagatatagactagcgaggtgtataatgagggatattgcggcgtgggagatgagaccgaccttccatgttggatgttctctaccctgtaacgcgaggactttgcgacgatcgatacacaataaatgagaaaaatgtatccaactgtacttgaatggagtcgaaaacacacacatcatgtgtcagtggcaactgccaatgagttaatcgttaattgtgttttattccttaacacgaaattcgtgcgaaatgtgtgcatgcccagaaggagcagaaacacctcacgtgctgattcactgaccgcagagagctcagaggtgcacaatacattgagagccatgcatagggtactggggcaggtgcaggtggcatatatagatgtttaatgagctacattttaaaatcaagctgagtcctcgtggctcagcggtgtaatgcgctgtacacattgtcgtcctcctcgctctaggcaattgcacaattgcaggggtcaagagggcctcgtttcgaggcagacgtgaggcacattgcaccacttttttttttcaattgtttttattgtgcttgcaatttttattcgcttgtttgtctgtttattcacccatgctttatggataagtccagcacactgtgttctggtcgaatgagtattgggaaggagcgttgcaggtatccgaccctcgtctcgtatacagttcatgacatacaacaagtgcagtggatgagatacaggtgacgatacacagtacctaataaccagttgcacaggtagtgtctgcaagccgtatatcttacgtttctacgtgaagctacttcgaacatttatgtcccgttatggatatcttctatcctagccatatcattattccatgtaactaatccattcgcattattattttgtgccgattacggaatattcgagaac

SEQ ID NO: 39079 - DNA, 1365 bp, Muscodor strobelii
  misc_feature: SGI cDNA ID NO. 573590
  misc_feature: Elevated expression when VOC is produced
  misc_feature: Encodes the peptide sequence at SEQ ID NO 39080
atggctgagccctcactttgcctcagggggcgaacatatgatcgagcctccaattcctggacgggaagtgtgaactgccatggcctgatggtcttgacctggtccaaaggggcgaagcaatgggaacagactcgaatccgacaccagactgccgagagcggagatccaaaacctcttgagtcattgaattctgcagatgtaactattttcgtctctccaaattctgtctcctgttgcttcgaatgtacgaattatcttcgacacttgtttgagttcatcccccaatggtgggagcctgcaatacttgatagcaatggcgtattttgtcaccaagatgagtgtgacgactcaggaaagctcactacgaaaagcacgttcgtccgattattgatccagcatttcttcaattacgataagcctcatgcagagataaaacacaaatgggaggacatcattctcttcacgcactggctgaaagataccaacaagactagaatgtactttctcggaacagactccgaatttttggaacgagtgctacccatgatactctcccgaatacaggacggtccactttgcgatccgttatggatgtatccgatcattctcaaagactacataaacttgcaacacactgcatgctatgcaattcgtgatctcactgagctagaggagcaaaaggcagagctaccgcacactcggaagtcaaaagttggatacgcgcggctgcatagaatcgcaagattggctcaggtggtgggtgagattctcgcagttaacatcaagacgcttgagtacatagtgaactgtcacgaagaattcatgaagcagagggagcactgggcctctgatacggatgaagactcggccaagtcgtgggatcctgcagatgtagctaccgtacgaaggatacatcagcagctccgttgtttcgcccacgtggtctttagtattcgctgtcgtgctatctcataccttgacagcatgcgcaacgagatccagctcgttttcaacgtcgtctctcaagacgaagcacgggcctcggtggctattgcaagggctacaagagcggatagtcagacgatgaaggtcacttcattcattgctttggttttcctcccgccgacttttatctctgcgatctttgacacgagcttcttcagttttgggatcgatgcgagatcgtgggaagtctcggagaaattctgggtgtactgggtagttaccattcccgtcacagtagtatgcctgctcgtatggtatgtagtgtttttccgccgcgacgacatctttaccaaacgtttggtaagcgacgccaatgattctgacatgcctgaattgggaaaattggacagcattgtttag

SEQ ID NO: 39080 - protein, 454 aa, Muscodor strobelii
  misc_feature: SGI Peptide ID NO. 573590
  misc_feature (25)..(422): NCBI GI: 46137951 Blast Desc: FG10490.1 [Gibberella zeae PH-1]
  misc_feature (22)..(421): NCBI GI: 256734930 Blast Desc: NECHADRAFT_75673 [Nectria haematococca mpVI 77-13-4]
  misc_feature (88)..(420): NCBI GI: 255935275 Blast Desc: Pc13g02230 [Penicillium chrysogenum Wisconsin 54-1255] gi|211583284|emb|CAP91292.1| Pc13g02230 [Penicillium chrysogenum Wisconsin 54-1255]
  misc_feature (25)..(421): NCBI GI: 261355101 Blast Desc: conserved [Verticillium albo-atrum VaMs.102]
  misc_feature (96)..(420): NCBI GI: 157382494 Blast Desc: [Penicillium lilacinoechinulatum]
  misc_feature (96)..(420): NCBI GI: 145602189 Blast Desc: MGG_05123 [Magnaporthe grisea 70-15] gi|145010621|gb|EDJ95277.1| MGG_05123 [Magnaporthe grisea 70-15]
  misc_feature (93)..(420): NCBI GI: 225679451 Blast Desc: conserved [Paracoccidioides brasiliensis Pb03]
  misc_feature (92)..(420): NCBI GI: 119479373 Blast Desc: NFIA_077580 [Neosartorya fischeri NRRL 181] gi|119407869|gb|EAW17818.1| NFIA_077580 [Neosartorya fischeri NRRL 181]
  misc_feature (143)..(420): NCBI GI: 238841879 Blast Desc: conserved [Microsporum canis CBS 113480]
  misc_feature (102)..(430): NCBI GI: 171695844 Blast Desc: protein product [Podospora anserina] gi|170948164|emb|CAP60328.1| protein product [Podospora anserina]
  misc_feature: Useful for introducing or modulating the production of volatile compounds
MAEPSLCLRGRTYDRASNSWTGSVNCHGLMVLTWSKGAKQWEQTRIRHQTAESGDPKPLESLNSADVTIFVSPNSVSCCFECTNYLRHLFEFIPQWWEPAILDSNGVFCHQDECDDSGKLTTKSTFVRLLIQHFFNYDKPHAEIKHKWEDIILFTHWLKDTNKTRMYFLGTDSEFLERVLPMILSRIQDGPLCDPLWMYPIILKDYINLQHTACYAIRDLTELEEQKAELPHTRKSKVGYARLHRIARLAQVVGEILAVNIKTLEYIVNCHEEFMKQREHWASDTDEDSAKSWDPADVATVRRIHQQLRCFAHVVFSIRCRAISYLDSMRNEIQLVFNVVSQDEARASVAIARATRADSQTMKVTSFIALVFLPPTFISAIFDTSFFSFGIDARSWEVSEKFWVYWVVTIPVTVVCLLVWYVVFFRRDDIFTKRLVSDANDSDMPELGKLDSIV

SEQ ID NO: 39081 - DNA, 1852 bp, Muscodor strobelii
  misc_feature: SGI EST ID NO. CUFF.94011.0
  misc_feature: Variant of the nucleotide sequence at SEQ ID NO 39079
tagaaatcgggcaactttgctgcatgtcagcacggaagatggaggctgtgcaatgcaacgcaaacagtctgttcgagttgatttgctgctcaagttctgcctcacgaaagtcctaacgtgggcaaactaggatatcgatgtgaggctcgaggccgtcgctcatacatatatgaaagtggagctcgtaccacgaaaaagaagagaggatgtagcttagcatcgtctttttaacctcttcatgtaggacagcacttgcatgatggctgagccctcactttgcctcagggggcgaacatatgatcgagcctccaattcctggacgggaagtgtgaactgccatggcctgatggtcttgacctggtccaaaggggcgaagcaatgggaacagactcgaatccgacaccagactgccgagagcggagatccaaaacctcttgagtcattgaattctgcagatgtaactattttcgtctctccaaattctgtctcctgttgcttcgaatgtacgaattatcttcgacacttgtttgagttcatcccccaatggtgggagcctgcaatacttgatagcaatggcgtattttgtcaccaagatgagtgtgacgactcaggaaagctcactacgaaaagcacgttcgtccgattattgatccagcatttcttcaattacgataagcctcatgcagagataaaacacaaatgggaggacatcattctcttcacgcactggctgaaagataccaacaagactagaatgtactttctcggaacagactccgaatttttggaacgagtgctacccatgatactctcccgaatacaggacggtccactttgcgatccgttatggatgtatccgatcattctcaaagactacataaacttgcaacacactgcatgctatgcaattcgtgatctcactgagctagaggagcaaaaggcagagctaccgcacactcggaagtcaaaagttggatacgcgcggctgcatagaatcgcaagattggctcaggtggtgggtgagattctcgcagttaacatcaagacgcttgagtacatagtgaactgtcacgaagaattcatgaagcagagggagcactgggcctctgatacggatgaagactcggccaagtcgtgggatcctgcagatgtagctaccgtacgaaggatacatcagcagctccgttgtttcgcccacgtggtctttagtattcgctgtcgtgctatctcataccttgacagcatgcgcaacgagatccagctcgttttcaacgtcgtctctcaagacgaagcacgggcctcggtggctattgcaagggctacaagagcggatagtcagacgatgaaggtcacttcattcattgctttggttttcctcccgccgacttttatctctgcgatctttgacacgagcttcttcagttttgggatcgatgcgagatcgtgggaagtctcggagaaattctgggtgtactgggtagttaccattcccgtcacagtagtatgcctgctcgtatggtatgtagtgtttttccgccgcgacgacatctttaccaaacgtttggtaagcgacgccaatgattctgacatgcctgaattgggaaaattggacagcattgtttaggtgataaggagatacccttgtttttgaaatttggtttctagggggtcagatactgcagcggatattgacgactctctagccagtcttttggaggagggtcatgatgatttgacggattttacgaattacgaaggtgttttaacttgatctgttgttattattagtgtaccaatgaggctactttttgtctatgattggagactgctatgtgaagagacaaagcctaag

SEQ ID NO: 39082 - DNA, 1797 bp, Muscodor strobelii
  misc_feature: SGI cDNA ID NO. 573591
  misc_feature: Elevated expression when VOC is produced
  misc_feature: Encodes the peptide sequence at SEQ ID NO 39083
atgggctccagcgatcaaagagggccaaactactcaacaccacaatggtggaaggaagctgtcatctatcagatctatccctcatcatttcaatcacacccaggcgcaacaacaggatggggctcaatcaaaggcatcacgtcaagacttgactacatcaaatctcttggagccaatatcgtgtggtcctcgccttacttcaagtcaccgcaggcggacatgggctatgatattgcagactacaaggagatcgatagtcgctatggtacacttgacgacgttgacaatcttataacagagctccagaagcgcgacatgaagcttgttgtcgatcttgtagtcaatcacactagcaacgaacatgcatggttccttgagtcgcggagcagcaaggacaatcccaagcgcaattggtatcattggagaaaaccaagccgagttgtggatggcaagcctgaaccacccaacaattgggcgcaaattcttggagaggctaactctgcctggacgtacgacgaggtcactggcgaatattatctctctctctttacacctgagcagccagatctcaattgggagaaccctgaagttcgcgatgctgtgtgggacgtcatgcacttctggctgaagcgaggcgcttccggctttcggctcgatgtcattaacttgatctcaaaagtaccaggttaccccgaggcagacattgtcctagacccaaaagatcacaagtatcagcctgctctaaagtacttcgtgaacggtcccaagcttcatgactatcttcacgagatgtacacagaggtactgagcaagtatgacgccatcactgtaggagagatgcccggcgttagcgatgaaaatgaaattctcagaactgtcggtgctcaagctggagagctacgcatgatcttcatatttgatcttgtcgatatcgacaagcgagctgtcagaatggcgctgaaaccatgggatctgaaagaaatgaaacatatcatcactcgttggcagaagatcatgattgataaaaacggctggaactccgttttcattgagaaccatgacaatcctcgctcggtctcacggtataccgatgacagcgatgagtaccgccaccttggtgcgaagctcttggcactgatgcaaacgactctcggtggtacgttgttcgtgtatcaaggcgaggagcttggtttacgcaacctacctaaagaaggggacatcgaccaagagtacaaggatattgagacagtgaattattggaacaaggtcaagaagatatacgccaatgaccccgagcagctacagcacggccgtgcaatcattgaaatgaaagcccgcgatcattcgcgaacaccgatgcagtgggatgcgtcggcgaacgccgggttttgtgacgcaaacgtgacaccgtggatgaggatcaacgatgactacaaaactatcaacgccgaagcccaaatgaaagcagatgactcgaaagacgaatcggtgtggcagttctggcaacatagtattcagcgccgcaaggatcattctgcagttttcgtatacggtgactttgaggagctcgagtctgaacacccgaatgtatactcatacctaagaactggaagcacaggtgagaaatggctcgttgtcctcaatttcttcggtcgacaagtagagtggcatgtccctgagaaattgaagattcaacaatgggtttgtggcaattataaaaaaggcgaggttgcaaaaccactcactggtatggtaccaatgaaaccctgggaagggcttctcgctaagtgcgtctga

SEQ ID NO: 39083 - protein, 598 aa, Muscodor strobelii
  misc_feature: SGI Peptide ID NO. 573591
  misc_feature (24)..(450): Pfam Id: PF00128 Pfam Desc: Alpha amylase, catalytic domain
  misc_feature (10)..(597): NCBI GI: 145248515 Blast Desc: An13g03710 [Aspergillus niger] gi|134081261|emb|CAK41767.1| protein product [Aspergillus niger]
  misc_feature (39)..(595): NCBI GI: 189205875 Blast Desc: alpha-glucosidase [Pyrenophora tritici-repentis Pt-1C-BFP] gi|187975365|gb|EDU41991.1| alpha-glucosidase [Pyrenophora tritici-repentis Pt-1C-BFP]
  misc_feature (15)..(595): NCBI GI: 166797275 Blast Desc: maltase MLT1 [Gibberella moniliformis]
  misc_feature (16)..(597): NCBI GI: 189192418 Blast Desc: alpha-glucosidase [Pyrenophora tritici-repentis Pt-1C-BFP] gi|187974154|gb|EDU41653.1| alpha-glucosidase [Pyrenophora tritici-repentis Pt-1C-BFP]
  misc_feature (15)..(594): NCBI GI: 238507794 Blast Desc: alpha-amylase, [Aspergillus flavus NRRL3357] gi|220688617|gb|EED44969.1| alpha-amylase, [Aspergillus flavus NRRL3357]
  misc_feature (15)..(594): NCBI GI: 169784966 Blast Desc: [Aspergillus oryzae RIB40] gi|83775691|dbj|BAE65811.1| protein product [Aspergillus oryzae]
  misc_feature (1)..(563): NCBI GI: 256735064 Blast Desc: glycoside hydrolase family 13 [Nectria haematococca mpVI 77-13-4]
  misc_feature (4)..(593): NCBI GI: 261356246 Blast Desc: oligo-1,6-glucosidase [Verticillium albo-atrum VaMs.102]
  misc_feature (9)..(594): NCBI GI: 256729018 Blast Desc: NECHADRAFT_40401 [Nectria haematococca mpVI 77-13-4]
  misc_feature (15)..(423): NCBI GI: 169611424 Blast Desc: SNOG_08825 [Phaeosphaeria nodorum SN15] gi|160702287|gb|EAT83993.2| SNOG_08825 [Phaeosphaeria nodorum SN15]
  misc_feature (14)..(597): SWISSPROT Homolog: EC 3.2.1.20 Alpha-glucosidase
  misc_feature: Useful for introducing or modulating the production of volatile compounds
MGSSDQRGPNYSTPQWWKEAVIYQIYPSSFQSHPGATTGWGSIKGITSRLDYIKSLGANIVWSSPYFKSPQADMGYDIADYKEIDSRYGTLDDVDNLITELQKRDMKLVVDLVVNHTSNEHAWFLESRSSKDNPKRNWYHWRKPSRVVDGKPEPPNNWAQILGEANSAWTYDEVTGEYYLSLFTPEQPDLNWENPEVRDAVWDVMHFWLKRGASGFRLDVINLISKVPGYPEADIVLDPKDHKYQPALKYFVNGPKLHDYLHEMYTEVLSKYDAITVGEMPGVSDENEILRTVGAQAGELRMIFIFDLVDIDKRAVRMALKPWDLKEMKHIITRWQKIMIDKNGWNSVFIENHDNPRSVSRYTDDSDEYRHLGAKLLALMQTTLGGTLFVYQGEELGLRNLPKEGDIDQEYKDIETVNYWNKVKKIYANDPEQLQHGRAIIEMKARDHSRTPMQWDASANAGFCDANVTPWMRINDDYKTINAEAQMKADDSKDESVWQFWQHSIQRRKDHSAVFVYGDFEELESEHPNVYSYLRTGSTGEKWLVVLNFFGRQVEWHVPEKLKIQQWVCGNYKKGEVAKPLTGMVPMKPWEGLLAKCV

SEQ ID NO: 39084 - DNA, 2293 bp, Muscodor strobelii
  misc_feature: SGI EST ID NO. CUFF.94016.0
  misc_feature: Variant of the nucleotide sequence at SEQ ID NO 39082
cggaaatgacagtgaccactacttatctctcatacagtgactgaatcactgtttgtgttctgattaagaacatcgctcatctgcagcaatacgcggtgacgtcaaatcgtgtttcgtgggatccaatgaagtggcttcttccccgcttcgactatagacaagccatcactgctgcaggaatgaatgcatgcaaggtgcactgccctgtctactcactctcgcgacgctatagtgactccacttgatgcggcgactcatgtttgcacctcgttgacgttaataagagctcgagaatttgagatttcaccattgtcgagccattggtgtgtctaagcgtatgactgatcggctcaaattgtttcgactctaattactacggacctcacgattcatcatttccaaaatgggctccagcgatcaaagagggccaaactactcaacaccacaatggtggaaggaagctgtcatctatcagatctatccctcatcatttcaatcacacccaggcgcaacaacaggatggggctcaatcaaaggcatcacgtcaagacttgactacatcaaatctcttggagccaatatcgtgtggtcctcgccttacttcaagtcaccgcaggcggacatgggctatgatattgcagactacaaggagatcgatagtcgctatggtacacttgacgacgttgacaatcttataacagagctccagaagcgcgacatgaagcttgttgtcgatcttgtagtcaatcacactagcaacgaacatgcatggttccttgagtcgcggagcagcaaggacaatcccaagcgcaattggtatcattggagaaaaccaagccgagttgtggatggcaagcctgaaccacccaacaattgggcgcaaattcttggagaggctaactctgcctggacgtacgacgaggtcactggcgaatattatctctctctctttacacctgagcagccagatctcaattgggagaaccctgaagttcgcgatgctgtgtgggacgtcatgcacttctggctgaagcgaggcgcttccggctttcggctcgatgtcattaacttgatctcaaaagtaccaggttaccccgaggcagacattgtcctagacccaaaagatcacaagtatcagcctgctctaaagtacttcgtgaacggtcccaagcttcatgactatcttcacgagatgtacacagaggtactgagcaagtatgacgccatcactgtaggagagatgcccggcgttagcgatgaaaatgaaattctcagaactgtcggtgctcaagctggagagctacgcatgatcttcatatttgatcttgtcgatatcgacaagcgagctgtcagaatggcgctgaaaccatgggatctgaaagaaatgaaacatatcatcactcgttggcagaagatcatgattgataaaaacggctggaactccgttttcattgagaaccatgacaatcctcgctcggtctcacggtataccgatgacagcgatgagtaccgccaccttggtgcgaagctcttggcactgatgcaaacgactctcggtggtacgttgttcgtgtatcaaggcgaggagcttggtttacgcaacctacctaaagaaggggacatcgaccaagagtacaaggatattgagacagtgaattattggaacaaggtcaagaagatatacgccaatgaccccgagcagctacagcacggccgtgcaatcattgaaatgaaagcccgcgatcattcgcgaacaccgatgcagtgggatgcgtcggcgaacgccgggttttgtgacgcaaacgtgacaccgtggatgaggatcaacgatgactacaaaactatcaacgccgaagcccaaatgaaagcagatgactcgaaagacgaatcggtgtggcagttctggcaacatagtattcagcgccgcaaggatcattctgcagttttcgtatacggtgactttgaggagctcgagtctgaacacccgaatgtatactcatacctaagaactggaagcacaggtgagaaatggctcgttgtcctcaatttcttcggtcgacaagtagagtggcatgtccctgagaaattgaagattcaacaatgggtttgtggcaattataaaaaaggcgaggttgcaaaaccactcactggtatggtaccaatgaaaccctgggaagggcttctcgctaagtgcgtctgatcatgttgtctgttgaaaagacttagtatgtagattttagtaatgagattgcgatgattaattatagatgaagaaggctagcgagtgtgctct

SEQ ID NO: 39085 - DNA, 1068 bp, Muscodor strobelii
  misc_feature: SGI cDNA ID NO. 573592
  misc_feature: Encodes the peptide sequence at SEQ ID NO 39086
atggacgatcaaggaagagtccatatgatccgaagaaacttgtgtggtgcactgcgtgtgttacgctcagattctgaggagcgagtattttggatcgatgcgatatccatcaatcagcaagattatctggaaagagctgcgcaggtcgccttgatgccaaagatatatgctgcatcgtggcagacgaccatatggttggggctggacttatctgtagaggcactgacgcagctccagaatctggccaattggacaaacatagatgaacgaccaatcatctcctaccgagaggaagtctggagggagctgggccaactttattcgaatccctggattttccgtgtctggataatccaagagatagccatggcacgaaacatcgtaatgatcctaaacggagagtctaagtcatgggagtcattcatccaagcctcacgcaatgctctcaccaaattcgcagcgttccaatccgtatttgatccagctagtgccttgcaacttgacttcatcaggacagcatacatcactagtggcccatcaactgacatcctgagggctttggcacttgggaggaaatcactggctactttggattccgacaaggtatacgccctccttggtctctcagtcgagaggttcgagatcaattaccgcgagtccaccgtccagacctatatgcgactggcgacaatgatcgttaaccagggccatctgccctcctgggttccagattgggaagtccgccagggtccatcgccactctatttaatccgcgaaggaccaggagcgtggaatgcctcgagaggcacagaagcgtatacaggattgagcggtattggacgccatctccatttgaacggctacatcgtcgactccctggatcacataacgaatctgtttttggaggagatgccattctcgggccctccaaagtggaggacggcgctccacaacgcaaccagaccatcgtgggtaaacgcgaatcgtcagaagctgctcacgatcacggttatgcgtcgtatcgtacagtggcgccggctcgccatgacgcctatatatctacgctga

SEQ ID NO: 39086 - protein, 355 aa, Muscodor strobelii
  misc_feature: SGI Peptide ID NO. 573592
  misc_feature (17)..(120): Pfam Id: PF06985 Pfam Desc: Heterokaryon incompatibility protein (HET)
  misc_feature (9)..(275): NCBI GI: 189202434 Blast Desc: conserved [Pyrenophora tritici-repentis Pt-1C-BFP] gi|187984652|gb|EDU50140.1| conserved [Pyrenophora tritici-repentis Pt-1C-BFP]
  misc_feature (10)..(296): NCBI GI: 238498684 Blast Desc: conserved [Aspergillus flavus NRRL3357] gi|220693851|gb|EED50196.1| conserved [Aspergillus flavus NRRL3357]
  misc_feature (17)..(297): NCBI GI: 119179507 Blast Desc: CIMG_08498 [Coccidioides immitis RS]
  misc_feature (3)..(283): NCBI GI: 261357884 Blast Desc: conserved [Verticillium albo-atrum VaMs.102]
  misc_feature (10)..(245): NCBI GI: 256731898 Blast Desc: NECHADRAFT_80737 [Nectria haematococca mpVI 77-13-4]
  misc_feature (4)..(293): NCBI GI: 115449831 Blast Desc: [Aspergillus terreus NIH2624] gi|114187656|gb|EAU29356.1| [Aspergillus terreus NIH2624]
  misc_feature (5)..(209): NCBI GI: 238483469 Blast Desc: conserved [Aspergillus flavus NRRL3357] gi|220701023|gb|EED57361.1| conserved [Aspergillus flavus NRRL3357]
  misc_feature (5)..(236): NCBI GI: 256721196 Blast Desc: NECHADRAFT_82325 [Nectria haematococca mpVI 77-13-4]
  misc_feature (9)..(261): NCBI GI: 169619623 Blast Desc: SNOG_13010 [Phaeosphaeria nodorum SN15] gi|111058690|gb|EAT79810.1| SNOG_13010 [Phaeosphaeria nodorum SN15]
  misc_feature (10)..(273): NCBI GI: 256722966 Blast Desc: NECHADRAFT_86875 [Nectria haematococca mpVI 77-13-4]
MDDQGRVHMIRRNLCGALRVLRSDSEERVFWIDAISINQQDYLERAAQVALMPKIYAASWQTTIWLGLDLSVEALTQLQNLANWTNIDERPIISYREEVWRELGQLYSNPWIFRVWIIQEIAMARNIVMILNGESKSWESFIQASRNALTKFAAFQSVFDPASALQLDFIRTAYITSGPSTDILRALALGRKSLATLDSDKVYALLGLSVERFEINYRESTVQTYMRLATMIVNQGHLPSWVPDWEVRQGPSPLYLIREGPGAWNASRGTEAYTGLSGIGRHLHLNGYIVDSLDHITNLFLEEMPFSGPPKWRTALHNATRPSWVNANRQKLLTITVMRRIVQWRRLAMTPIYLR

SEQ ID NO: 39087 - DNA, 1257 bp, Muscodor strobelii
  misc_feature: SGI cDNA ID NO. 573593
  misc_feature: Encodes the peptide sequence at SEQ ID NO 39088
atgtactatgatggccgctccaaattattcgccacggcagactggcagcgattattcgaacgcaatattaacaactcggcttccttaaaggagaaatttcaatcgccatctgtcgccttcgtggctatagacactgaaggatgtgacaagggcaggatgtcagtttctgaaatcggatttgctgtgtttcctgcccatcagctatgtcctagcaaatgcggaaggctgggtctccaaagtttctttgacagaaaccacatccagagctacttgttcgcaatcgatgggaagactcgccggaaacggcgcgaagagtacacattcggccatgtccagtgtgtcaggctatacgagattgattcggttcttacgcgtctcttggcatcacttcgagagcagtaccaagaaattattttgacaggatttgctctcgatttcgagcttccgtttctcgcagaaagggccaagggcatttccccttatatatcatcctggattgacgtacaagagatagtctggacgttgtgcggacaaccgaacggactaaagcctagtatgagagatggtctcctgacctgcggctatggttcggagggtctctctatgaaccgctcgaaggcacacagcgcaggcaacgatactgttcgagctctagccatcctacatgagctgcttacgcatacaattcccgaatctcctgaatcctttcgttttgggttccgccgtgtccccacccggaacgaaataatcaaacccgtccacagcctgcagccacctggaaaacagcgaccaaaatacgcgtttatggctgatgttagaatcgttggagacaaatcggacatcatacacgtggatatgctggaggaggcatttatcgaatatgaacttacaagtgtcgggacaataacggcggaacatcgtggctgggtaggactgcccagcgcagaggcgcttgcgcgtttcatcaagacggttgacggcaactggattaaagggtatgtctggaatgtgaaaccatgctgtgagatgccagcatggcgtgatcacaattcgccatcacctgcgccggcgtcggtcaaggagattgataaacacgatgcgccaaagttgggtttgaagaaatcttctctcgtagatccgcaacagttcggcgaagatgacggcggtgcatcaaatgcgttgattctcgctgtgtttcgagagttcagggcgaaatcagtagaaaatgaaaaattgaaggaaagtaagatactctag

SEQ ID NO: 39088 - protein, 418 aa, Muscodor strobelii
  misc_feature: SGI Peptide ID NO. 573593
  misc_feature (36)..(225): NCBI GI: 85096723 Blast Desc: NCU07131 [Neurospora crassa OR74A] gi|28921801|gb|EAA31078.1| [Neurospora crassa OR74A]
  misc_feature (16)..(328): NCBI GI: 169597907 Blast Desc: SNOG_01746 [Phaeosphaeria nodorum SN15] gi|160707616|gb|EAT91395.2| SNOG_01746 [Phaeosphaeria nodorum SN15]
MYYDGRSKLFATADWQRLFERNINNSASLKEKFQSPSVAFVAIDTEGCDKGRMSVSEIGFAVFPAHQLCPSKCGRLGLQSFFDRNHIQSYLFAIDGKTRRKRREEYTFGHVQCVRLYEIDSVLTRLLASLREQYQEIILTGFALDFELPFLAERAKGISPYISSWIDVQEIVWTLCGQPNGLKPSMRDGLLTCGYGSEGLSMNRSKAHSAGNDTVRALAILHELLTHTIPESPESFRFGFRRVPTRNEIIKPVHSLQPPGKQRPKYAFMADVRIVGDKSDIIHVDMLEEAFIEYELTSVGTITAEHRGWVGLPSAEALARFIKTVDGNWIKGYVWNVKPCCEMPAWRDHNSPSPAPASVKEIDKHDAPKLGLKKSSLVDPQQFGEDDGGASNALILAVFREFRAKSVENEKLKESKIL

SEQ ID NO: 39089 - DNA, 372 bp, Muscodor strobelii
  misc_feature: SGI EST ID NO. CUFF.94034.0
  misc_feature: Variant of the nucleotide sequence at SEQ ID NO 39087
ctcgatttcgagcttccgtttctcgcagaaagggccaagggcatttccccttatatatcatcctggattgacgtacaagagatagtctggacgttgtgcggacaaccgaacggactaaagcctagtatgagagatggtctcctgacctgcggctatggttcggagggtctctctatgaaccgctcgaaggcacacagcgcaggcaacgatactgttcgagctctagccatcctacatgagctgcttacgcatacaattcccgaatctcctgaatcctttcgttttgggttccgccgtgtccccacccggaacgaaataatcaaacccgtccacagcctgcagccacctggaaaacagcgaccaaaatacgcg

SEQ ID NO: 39090 - DNA, 1098 bp, Muscodor strobelii
  misc_feature: SGI cDNA ID NO. 573594
  misc_feature: Encodes the peptide sequence at SEQ ID NO 39091
atggctgctccgtcgaaccgagctgtctggcaggacgcggttggcgttccaggtgcaatccgcgaaagcccgctccctacagtcgatgagctaggcgaccacaaggttctggtcaaagtagaggcctgggctatcaatccgtgtgatcatatgctccaggacaggaatatgcctgcataccctctaatcttgggctgcgacgttgctggcacggtcgaaaccgtagtcccaggttcggctgccgcctctcagttcagtgttggagatcgcatttttgggttcactttcaacaacggcttccaggactacgtagctgtggacgacagattaatcgccaaaatacctgacggcatgccatatcgcgaagctgtcgtttttggcctctgcagtgccacttgcgctatgtttctatttgggaaagactatctccatcttgaatttccgaagttaggtgtcccaaagaatgggaagtccgttctgatctggggaggtagctctgctgtcgggagcaacgctgttcaactcgtcacggcagcagggtacgatgtgattgcgacctgctcgagccagaacttcgactatgtcaagggccttggcgctgtccaggtgttcgactataaagatcccgacgttaccaataaggtagccgctgagctcgacaaaggcgaatgtgccggtgtgtttatggcagccggacttgatgatggcaacatcgctgcatggaacgtagcggcgacgtccaaacaaaggctcaagtttgcttcgtctaacttcatcaccaatttgaatgaagtgccttcaggtgtggacgtcaaacagccagcgccagagaattttgtaccgttccccaactgctggttcgagacgaggcctgccacatttggcggatatttgcccgaagccttggcagcaggagactacaaagttgctccaccaccactagtcgtcaacaataacgggctggaaggaatacagcaggctgtcgacatcatgcgagttgtctccgataaaggactcaaagaggcactcaagggtatgaaggatggcgcgaaaaagaatggtgcatcacctgtcaaattggttgtcgagcgatcctag

SEQ ID NO: 39091 - protein, 365 aa, Muscodor strobelii
  misc_feature: SGI Peptide ID NO. 573594
  misc_feature (33)..(114): Pfam Id: PF08240 Pfam Desc: Alcohol dehydrogenase GroES-like domain
  misc_feature (155)..(222): Pfam Id: PF00107 Pfam Desc: Zinc-binding dehydrogenase
  misc_feature (1)..(353): NCBI GI: 116204293 Blast Desc: CHGG_10030 [Chaetomium globosum CBS 148.51] gi|88176158|gb|EAQ83626.1| CHGG_10030 [Chaetomium globosum CBS 148.51]
  misc_feature (3)..(332): NCBI GI: 67525763 Blast Desc: AN3339.2 [Aspergillus nidulans FGSC A4] gi|40744127|gb|EAA63307.1| AN3339.2 [Aspergillus nidulans FGSC A4] gi|259485683|tpe|CBF82913.1| TPA: zinc-binding oxidoreductase
  misc_feature (6)..(339): NCBI GI: 121700466 Blast Desc: oxidoreductase, zinc-binding dehydrogenase family superfamily [Aspergillus clavatus NRRL 1] gi|119396640|gb|EAW07072.1| oxidoreductase, zinc-binding family
  misc_feature (6)..(332): NCBI GI: 115398227 Blast Desc: conserved [Aspergillus terreus NIH2624] gi|114192896|gb|EAU34596.1| conserved [Aspergillus terreus NIH2624]
  misc_feature (4)..(331): NCBI GI: 46116336 Blast Desc: FG04010.1 [Gibberella zeae PH-1]
  misc_feature (6)..(332): NCBI GI: 114327711 Blast Desc: oxidoreductase [Granulibacter bethesdensis CGDNIH1] gi|114315885|gb|ABI61945.1| oxidoreductase [Granulibacter bethesdensis CGDNIH1]
  misc_feature (20)..(332): NCBI GI: 145241714 Blast Desc: An09g01880 [Aspergillus niger] gi|134078043|emb|CAK40126.1| protein product [Aspergillus niger]
  misc_feature (3)..(339): NCBI GI: 189188774 Blast Desc: zinc-binding oxidoreductase CipB [Pyrenophora tritici-repentis Pt-1C-BFP] gi|187972332|gb|EDU39831.1| zinc-binding oxidoreductase CipB [Pyrenophora tritici-repentis
  misc_feature (3)..(330): NCBI GI: 70981714 Blast Desc: zinc-binding oxidoreductase CipB [Aspergillus fumigatus Af293] gi|66844008|gb|EAL84348.1| zinc-binding oxidoreductase CipB [Aspergillus fumigatus Af293]
  misc_feature (3)..(330): NCBI GI: 159122007 Blast Desc: zinc-binding oxidoreductase CipB [Aspergillus fumigatus A1163]
  misc_feature (33)..(237): SWISSPROT Homolog: EC 1.6.5.5 NADPH:quinone reductase
MAAPSNRAVWQDAVGVPGAIRESPLPTVDELGDHKVLVKVEAWAINPCDHMLQDRNMPAYPLILGCDVAGTVETVVPGSAAASQFSVGDRIFGFTFNNGFQDYVAVDDRLIAKIPDGMPYREAVVFGLCSATCAMFLFGKDYLHLEFPKLGVPKNGKSVLIWGGSSAVGSNAVQLVTAAGYDVIATCSSQNFDYVKGLGAVQVFDYKDPDVTNKVAAELDKGECAGVFMAAGLDDGNIAAWNVAATSKQRLKFASSNFITNLNEVPSGVDVKQPAPENFVPFPNCWFETRPATFGGYLPEALAAGDYKVAPPPLVVNNNGLEGIQQAVDIMRVVSDKGLKEALKGMKDGAKKNGASPVKLVVERS

SEQ ID NO: 39092 - DNA, 735 bp, Muscodor strobelii
  misc_feature: SGI cDNA ID NO. 573595
  misc_feature: Encodes the peptide sequence at SEQ ID NO 39093
atgaacagacagtccgcgttctcttccgcaacgactgagttcgagcagagacatactctatctgctccaagtagcgtctccgaggtcgatcaagctgtaaagagatgtctcgcgcaaggatccaaaatccttgagtgtgtctcttggaagtcgtcggcatggacaaacacgttcaagatctcgactaggaccgaagaggacgttgacatagtatatttcatgaaaacggctcaagagcggggcgatgtcatgatggaaggcgagttcaactcactcacagcaataaaccataccattccaggcctcgcacccgagacccttagctggggcaagttcgatgagtccgagacttatttcctcattatggagttcttagacatggaaacgatgcttcctgatcccatcaagttttgccacgcaatggcagagatgcacacaaggaggtgccgatacttcacgaaactgattactatattcttcgataccgacttaagtgtaaatggctcttggaaagaatacgaagatgcattcaggaccttgacaacaactactatacctagggttctagagccgttgcaaaccgatggacgtatactcaagccctgtctcgtacatggcgatctctgggaggagaacacgggcacaagaagagatactggcgagctagttctttacgacgcttccgtcataattcttgaagatatgtgctacttgaacagcaagtatggcgcctga

SEQ ID NO: 39093 - protein, 244 aa, Muscodor strobelii
  misc_feature: SGI Peptide ID NO. 573595
  misc_feature (28)..(234): NCBI GI: 261356147 Blast Desc: conserved [Verticillium albo-atrum VaMs.102]
  misc_feature (26)..(227): NCBI GI: 116206070 Blast Desc: CHGG_02328 [Chaetomium globosum CBS 148.51] gi|88182925|gb|EAQ90393.1| CHGG_02328 [Chaetomium globosum CBS 148.51]
  misc_feature (29)..(230): NCBI GI: 145228563 Blast Desc: An01g01490 [Aspergillus niger] gi|134054681|emb|CAK43522.1| protein product [Aspergillus niger]
  misc_feature (28)..(228): NCBI GI: 240110347 Blast Desc: CPC735_063790 [Coccidioides posadasii C735 delta SOWgp]
  misc_feature (28)..(228): NCBI GI: 119180471 Blast Desc: CIMG_08864 [Coccidioides immitis RS]
  misc_feature (29)..(227): NCBI GI: 258563734 Blast Desc: [Uncinocarpus reesii 1704] gi|237908119|gb|EEP82520.1| [Uncinocarpus reesii 1704]
  misc_feature (81)..(228): NCBI GI: 116202955 Blast Desc: CHGG_09362 [Chaetomium globosum CBS 148.51] gi|88177880|gb|EAQ85348.1| CHGG_09362 [Chaetomium globosum CBS 148.51]
  misc_feature (29)..(243): NCBI GI: 145256231 Blast Desc: An10g00710 [Aspergillus niger CBS 513.88] gi|134078637|emb|CAK40510.1| protein product [Aspergillus niger]
  misc_feature (40)..(234): NCBI GI: 258565153 Blast Desc: [Uncinocarpus reesii 1704] gi|237907022|gb|EEP81423.1| [Uncinocarpus reesii 1704]
  misc_feature (27)..(227): NCBI GI: 169765035 Blast Desc: [Aspergillus oryzae RIB40] gi|83764843|dbj|BAE54987.1| protein product [Aspergillus oryzae]
MNRQSAFSSATTEFEQRHTLSAPSSVSEVDQAVKRCLAQGSKILECVSWKSSAWTNTFKISTRTEEDVDIVYFMKTAQERGDVMMEGEFNSLTAINHTIPGLAPETLSWGKFDESETYFLIMEFLDMETMLPDPIKFCHAMAEMHTRRCRYFTKLITIFFDTDLSVNGSWKEYEDAFRTLTTTTIPRVLEPLQTDGRILKPCLVHGDLWEENTGTRRDTGELVLYDASVIILEDMCYLNSKYGA

SEQ ID NO: 39094 - DNA, 711 bp, Muscodor strobelii
  misc_feature: SGI EST ID NO. CUFF.94047.0
  misc_feature: Variant of the nucleotide sequence at SEQ ID NO 39092
cctacagcatagacaatatcaggatcctgcaacatctctaacgtggcttcgacgttagagattatttggacatagtaggatatctacggtaggattgtttgccgtccaaaattcctcaggctgtcgaagcttgatcagtaaggtcaacttcatgcatacctgcactgtccacggacaataatcatgaacagacagtccgcgttctcttccgcaacgactgagttcgagcagagacatactctatctgctccaagtagcgtctccgaggtcgatcaagctgtaaagagatgtctcgcgcaaggatccaaaatccttgagtgtgtctcttggaagtcgtcggcatggacaaacacgttcaagatctcgactaggaccgaagaggacgttgacatagtatatttcatgaaaacggctcaagagcggggcgatgtcatgatggaaggcgagttcaactcactcacagcaataaaccataccattccaggcctcgcacccgagacccttagctggggcaagttcgatgagtccgagacttatttcctcattatggagttcttagacatggaaacgatgcttcctgatcccatcaagttttgccacgcaatggcagagatgcacacaaggagtcagtcgccggcaggaatgtttggatttcatttgccaacttgtcagggcagacatattcaacctaatgagtgggatacgtcatgt

SEQ ID NO: 39095 - DNA, 1461 bp, Muscodor strobelii
  misc_feature: SGI cDNA ID NO. 573596
  misc_feature: Reduced expression when VOC is produced
  misc_feature: Encodes the peptide sequence at SEQ ID NO 39096
atggcggcagtcgttggtgatttcatcgcggatcattcacgattccacaacatgatagcgaccacggggctacaacacgagcatcacagccgtgactcccactataggtccgaatacaccaaccggccacacgaaatcccttcgcagacctctcgctctcctgcacaccccacacagcccaggtccgcagcactcggcacgacgccctcgaggcgatcgtgggagtacaacgagcccccttcagaacgcaacccagcagcgcccaccgacggcgcctcgcgatttccctcgccgccagattcatctgcgtctaatccgccttcggctcgtgaaacggcccgagacagcgtagatcctgccagctatatggcatcggaaccccagaactctgcgcgtgcagcagcttcgaccagcattccctccgcccgacaacaaccatcacctgaatccagcccgcctagctcctcatccgtcccgtctcccgcttacaatgcatctgctccgcagcagggccatactattgttgtgcgcgacctagctcacatacagagccttgcaagggcagatctgatgaatggtgggaatggacccggcatactcaatgatccgccgctccaggccatgaaatacgaaatcagtggcatgcctatcggagacatcatcgaaatggtagctgcactcctaacaaaaatcaccacgaccaacgaccagcaacatgacgccctacatcgaaacgctacacaccagcagaccgctgccaaccataacaacgacggctcttccatgagtccgttgagcagctccgttttagccttccacggcaagaatgtgccggctattacgatactgagctacctaagtagaattcacaagtactgtcctactacctacgaggtatttcttagcctgttagtctacttcgaccgaatgacggagagggtcaacaatttggtcatgcaagcagaggaagcgaggcggcagctccagagccaacaaccgcaatccgtgcctgctgctcccgcagacttatcgtcccctaagaagacagactctgagatgcgagatgcagacgataacgacaccgactcagacatagccgataatgaggaagaaagagaagacaacgaaggggctacaagaacacctgcggatttgcatgcaccatcagcagcaacgtattttgtcgtggacagtttcaacatacatcggttgatcattgctggcgtgacctgtgctagcaagtttttctccgacgtgttctatactaattcgagatatgctaaggttggtggcttgccgctcgctgagctcaatcatctcgaactccaatttcttctgctcaacgattttcgactctctgtgcctgtcgaagatctagaagcctacgctaccatgctggtcgagttttacgcccgtgaagtagtagctcaacgatctcggtccgcgccgacgaatgagtag

SEQ ID NO: 39096 - protein, 486 aa, Muscodor strobelii
  misc_feature: SGI Peptide ID NO. 573596
  misc_feature (218)..(452): Pfam Id: PF08613 Pfam Desc: Cyclin
  misc_feature (389)..(452): Pfam Id: PF08613 Pfam Desc: Cyclin
  misc_feature (265)..(326): Pfam Id: PF08613 Pfam Desc: Cyclin
  misc_feature (1)..(479): NCBI GI: 116200762 Blast Desc: CHGG_10926 [Chaetomium globosum CBS 148.51] gi|88175640|gb|EAQ83108.1| CHGG_10926 [Chaetomium globosum CBS 148.51]
  misc_feature (120)..(484): NCBI GI: 46122505 Blast Desc: FG05630.1 [Gibberella zeae PH-1]
  misc_feature (5)..(478): NCBI GI: 171680725 Blast Desc: protein product [Podospora anserina] gi|170939990|emb|CAP65216.1| protein product [Podospora anserina]
  misc_feature (142)..(475): NCBI GI: 256729646 Blast Desc: NECHADRAFT_46526 [Nectria haematococca mpVI 77-13-4]
  misc_feature (146)..(480): NCBI GI: 39967991 Blast Desc: MGG_02088 [Magnaporthe grisea 70-15] gi|145012967|gb|EDJ97608.1| MGG_02088 [Magnaporthe grisea 70-15]
  misc_feature (162)..(484): NCBI GI: 85089853 Blast Desc: NCU09288 [Neurospora crassa OR74A] gi|28919469|gb|EAA28904.1| NCU09288 [Neurospora crassa OR74A]
  misc_feature (143)..(482): NCBI GI: 261353914 Blast Desc: PHO85 cyclin-7 [Verticillium albo-atrum VaMs.102]
  misc_feature (1)..(485): NCBI GI: 156036262 Blast Desc: SS1G_12819 [Sclerotinia sclerotiorum 1980] gi|154698225|gb|EDN97963.1| SS1G_12819 [Sclerotinia sclerotiorum 1980]
  misc_feature (44)..(476): NCBI GI: 169765590 Blast Desc: [Aspergillus oryzae RIB40] gi|83765121|dbj|BAE55264.1| protein product [Aspergillus oryzae]
  misc_feature (44)..(476): NCBI GI: 238482155 Blast Desc: cyclin-dependent protein kinase complex component, [Aspergillus flavus NRRL3357] gi|220700366|gb|EED56704.1| cyclin-dependent protein kinase complex component, [Aspergillus
  misc_feature: Useful for introducing or modulating the production of volatile compounds
MAAVVGDFIADHSRFHNMIATTGLQHEHHSRDSHYRSEYTNRPHEIPSQTSRSPAHPTQPRSAALGTTPSRRSWEYNEPPSERNPAAPTDGASRFPSPPDSSASNPPSARETARDSVDPASYMASEPQNSARAAASTSIPSARQQPSPESSPPSSSSVPSPAYNASAPQQGHTIVVRDLAHIQSLARADLMNGGNGPGILNDPPLQAMKYEISGMPIGDIIEMVAALLTKITTTNDQQHDALHRNATHQQTAANHNNDGSSMSPLSSSVLAFHGKNVPAITILSYLSRIHKYCPTTYEVFLSLLVYFDRMTERVNNLVMQAEEARRQLQSQQPQSVPAAPADLSSPKKTDSEMRDADDNDTDSDIADNEEEREDNEGATRTPADLHAPSAATYFVVDSFNIHRLIIAGVTCASKFFSDVFYTNSRYAKVGGLPLAELNHLELQFLLLNDFRLSVPVEDLEAYATMLVEFYAREVVAQRSRSAPTNE

SEQ ID NO: 39097 - DNA, 3622 bp, Muscodor strobelii
  misc_feature: SGI EST ID NO. CUFF.94053.0
  misc_feature: Variant of the nucleotide sequence at SEQ ID NO 39095
gcctaaaagtggatttgaccacttgaacaggcatcgcagctgttgatccgtcagactagttggttgtctggactcttggttccgataggacttgcacaatcacttgttcgctggcgatgattccgcgcgactttcgcgaagagggtaatcacttgattcatggtggttcaggcacaagtacagcctcaggcggacccctttttcctgctcccgatccgcgactacgctcgtatggcccccaacatcggacggcgatccctatggagtctcctgtctttcttgtgtttgtttgtgtctgtttgcaggtgacatttggatttttcttttggggatattttctttttgatgcattaaaaaatggaggagaaccatcgccaaaagctatcagattccgatcctagctgttgataggtgtatatacagatgtcagttgtaggcgagacgcatgattggaggagataaggatgagagatgcgagcacagagtcaagagcgagagcaatcttggtacatatttgccgctgatggtagttatctgggtccaacccactggatttatgtcatacctgcgcctcacgaactaccttatggattttgctgttatgtctgcttgatttgccttgatatttagtcacggctggaatagctactgtgccttacctaactcatccgccgcccgcgtaatgactagcagtctccaagcactcgtacctgatttcatctcatccacactcagcactgtcatagtagctgctctccgtccctacatctacctatgatttcactcctctgcaacgacctacaggcatttagatagtgttcatctcttgattacatgtatgcataccggcatacactagaacacaaacacacctggattgactttaaactcatcgagcgtacacaagaatgacgacagtggtggcctgacgactctgagacacaataagtggttgtccccagacccccaaacctggtcgctgaacgccgcggcggccgccacatttcttgctacgaatccacccgaccggccgccaaactctggatttatttggctatttgactctccttctcctcccatcccccccgaaagacgctcttcccatcgacgcatcgtcgcccatcccccgaccgcacgacaccatcctgtcggctctgttgtcgacgtcgtccggaacggtgtccattgccatttctcacccgccaacactgcgataacgcgtgtcggctctctcccgcttttacacaggccaacccccacctgtgccatcatcgtcactcaatctgcacccaagacctgaaatatcggcagggtctgaattgagtagactactctcacgaccgcgaccgcgcccgcgctcgcttcctagacgcctgctctctcgtttcgcgtcgtcaacctccatcttggaatagcagattgagtgttgcattattaacactggttgaccgatccgccaccatcgtcatccagccacgcgtcgtcgtcagcttccggcgaccgcttcatctcgtcgttactttgttgtttactgtcaccactggaactggtttctagttcgtattctccaccttttcgccatcaagagtacagagatagtgctatggcggcagtcgttggtgatttcatcgcggatcattcacgattccacaacatgatagcgaccacggggctacaacacgagcatcacagccgtgactcccactataggtccgaatacaccaaccggccacacgaaatcccttcgcagacctctcgctctcctgcacaccccacacagcccaggtccgcagcactcggcacgacgccctcgaggcgatcgtgggagtacaacgagcccccttcagaacgcaacccagcagcgcccaccgacggcgcctcgcgatttccctcgccgccagattcatctgcgtctaatccgccttcggctcgtgaaacggcccgagacagcgtagatcctgccagctatatggcatcggaaccccagaactctgcgcgtgcagcagcttcgaccagcattccctccgcccgacaacaaccatcacctgaatccagcccgcctagctcctcatccgtcccgtctcccgcttacaatgcatctgctccgcagcagggccatactattgttgtgcgcgacctagctcacatacagagccttgcaagggcagatctgatgaatggtgggaatggacccggcatactcaatgatccgccgctccaggccatgaaatacgaaatcagtggcatgcctatcggagacatcatcgaaatggtagctgcactcctaacaaaaatcaccacgaccaacgaccagcaacatgacgccctacatcgaaacgctacacaccagcagaccgctgccaaccataacaacgacggctcttccatgagtccgttgagcagctccgttttagccttccacggcaagaatgtgccggctattacgatactgagctacctaagtagaattcacaagtactgtcctactacctacgaggtatttcttagcctgttagtctacttcgaccgaatgacggagagggtcaacaatttggtcatgcaagcagaggaagcgaggcggcagctccagagccaacaaccgcaatccgtgcctgctgctcccgcagacttatcgtcccctaagaagacagactctgagatgcgagatgcagacgataacgacaccgactcagacatagccgataatgaggaagaaagagaagacaacgaaggggctacaagaacacctgcggatttgcatgcaccatcagcagcaacgtattttgtcgtggacagtttcaacatacatcggttgatcattgctggcgtgacctgtgctagcaagtttttctccgacgtgttctatactaattcgagatatgctaaggttggtggcttgccgctcgctgagctcaatcatctcgaactccaatttcttctgctcaacgattttcgactctctgtgcctgtcgaagatctagaagcctacgctaccatgctggtcgagttttacgcccgtgaagtagtagctcaacgatctcggtccgcgccgacgaatgagtagataataggtgtttcaaagggctgttatcacagaccttatcaatacgagatccctaatacacggatcaaatacgtggatcataagctcccaacactagtaatagtatctaatcacgactgctcggagggtcccttgcggcttccggttcttatagaagtggaggaggttggcgacatagttttcgatcgctagttcagattgctgtggtgacaggctggtacggttgtagaatcatatttcgcgttgaattacaggggaacttagagtgggatagcggcaggtttggcgcgggaggattggtgaggtgtttttgtagagctgtcgtcatgatacccggttagaggttcctttcgggcttggaatttggcagctttgatgagaatgctactatcctcgtatttgtgtacaagactgcttgtcaaagagtgccgttgtgatcctagctgagaccgactgcaatgctttccgcctggcttgttttgttctcctcttgctgataagtcacaccacgatgacatcaacagcaacattagtagcataataatgcgtcaattaatc

SEQ ID NO: 39098 - DNA, 687 bp, Muscodor strobelii
  misc_feature: SGI cDNA ID NO. 573597
  misc_feature: Encodes the peptide sequence at SEQ ID NO 39099
atggagttcaccaacacaggtgtcttgaacgaagatggtatccacgtcgatatggacagactgaagaagggcgaggtcaacttaggtacctccatcatggctgtcacattcaaagatggtgtcattctgggtgccgactctagaaccactaccggagcctacatcgcaaatcgagttaccgataaacttacccgagtcgccgacacaatctggtgctgccgttccggttcggcagccgacacacaagccgtagcagacatcgtacagtaccagctaggtctgtttgccatgcgcaacggcaagcccccgacgacccagaccgccgcagccatcttccaggagatctgctactccaacaaggaccagctgagcgcgggtctcatcattgccggctgggacgagcgacacggaggacaggtctacgccatcccgctcggtggctctttacacaagcaggcctattctattggcggttccggctcgacttacatctacggctactgtgatgcgaactggaaagagggtatggaggaggaggacgctgtgaactttgtcaagggtgccctgcgtgaggcaatcaagtgggatggcagctctggtggtgtcatccgcatggtcgtgcttaccaagaagggggccgaccgtcatctgtacctgccagacgaggactacaaggtgaagcactag

SEQ ID NO: 39099 - protein, 228 aa, Muscodor strobelii
  misc_feature: SGI Peptide ID NO. 573597
  misc_feature (26)..(208): Pfam Id: PF00227 Pfam Desc: Proteasome A-type and B-type
  misc_feature (1)..(228): NCBI GI: 171680727 Blast Desc: protein product [Podospora anserina] gi|170939991|emb|CAP65217.1| protein product [Podospora anserina]
  misc_feature (1)..(228): NCBI GI: 154308434 Blast Desc: conserved [Botryotinia fuckeliana B05.10] gi|150852818|gb|EDN28010.1| conserved [Botryotinia fuckeliana B05.10]
  misc_feature (1)..(228): NCBI GI: 164429302 Blast Desc: proteasome component PRE3 precursor [Neurospora crassa OR74A] gi|157073426|gb|EAA28906.2| proteasome component PRE3 precursor [Neurospora crassa OR74A]
  misc_feature (18)..(228): NCBI GI: 39967987 Blast Desc: conserved [Magnaporthe grisea 70-15] gi|145012965|gb|EDJ97606.1| conserved [Magnaporthe grisea 70-15]
  misc_feature (18)..(228): NCBI GI: 256729645 Blast Desc: [Nectria haematococca mpVI 77-13-4]
  misc_feature (18)..(228): NCBI GI: 46122507 Blast Desc: FG05631.1 [Gibberella zeae PH-1]
  misc_feature (18)..(228): NCBI GI: 116200766 Blast Desc: conserved [Chaetomium globosum CBS 148.51] gi|88175642|gb|EAQ83110.1| conserved [Chaetomium globosum CBS 148.51]
  misc_feature (6)..(224): NCBI GI: 67526597 Blast Desc: AN3756.2 [Aspergillus nidulans FGSC A4] gi|40740774|gb|EAA59964.1| conserved [Aspergillus nidulans FGSC A4] gi|259481696|tpe|CBF75458.1| TPA: proteasome core beta FGSC
  misc_feature (6)..(224): NCBI GI: 242796933 Blast Desc: proteasome component Pre3, [Talaromyces stipitatus ATCC 10500] gi|218719495|gb|EED18915.1| proteasome component Pre3, [Talaromyces stipitatus ATCC 10500]
  misc_feature (1)..(224): NCBI GI: 212536802 Blast Desc: proteasome component Pre3, [Penicillium marneffei ATCC 18224] gi|210070956|gb|EEA25046.1| proteasome component Pre3, [Penicillium marneffei ATCC 18224]
  misc_feature (12)..(222): SWISSPROT Homolog: EC 3.4.25.1 Proteasome endopeptidase complex
MEFTNTGVLNEDGIHVDMDRLKKGEVNLGTSIMAVTFKDGVILGADSRTTTGAYIANRVTDKLTRVADTIWCCRSGSAADTQAVADIVQYQLGLFAMRNGKPPTTQTAAAIFQEICYSNKDQLSAGLIIAGWDERHGGQVYAIPLGGSLHKQAYSIGGSGSTYIYGYCDANWKEGMEEEDAVNFVKGALREAIKWDGSSGGVIRMVVLTKKGADRHLYLPDEDYKVKH

SEQ ID NO: 39100 - DNA, 1221 bp, Muscodor strobelii
  misc_feature: SGI EST ID NO. CUFF.94129.1
  misc_feature: Variant of the nucleotide sequence at SEQ ID NO 39098
ttccgggctgcttccctggtgaggctgcgcgtcggagctgcctgagcttcggctggccctgatgcaatcatccctccgcctcgaacggacgtttgacctggagctcccaaacagagcttccgcaccctcgcccaacaccaacaaccaccctcataccagaaccatcgacccgacgacatttcgacatttcgacattcgtgtcgtgaattgtgattgccgtcttcctccgcaaattgatcctgacgaccccgaccccacccccacaccgtcatcaacatggagttcaccaacacaggtgtcttgaacgaagatggtatccacgtcgatatggacagactgaagaagggcgaggtcaacttaggtacctccatcatggctgtcacattcaaagatggtgtcattctgggtgccgactctagaaccactaccggagcctacatcgcaaatcgagttaccgataaacttacccgagtcgccgacacaatctggtgctgccgttccggttcggcagccgacacacaagccgtagcagacatcgtacagtaccagctaggtctgtttgccatgcgcaacggcaagcccccgacgacccagaccgccgcagccatcttccaggagatctgctactccaacaaggaccagctgagcgcgggtctcatcattgccggctgggacgagcgacacggaggacaggtctacgccatcccgctcggtggctctttacacaagcaggcctattctattggcggttccggctcgacttacatctacggctactgtgatgcgaactggaaagagggtatggaggaggaggacgctgtgaactttgtcaagggtgccctgcgtgaggcaatcaagtgggatggcagctctggtggtgtcatccgcatggtcgtgcttaccaagaagggggccgaccgtcatctgtacctgccagacgaggactacaaggtgaagcactagatgacaggggagaaccgggtgggagagcatagacggtcgtaaaaaaacgatagagagctttcaagatggtaaagacctattaacacatagacgtgtatcggggccatccgtgtatactaccaaaccaaaaacttgtcgtatagctcagtaacgatttatatccttgctacactacttgcttatgcgacttgtgatcgtatcaagatgttttttatacacttgtaaagcaacatatttatgcgattctgacaaaagctc

SEQ ID NO: 39101 - DNA, 573 bp, Muscodor strobelii
  misc_feature: SGI cDNA ID NO. 573598
  misc_feature: Reduced expression when VOC is produced
  misc_feature: Encodes the peptide sequence at SEQ ID NO 39102
atgccgcgacatctatccattctcatcactgtcgtggtggccggattcataatactctctctgacgtcttcctcgtttagcggagggctcagccgcgtatcgcacaatgtcgcatcgtccatcgaccccaaagacagcagcctcgacttgggcgtaatcccaagcaatattctcacgggtggctcgattgcgccgaagctcgagaacgcgacagcaaaggccgaacttgggcgcgcggcctggcgggtgattcacacgaccatggcgcgtttcccggagaagccgactgaggaagaatcggccacgctgaagatctacatccaggcgttcgctcgactttacccctgcggcgactgcgcaagccatttccagggacttctcaagaagttcccacctcaggtcggctcaaggaatgccgcggcagcttgggcttgccacgtgcataaccaagtcaacaagagattggagaaggaagagttcaattgtaacaacattggcgacttctacgactgcggttgtggcgacaaagacgagaaaaagggcaagggcgcgggtgatttgaagctagaataa

SEQ ID NO: 39102 - protein, 190 aa, Muscodor strobelii
  misc_feature: SGI Peptide ID NO. 573598
  misc_feature (80)..(170): Pfam Id: PF04777 Pfam Desc: Erv1 / Alr family
  misc_feature (3)..(188): NCBI GI: 39967985 Blast Desc: conserved [Magnaporthe grisea 70-15] gi|145012964|gb|EDJ97605.1| conserved [Magnaporthe grisea 70-15]
  misc_feature (3)..(188): NCBI GI: 58257431 Blast Desc: ERV2 protein-like protein [Magnaporthe grisea]
  misc_feature (3)..(189): NCBI GI: 261353912 Blast Desc: FAD-linked sulfhydryl oxidase ERV2 [Verticillium albo-atrum VaMs.102]
  misc_feature (38)..(185): NCBI GI: 85089859 Blast Desc: NCU09291 [Neurospora crassa OR74A] gi|28919472|gb|EAA28907.1| conserved [Neurospora crassa OR74A]
  misc_feature (8)..(190): NCBI GI: 156036258 Blast Desc: SS1G_12817 [Sclerotinia sclerotiorum 1980] gi|154698223|gb|EDN97961.1| SS1G_12817 [Sclerotinia sclerotiorum 1980]
  misc_feature (3)..(169): NCBI GI: 171680729 Blast Desc: protein product [Podospora anserina] gi|170939992|emb|CAP65218.1| protein product [Podospora anserina]
  misc_feature (5)..(182): NCBI GI: 119181264 Blast Desc: CIMG_05759 [Coccidioides immitis RS]
  misc_feature (8)..(190): NCBI GI: 154308436 Blast Desc: BC1G_08278 [Botryotinia fuckeliana B05.10] gi|150852819|gb|EDN28011.1| BC1G_08278 [Botryotinia fuckeliana B05.10]
  misc_feature (57)..(182): NCBI GI: 240108923 Blast Desc: ERV2 protein, mitochondrial precursor, [Coccidioides posadasii C735 delta SOWgp]
  misc_feature (3)..(179): NCBI GI: 46122509 Blast Desc: FG05632.1 [Gibberella zeae PH-1]
  misc_feature (62)..(169): SWISSPROT Homolog: EC 1.8.3.2 Thiol oxidase
  misc_feature: Useful for introducing or modulating the production of volatile compounds
MPRHLSILITVVVAGFIILSLTSSSFSGGLSRVSHNVASSIDPKDSSLDLGVIPSNILTGGSIAPKLENATAKAELGRAAWRVIHTTMARFPEKPTEEESATLKIYIQAFARLYPCGDCASHFQGLLKKFPPQVGSRNAAAAWACHVHNQVNKRLEKEEFNCNNIGDFYDCGCGDKDEKKGKGAGDLKLE

SEQ ID NO: 39103 - DNA, 1102 bp, Muscodor strobelii
  misc_feature: SGI EST ID NO. CUFF.94107.1
  misc_feature: Variant of the nucleotide sequence at SEQ ID NO 39101
gaacgttcccagatttgtctcgaaagtgttccatctccagcactagtccatccacgccacatggtaatcatgtccatttcgtgacatttctgccacacttgagcaatatagaattgctttgtcgcaatctaattcaaagagacgccctcggcgcaatagaccagcgcgatccacgacgacgacgacgacttcgactttctagcgctgacaatgccgcgacatctatccattctcatcactgtcgtggtggccggattcataatactctctctgacgtcttcctcgtttagcggagggctcagccgcgtatcgcacaatgtcgcatcgtccatcgaccccaaagacagcagcctcgacttgggcgtaatcccaagcaatattctcacgggtggctcgattgcgccgaagctcgagaacgcgacagcaaaggccgaacttgggcgcgcggcctggcgggtgattcacacgaccatggcgcgtttcccggagaagccgactgaggaagaatcggccacgctgaagatctacatccaggcgttcgctcgactttacccctgcggcgactgcgcaagccatttccagggacttctcaagaagttcccacctcaggtcggctcaaggaatgccgcggcagcttgggcttgccacgtgcataaccaagtcaacaagagattggagaaggaagagttcaattgtaacaacattggcgacttctacgactgcggttgtggcgacaaagacgagaaaaagggcaagggcgcgggtgatttgaagctagaataagcttgcgaggcacttcgacctgttggcatcacgatctttggcgtttgaattttttttgaaacactacatactacatgatacctaggtgcataagactcggagttacggcgtacgcatgggaatggtcatatttggttatgagattgttgccccttatttctgatggacgacggcagtttgagatgttgccccgaggctacgttgatgcaatctgttgttagggccatctagctagtatcctgtcgtggcatatcatccattaaggactatatctccgatagtgtaaggttcaaaatcattacaagctttgtgtcaggac

SEQ ID NO: 39104 - DNA, 1119 bp, Muscodor strobelii
  misc_feature: SGI cDNA ID NO. 573599
  misc_feature: Reduced expression when VOC is produced
  misc_feature: Encodes the peptide sequence at SEQ ID NO 39105
atgccgaattctttacagattgccctaaacaatcataccgatacagatcaggtcttcgcctacatcacaggcatcgctatccagcaaaacggtcaaagatgcatactcaaggctaatggaaaagatctatactttccccagaatccgccacaaatactcagcccgcttgccgaagattgtgccatcaagttaggtccgccggggacgactatcaacgtggagattcctcagatagcaggtgggcgtatctggatatcgcgacactccaaactcacatttctcctgaatccggggccagcgcttgttgagcctagtgttctcaaccccagtgatccaaatgtcggcgtcgattttggattctgcgaatttactctcaatgacgcccagctttatgccaacatcagctatgttgatttcgtacctcgcctaccgattgctatacgccttgacacagctagtggacaagtacagaatgtcgctggaatggcatcgaacgggttggatcaccttgccgacggtttacgcaaacaagcacagaaggacggtatgccctgggataagcttgtcgttatgcgagatgggcatgcgctccgaatcctcaattgcacgcatggcgacgccgtgggcgccagcttcgctgggtactttgagccatacgtagaaaaggtctgggaaaagtattaccatagttctgggctcaaaatcaacacccaagccggtccgggttggctcaatggtatggtaggacaggatgggcacctagtgattggcgacgaggagttcaagaagccctccactgccgatatattaggttgcaacagcggtcccttcacgactggatcgtctgccacccgaaatgccattatcccacgactagccgcagcttttgtgcgatctgcgttactagaggcccctgagcatccgtcgaatcctgagaccttctatctgagggatccgacgaaccattacgcaagattggttcacgagtgtaacctggatggcaagggatatgcgttcgcctatgatgatgtacagcctgacactggtgaagatcagtctggcaaggtcaatgcgggtgatccgacactgttcactgtcattgttggtgggccccgatga

SEQ ID NO: 39105 - protein, 372 aa, Muscodor strobelii
  misc_feature: SGI Peptide ID NO. 573599
  misc_feature (1)..(370): NCBI GI: 145606637 Blast Desc: MGG_12006 [Magnaporthe grisea 70-15] gi|145014320|gb|EDJ98888.1| MGG_12006 [Magnaporthe grisea 70-15]
  misc_feature (1)..(370): NCBI GI: 171693407 Blast Desc: protein product [Podospora anserina] gi|170946652|emb|CAP73455.1| protein product [Podospora anserina]
  misc_feature (2)..(370): NCBI GI: 169600283 Blast Desc: SNOG_02972 [Phaeosphaeria nodorum SN15] gi|111068583|gb|EAT89703.1| SNOG_02972 [Phaeosphaeria nodorum SN15]
  misc_feature (4)..(370): NCBI GI: 189192364 Blast Desc: glucanase B [Pyrenophora tritici-repentis Pt-1C-BFP] gi|187974127|gb|EDU41626.1| glucanase B [Pyrenophora tritici-repentis Pt-1C-BFP]
  misc_feature (4)..(368): NCBI GI: 256394360 Blast Desc: Carbohydrate binding family 6 [Catenulispora acidiphila DSM 44928] gi|256360586|gb|ACU74083.1| Carbohydrate binding family 6 [Catenulispora acidiphila DSM 44928]
  misc_feature (1)..(369): NCBI GI: 156040587 Blast Desc: SS1G_12310 [Sclerotinia sclerotiorum 1980] gi|154696366|gb|EDN96104.1| SS1G_12310 [Sclerotinia sclerotiorum 1980]
  misc_feature (4)..(370): NCBI GI: 255942767 Blast Desc: Pc18g03120 [Penicillium chrysogenum Wisconsin 54-1255] gi|211586885|emb|CAP94536.1| Pc18g03120 [Penicillium chrysogenum Wisconsin 54-1255]
  misc_feature (1)..(369): NCBI GI: 154295338 Blast Desc: BC1G_13250 [Botryotinia fuckeliana B05.10] gi|150844117|gb|EDN19310.1| BC1G_13250 [Botryotinia fuckeliana B05.10]
  misc_feature (4)..(365): NCBI GI: 242776524 Blast Desc: glucan endo-1,3-beta-glucosidase precursor, [Talaromyces stipitatus ATCC 10500] gi|218722472|gb|EED21890.1| glucan endo-1,3-beta-glucosidase precursor, [Talaromyces ATCC
  misc_feature (4)..(370): NCBI GI: 261358449 Blast Desc: glucanase B [Verticillium albo-atrum VaMs.102]
  misc_feature (59)..(344): SWISSPROT Homolog: EC 3.2.1.39 Glucan endo-1,3-beta-D-glucosidase
  misc_feature: Useful for introducing or modulating the production of volatile compounds
MPNSLQIALNNHTDTDQVFAYITGIAIQQNGQRCILKANGKDLYFPQNPPQILSPLAEDCAIKLGPPGTTINVEIPQIAGGRIWISRHSKLTFLLNPGPALVEPSVLNPSDPNVGVDFGFCEFTLNDAQLYANISYVDFVPRLPIAIRLDTASGQVQNVAGMASNGLDHLADGLRKQAQKDGMPWDKLVVMRDGHALRILNCTHGDAVGASFAGYFEPYVEKVWEKYYHSSGLKINTQAGPGWLNGMVGQDGHLVIGDEEFKKPSTADILGCNSGPFTTGSSATRNAIIPRLAAAFVRSALLEAPEHPSNPETFYLRDPTNHYARLVHECNLDGKGYAFAYDDVQPDTGEDQSGKVNAGDPTLFTVIVGGPR

SEQ ID NO: 39106 - DNA, 1363 bp, Muscodor strobelii
  misc_feature: SGI EST ID NO. CUFF.94067.0
  misc_feature: Variant of the nucleotide sequence at SEQ ID NO 39104
gccgaatctataccctcaagctctcaattctagttctgttcttcagattttgacctaggccctacgaaatagtacctacctagtcttcgctcaattcctaatagagcgcagccatgccgaattctttacagattgccctaaacaatcataccgatacagatcaggtcttcgcctacatcacaggcatcgctatccagcaaaacggtcaaagatgcatactcaaggctaatggaaaagatctatactttccccagaatccgccacaaatactcagcccgcttgccgaagattgtgccatcaagttaggtccgccggggacgactatcaacgtggagattcctcagatagcaggtgggcgtatctggatatcgcgacactccaaactcacatttctcctgaatccggggccagcgcttgttgagcctagtgttctcaaccccagtgatccaaatgtcggcgtcgattttggattctgcgaatttactctcaatgacgcccagctttatgccaacatcagctatgttgatttcgtacctcgcctaccgattgctatacgccttgacacagctagtggacaagtacagaatgtcgctggaatggcatcgaacgggttggatcaccttgccgacggtttacgcaaacaagcacagaaggacggtatgccctgggataagcttgtcgttatgcgagatgggcatgcgctccgaatcctcaattgcacgcatggcgacgccgtgggcgccagcttcgctgggtactttgagccatacgtagaaaaggtctgggaaaagtattaccatagttctgggctcaaaatcaacacccaagccggtccgggttggctcaatggtatggtaggacaggatgggcacctagtgattggcgacgaggagttcaagaagccctccactgccgatatattaggttgcaacagcggtcccttcacgactggatcgtctgccacccgaaatgccattatcccacgactagccgcagcttttgtgcgatctgcgttactagaggcccctgagcatccgtcgaatcctgagaccttctatctgagggatccgacgaaccattacgcaagattggttcacgagtgtaacctggatggcaagggatatgcgttcgcctatgatgatgtacagcctgacactggtgaagatcagtctggcaaggtcaatgcgggtgatccgacactgttcactgtcattgttggtgggccccgatgatttaggctgaattgtggtgttcgccggttgctacctctgaatactccatcctacaaataaaataatactagtgtgatcctctaattttcctcgtacctgtttagctagaaagtgaccagtaaccagttggc

SEQ ID NO: 39107 - DNA, 1227 bp, Muscodor strobelii
  misc_feature: SGI cDNA ID NO. 573600
  misc_feature: Encodes the peptide sequence at SEQ ID NO 39108
atgcgctcttccactgtgttatgttgggtgcctttggcactagccgctccatcgaagcgagccacaccggcaccgctccacgtgcctcgtgataccacattgatcgaggggaagtatatcgtgaagctatacgaggattccatgacaactgagtctgcaatgtctgccatggctgccgagcctgactttgtctacgatacacccggcttcaaaggtttcgctggtgctttgacaacagaggaagtcgaggctctgcaagctcacccagaggggtatatgcaggtcgagttcgttgagcaagatgccgtgatgagcatcaacacgtatgccacacagagtgacgctccatgggggttatctcgcatttcacatcgcagcggcacgtccgattatgtgtacgacgacagcgcaggagccggagtatgcgcgtacatcattgataccggtatctacacagcgcattcggtaagaagtcagcttggagtccatgttgatcatctgactgacgttgtcttcaaggaatttggtggccgcgctacatggctagaaaactttgccgactccgatgactccgatggcaacggacatggcacacatgtatcagggaccgtaggctctgcaacgtacggcgtagcgaagaaggtgtccttgtttgcagtcaaagtgctcgattcgtcaggttctggaacaacctcaggcgtcgtcgctggcatgaactacgtcacttcagactcccaaacacgtagttgtcctaacggcacagtggccaacatgtccctgggcggcagcagttcaacgtctatcaacacggctgcacgcaacatgattagcgcaggaatttttctcgctgttgcagctggaaacagcaacacgaacgctgccagcacatcgcctgccggcgagagtactgtgtgtactgtcggcgctaccacgtcggcagatgcgcgggcttcgttctcgaactacggtgccgttgtcgatatcttcgccccgggtcaggacgttctgtcaacttggaacgatgatggtactaacaccatttccggtacctcaatggcttcaccccacatcaccggccttggagcgtatctcctggctctcgagggcgaaaaggaccctcagacgctatgcagctacattgcttcgattgctacttctggcacgctctctggcatacctagtggcactgcgaacctgcttgctttcaacgacaaccctagcggttaa

SEQ ID NO: 39108 - protein, 408 aa, Muscodor strobelii
  misc_feature: SGI Peptide ID NO. 573600
  misc_feature (37)..(107): Pfam Id: PF05922 Pfam Desc: Subtilisin N-terminal Region
  misc_feature (122)..(399): Pfam Id: PF00082 Pfam Desc: Subtilase family
  misc_feature (188)..(399): Pfam Id: PF00082 Pfam Desc: Subtilase family
  misc_feature (16)..(408): NCBI GI: 124295071 Blast Desc: SprT [Hypocrea koningii]
  misc_feature (1)..(403): NCBI GI: 16215677 Blast Desc: subtilisin-like serine protease PR1A [Metarhizium anisopliae var. anisopliae]
  misc_feature (1)..(403): NCBI GI: 117631 Blast Desc: CUDP_METAN RecName: Full=Cuticle-degrading protease; AltName: Full=PR1; AltName: Full=Chymoelastase; Flags: Precursor gi|168343|gb|AAA33417.1| cuticle-degrading protease [Metarhizium
  misc_feature (1)..(405): NCBI GI: 6624958 Blast Desc: Subtilisin-like serine protease PR1A [Metarhizium anisopliae var. acridum]
  misc_feature (1)..(405): NCBI GI: 16215662 Blast Desc: subtilisin-like protease PR1A [Metarhizium anisopliae var. anisopliae]
  misc_feature (1)..(405): NCBI GI: 56550029 Blast Desc: subtilisin-like protein PR1A [Metarhizium acridum]
  misc_feature (1)..(405): NCBI GI: 16215669 Blast Desc: subtilisin-like protease PR1A [Metarhizium anisopliae var. acridum]
  misc_feature (1)..(403): NCBI GI: 171903987 Blast Desc: insect cuticle degrading enzyme [Metarhizium anisopliae]
  misc_feature (1)..(408): NCBI GI: 130750164 Blast Desc: subtilisin-like serine protease precursor [Paecilomyces lilacinus]
  misc_feature (1)..(405): NCBI GI: 149132204 Blast Desc: subtilisin-like protein PR1A [Metarhizium acridum]
  misc_feature (16)..(404): SWISSPROT Homolog: EC 3.4.21.64 Peptidase K
MRSSTVLCWVPLALAAPSKRATPAPLHVPRDTTLIEGKYIVKLYEDSMTTESAMSAMAAEPDFVYDTPGFKGFAGALTTEEVEALQAHPEGYMQVEFVEQDAVMSINTYATQSDAPWGLSRISHRSGTSDYVYDDSAGAGVCAYIIDTGIYTAHSVRSQLGVHVDHLTDVVFKEFGGRATWLENFADSDDSDGNGHGTHVSGTVGSATYGVAKKVSLFAVKVLDSSGSGTTSGVVAGMNYVTSDSQTRSCPNGTVANMSLGGSSSTSINTAARNMISAGIFLAVAAGNSNTNAASTSPAGESTVCTVGATTSADARASFSNYGAVVDIFAPGQDVLSTWNDDGTNTISGTSMASPHITGLGAYLLALEGEKDPQTLCSYIASIATSGTLSGIPSGTANLLAFNDNPSG

SEQ ID NO: 39109 - DNA, 1389 bp, Muscodor strobelii
  misc_feature: SGI cDNA ID NO. 573601
  misc_feature: Encodes the peptide sequence at SEQ ID NO 39110
atggccacgactacttccacgacgacggcttttgagctgcaggatgcaagactcactgctctgcagcgtgaagcacacgaagctcctactgagaccgccactgatccagtgttagaagcttcgcggcttgccgactcagatgttcctgaaggcggttatggatgggtagtcgttgcatcttgtgcgactctgtcatggtggacaattggaacgagctatagttggggagttatacaaagcgcattggtaaagcaaggactgtcgtctgcagccacgctttcattcgttggagcccttggaccaacgttactcgcagctgttgctaccctcaattcgcgactcatgcgtatgattggtgttcgttacacgggcatgctaggaattacctttatcggccttgcccaaattctagcaggattcgcattcaagagcgttccagggttgttcgtcaccgaaggagttctgcttggccttggctttgggctcacgttcatagtcagctcaagcacacctgcccaatatttcagcaagaagcgaggcttggcaaacggtgtcgtcttcgctgggggcggtttcggtggcgctgtcttgagtattgtgcttgatcctctcattcgatctgtaggcatttcgtgggcatttcgtacaactggtctcgccacacttgcaacaggactgcccgcagcgtggttcttgaaggagcgcactacagttcgccgaggcggcatcgttgagtggaacctattcaaagaccccagtttcgtcttcgaaggatctatgctaacgtatgttgtaatcttactagcgggtgcagtaggaacgtttcctctcctcgtccccccttttttcataccactgtttgccaatgcgattggcttaagttctgccaccggcgcgggtctactagcgggtttcaattttgcctcagcgatagggagaattgtgagtggcatcttatgtgacaagatcggtgccctcaatgctcttctgttagcgccctttgtttcgaaccgactgagcctctgcgctataagcatgcttgctgtttggccggtttccacgactcttgcccctcttgcagtgttttctattgtcaatgggatggcaaacggtggtttcttctctacgatgccaacggtagttggcaactgcttcggctccgctcgtgtcactgtcgcaatgggtatgatcgttacgtcttggtctggtggctatttactcggagcccctattgccggatatctcctcgatgcctacggcggagaggacggcggtttcaaagcatatcggccggcaatgttctacgcaggctcgcttgcgctcggggccgctggctttgtcgagctggttcgttttcggtcgaaccgaaatttctttgctcgagtataa

SEQ ID NO: 39110 - protein, 462 aa, Muscodor strobelii
  misc_feature: SGI Peptide ID NO. 573601
  misc_feature (55)..(409): Pfam Id: PF07690 Pfam Desc: Major Facilitator Superfamily
  misc_feature (19)..(462): NCBI GI: 39967563 Blast Desc: MGG_02002 [Magnaporthe grisea 70-15] gi|145012869|gb|EDJ97510.1| MGG_02002 [Magnaporthe grisea 70-15]
  misc_feature (6)..(462): NCBI GI: 256721313 Blast Desc: NECHADRAFT_87007 [Nectria haematococca mpVI 77-13-4]
  misc_feature (11)..(462): NCBI GI: 261353872 Blast Desc: conserved [Verticillium albo-atrum VaMs.102]
  misc_feature (1)..(462): NCBI GI: 46114346 Blast Desc: FG03015.1 [Gibberella zeae PH-1]
  misc_feature (1)..(462): NCBI GI: 212538037 Blast Desc: monocarboxylate transporter, [Penicillium marneffei ATCC 18224] gi|210068916|gb|EEA23007.1| monocarboxylate transporter, [Penicillium marneffei ATCC 18224]
  misc_feature (1)..(462): NCBI GI: 238482439 Blast Desc: monocarboxylate permease homolog, mch4, [Aspergillus flavus NRRL3357] gi|220700508|gb|EED56846.1| monocarboxylate permease homolog, mch4, [Aspergillus flavus NRRL3357]
  misc_feature (6)..(462): NCBI GI: 258577561 Blast Desc: conserved [Uncinocarpus reesii 1704] gi|237903228|gb|EEP77629.1| conserved [Uncinocarpus reesii 1704]
  misc_feature (4)..(462): NCBI GI: 115492263 Blast Desc: conserved [Aspergillus terreus NIH2624] gi|114197619|gb|EAU39319.1| conserved [Aspergillus terreus NIH2624]
  misc_feature (27)..(462): NCBI GI: 242807265 Blast Desc: monocarboxylate transporter, [Talaromyces stipitatus ATCC 10500] gi|218715544|gb|EED14966.1| monocarboxylate transporter, [Talaromyces stipitatus ATCC 10500]
  misc_feature (45)..(462): NCBI GI: 255941084 Blast Desc: Pc16g10010 [Penicillium chrysogenum Wisconsin 54-1255] gi|211585934|emb|CAP93671.1| Pc16g10010 [Penicillium chrysogenum Wisconsin 54-1255]
MATTTSTTTAFELQDARLTALQREAHEAPTETATDPVLEASRLADSDVPEGGYGWVVVASCATLSWWTIGTSYSWGVIQSALVKQGLSSAATLSFVGALGPTLLAAVATLNSRLMRMIGVRYTGMLGITFIGLAQILAGFAFKSVPGLFVTEGVLLGLGFGLTFIVSSSTPAQYFSKKRGLANGVVFAGGGFGGAVLSIVLDPLIRSVGISWAFRTTGLATLATGLPAAWFLKERTTVRRGGIVEWNLFKDPSFVFEGSMLTYVVILLAGAVGTFPLLVPPFFIPLFANAIGLSSATGAGLLAGFNFASAIGRIVSGILCDKIGALNALLLAPFVSNRLSLCAISMLAVWPVSTTLAPLAVFSIVNGMANGGFFSTMPTVVGNCFGSARVTVAMGMIVTSWSGGYLLGAPIAGYLLDAYGGEDGGFKAYRPAMFYAGSLALGAAGFVELVRFRSNRNFFARV

SEQ ID NO: 39111 - DNA, 1104 bp, Muscodor strobelii
  misc_feature: SGI EST ID NO. CUFF.94089.0
  misc_feature: Variant of the nucleotide sequence at SEQ ID NO 39109
ggaaagtgttatagttcaagtgacgatgttctcgtactacgatgactctagaagcattcatgccatttgcggcaacgaacggctcgagcacttatagcaattacgtgaagcgcactgtcaatggcgcccttgttgtggatgtgttagcggacttaaattcttcgcccaacgacaccggacattgatttaagtgataagttttcgccaatatagctctttagcagaatgaagaagtcgtgatactctctagtcgtaaacggggaaataaagttgggatatttgactttgcgattgtttaactagatctatcgatattcaagccagccctcaaccacacaatggccacgactacttccacgacgacggcttttgagctgcaggatgcaagactcactgctctgcagcgtgaagcacacgaagctcctactgagaccgccactgatccagtgttagaagcttcgcggcttgccgactcagatgttcctgaaggcggttatggatgggtagtcgttgcatcttgtgcgactctgtcatggtggacaattggaacgagctatagttggggagttatacaaagcgcattggtaaagcaaggactgtcgtctgcagccacgctttcattcgttggagcccttggaccaacgttactcgcagctgttgctaccctcaattcgcgactcatgcgtatgattggtgttcgttacacgggcatgctaggaattacctttatcggccttgcccaaattctagcaggattcgcattcaagagcgttccagggttgttcgtcaccgaaggagttctgcttggccttggctttgggctcacgttcatagtcagctcaagcacacctgcccaatatttcagcaagaagcgaggcttggcaaacggtgtcgtcttcgctgggggcggtttcggtggcgctgtcttgagtattgtgcttgatcctctcattcgatctgtaggcatttcgtgggcatttcgtacaactggtctcgccacacttgcaacaggactgcccgcagcgtggttcttgaaggagcgcactacagttcgccgaggcggcatcgttgagtggtgcgaatcatctcgttatgacagcagat

SEQ ID NO: 39112 - DNA, 3351 bp, Muscodor strobelii
  misc_feature: SGI cDNA ID NO. 573602
  misc_feature: Encodes the peptide sequence at SEQ ID NO 39113
atggcctataatccagtgaaacgtgttgtggcatgcgttgacggtacttggtacgaccctaatggacttgtaacacggcgggaaggaaacaacagcaacatttaccggatttattcgtcggtgaaacaagggacattcattcacgaccaacgtgcagtcaagcaggtcgcctactacgagaccggtgtcggactcgacaaacaacacctcgatagcttcaacgactctgtcaatacgagccgcgaagcttgtgatcaacagattaacagagtcttctctttctgctgccaacagcttacagaagccacagacgaactatggctcttcggcttcagccgtggtgcttacgttctccgaactgtcgcagacctctttcaccaactctgtaaccttcaaacgtgggatgagcgtgaataccaacagaaagtcggcgagttgcccgctttccgtgaccggcaaagggcccagtgcgccgcaaagcttttcccatacataattgcaaaggtctgggcgaaccaacctgtcattcattttcttggtcttctagacacgatcaaaatcggtcgagaatccacaagaccgcaacctgctttgttaagatcgacccagacacttcgccatgccctcgccctcaatgagacgcgaaaggcatttcagccgtatctttttgggccattaccagcactatctcccgatttatcgcattgctcagtgatagaagcttggttcatgggatcccatgcggatattggtggcggcgctagagaagacggcttgtcgctctatcctctccagtggatgattatggagagccagggacaaggactaatcttcgaaccatcgtggagaagtgaaagtcttaccgaagagccacttgggcttattttccccacgaacgaggatcaggatactggaaagaaatctggtcctgctgagccgtggatgtttcaatacacgaatggtatacatgtccagatggtagatctaagaccttcacatcgtcatggcaatctacaggcagataagaaaaagatattgcagaagaagttctcgcgaagaaacacggatagggggtatgttagcgacggcgcttcaatccggagcggagctatttcccatacaacgtctgaacagattacgccacggaagccatcgtggagggagcggttcaagctcaccaagaagacgagtagggcaactttgaatatcattccgcagaagaaagaggcagatgtcgattctctctggtccccgcaattggaagatgagctggtcgaggttggacctcggccgcatactgtgcagattaaccctggcccggcactactttccatattctctggtcctcgccaagtgttcgatacgcgaggactaataggatttcttaatgatacacctggtggtacgatcatacatccatcggtatacttcgtaaatgacatttatgaccgtctcggactcggcggaaatatgatgcattatggagagggcttggacaatttccggcaatcgaggtttgcgaaacatgaagtgtatggcaaagttcatatggatccctggcgagcgagtcttgccgaccttggaggcgaggagttgaaaaactgccgtgttttagtatgtggcagagctggcgtcggaaagtcaaccctcataaacagagtgtttgggtcggtagtaacgcaagaatcgtcgaacgaccatggaattcacgacgtcgatgaaggttttgagatggatactcttccgggattgatcgtgcatgactcgagaggcttccagagtggcgcaaccgaagaaatcgaattattagaaaaattcgtgaaaaaacgggcggcagcggcgaagcgtgaggacagactcgatgcgatttggttctgtatcgacgtaccgtcgactcgtgtgatacacgaagcagacaagaagatttttgaaattctcgataagtacgcccgagctgtgcctgtagtcatcgtacgaacgatgaaggatcgattcatcaacgagcactacggtgcggcacgagagcaacttgaggattctggatacattggtgaagaactcgatcgtcgagcccgggctcaagctgaggagaagttcaatgtggtcaagggagatgatattcatcaacttgagcagaaactcggactagaaaaggactttgccccgtttgtctacacatcaaaacgagactccgagtctatcaaagaactcgtgaaaatcacaattatgctcgtcccggacgacgctgcgcggaataacttcgtcagcgcccagactgcggacatcgacgtcaagatccacgcatcgatcgaggaaagcttacggcttctgaactactcgaattggagctcgatcatgggatcgatgtttttcacaagcatattgtcaacgcccacaatctcacatttcctatgtgcgcggatcatcaagtgtttcggcctatcagacgccgcaaaggtgaatgaaatcgagaaaatcgcgaaaaatctgctatggaagaacatgggcagtttcgtcacgcagaattttacccagatcgtcgcgatgctgggtcttggtattggtcttaccatggcaactggaatcggaggtattccagcccttgcctcactaccattcgccacgatcccaccagcggccagattaatcgcaaaatgcacatgcgacctggttctcgttctatccgccgcattcacacgaaaagggaaattcgtcacgaaacaagactttgaagaatccgtacagcaatactgcgctaaacgggagggcgtactaggagaaaaaggcggagcgtcatcagttcgcacactggcacaccaggaaatcgatcgccttatccccattcattccgtatctaagatctacgagcccctaagtatcgtgaagatgcgcagcgaaatctcgcgcatcgttgcgaaatatcgcttcaccctcgacgaagagttcctcatcccgccaggttttgacagacaagagacggatgccggagatgaggatctccgcggtcttgatcggtggatgggacggatggactacagaactgacagtgggacgtttttctccgatgacacaccatcgacgacaacaccgactaccgtgccgactaccgttagtccatggcaggacattaccaataaaccattaccgctgcctcctacaccacagactctgcataacatgaagtctatggagaacgtcatgtatgatgctggctataaggcttatcatcacgacgcggtggctccagtagaacttccagatgtttcggcgaaagacccttggtttggaggtgcatctgaactaccaggctcgctccatgcttggcatcccagcatggcagagctcccatag

SEQ ID NO: 39113 - protein, 1116 aa, Muscodor strobelii
  misc_feature: SGI Peptide ID NO. 573602
  misc_feature (536)..(663): Pfam Id: PF08477 Pfam Desc: Miro-like protein
  misc_feature (432)..(976): NCBI GI: 261356852 Blast Desc: conserved [Verticillium albo-atrum VaMs.102]
  misc_feature (450)..(976): NCBI GI: 256724333 Blast Desc: NECHADRAFT_53363 [Nectria haematococca mpVI 77-13-4]
  misc_feature (450)..(976): NCBI GI: 46114964 Blast Desc: FG03324.1 [Gibberella zeae PH-1]
  misc_feature (5)..(624): NCBI GI: 169622348 Blast Desc: SNOG_14395 [Phaeosphaeria nodorum SN15] gi|160704751|gb|EAT78266.2| SNOG_14395 [Phaeosphaeria nodorum SN15]
  misc_feature (92)..(338): NCBI GI: 261356852 Blast Desc: conserved [Verticillium albo-atrum VaMs.102]
  misc_feature (5)..(333): NCBI GI: 46114964 Blast Desc: FG03324.1 [Gibberella zeae PH-1]
  misc_feature (6)..(333): NCBI GI: 256724333 Blast Desc: NECHADRAFT_53363 [Nectria haematococca mpVI 77-13-4]
  misc_feature (7)..(284): NCBI GI: 118590082 Blast Desc: SIAM614_15495 [Stappia aggregata IAM 12614] gi|118437579|gb|EAV44216.1| SIAM614_15495 [Stappia aggregata IAM 12614]
  misc_feature (7)..(334): NCBI GI: 284989772 Blast Desc: Protein of function DUF2235 [Geodermatophilus obscurus DSM 43160] gi|284063017|gb|ADB73955.1| Protein of function DUF2235 [Geodermatophilus obscurus DSM 43160]
  misc_feature (7)..(271): NCBI GI: 242795628 Blast Desc: conserved [Talaromyces stipitatus ATCC 10500] gi|218719219|gb|EED18639.1| conserved [Talaromyces stipitatus ATCC 10500]
MAYNPVKRVVACVDGTWYDPNGLVTRREGNNSNIYRIYSSVKQGTFIHDQRAVKQVAYYETGVGLDKQHLDSFNDSVNTSREACDQQINRVFSFCCQQLTEATDELWLFGFSRGAYVLRTVADLFHQLCNLQTWDEREYQQKVGELPAFRDRQRAQCAAKLFPYIIAKVWANQPVIHFLGLLDTIKIGRESTRPQPALLRSTQTLRHALALNETRKAFQPYLFGPLPALSPDLSHCSVIEAWFMGSHADIGGGAREDGLSLYPLQWMIMESQGQGLIFEPSWRSESLTEEPLGLIFPTNEDQDTGKKSGPAEPWMFQYTNGIHVQMVDLRPSHRHGNLQADKKKILQKKFSRRNTDRGYVSDGASIRSGAISHTTSEQITPRKPSWRERFKLTKKTSRATLNIIPQKKEADVDSLWSPQLEDELVEVGPRPHTVQINPGPALLSIFSGPRQVFDTRGLIGFLNDTPGGTIIHPSVYFVNDIYDRLGLGGNMMHYGEGLDNFRQSRFAKHEVYGKVHMDPWRASLADLGGEELKNCRVLVCGRAGVGKSTLINRVFGSVVTQESSNDHGIHDVDEGFEMDTLPGLIVHDSRGFQSGATEEIELLEKFVKKRAAAAKREDRLDAIWFCIDVPSTRVIHEADKKIFEILDKYARAVPVVIVRTMKDRFINEHYGAAREQLEDSGYIGEELDRRARAQAEEKFNVVKGDDIHQLEQKLGLEKDFAPFVYTSKRDSESIKELVKITIMLVPDDAARNNFVSAQTADIDVKIHASIEESLRLLNYSNWSSIMGSMFFTSILSTPTISHFLCARIIKCFGLSDAAKVNEIEKIAKNLLWKNMGSFVTQNFTQIVAMLGLGIGLTMATGIGGIPALASLPFATIPPAARLIAKCTCDLVLVLSAAFTRKGKFVTKQDFEESVQQYCAKREGVLGEKGGASSVRTLAHQEIDRLIPIHSVSKIYEPLSIVKMRSEISRIVAKYRFTLDEEFLIPPGFDRQETDAGDEDLRGLDRWMGRMDYRTDSGTFFSDDTPSTTTPTTVPTTVSPWQDITNKPLPLPPTPQTLHNMKSMENVMYDAGYKAYHHDAVAPVELPDVSAKDPWFGGASELPGSLHAWHPSMAELP

SEQ ID NO: 39114 - DNA, 8405 bp, Muscodor strobelii
  misc_feature: SGI EST ID NO. CUFF.94221.0
  misc_feature: Variant of the nucleotide sequence at SEQ ID NO 39112
tctgtaaccttcaaacgtgggatgagcgtgaataccaacagaaagtcggcgagttgcccgctttccgtgaccggcaaagggcccagtgcgccgcaaagcttttcccatacataattgcaaaggtctgggcgaaccaacctgtcattcattttcttggtcttctagacacgatcaaaatcggtcgagaatccacaagaccgcaacctgctttgttaagatcgacccagacacttcgccatgccctcgccctcaatgagacgcgaaaggcatttcagccgtatctttttgggccattaccagcactatctcccgatttatcgcattgctcagtgatagaagcttggttcatgggatcccatgcggatattggtggcggcgctagagaagacggcttgtcgctctatcctctccagtggatgattatggagagccagggacaaggactaatcttcgaaccatcgtggagaagtgaaagtcttaccgaagagccacttgggcttattttccccacgaacgaggatcaggatactggaaagaaatctggtcctgctgagccgtggatgtttcaatacacgaatggtatacatgtccagatggtagatctaagaccttcacatcgtcatggcaatctacaggcagataagaaaaagatattgcagaagaagttctcgcgaagaaacacggatagggggtatgttagcgacggcgcttcaatccggagcggagctatttcccatacaacgtctgaacagattacgccacggaagccatcgtggagggagcggttcaagctcaccaagaagacgagtagggcaactttgaatatcattccgcagaagaaagaggcagatgtcgattctctctggtccccgcaattggaagatgagctggtcgaggttggacctcggccgcatactgtgcagattaaccctggcccggcactactttccatattctctggtcctcgccaagtgttcgatacgcgaggactaataggatttcttaatgatacacctggtggtacgatcatacatccatcggtatacttcgtaaatgacatttatgaccgtctcggactcggcggaaatatgatgcattatggagagggcttggacaatttccggcaatcgaggtttgcgaaacatgaagtgtatggcaaagttcatatggatccctggcgagcgagtcttgccgaccttggaggcgaggagttgaaaaactgccgtgttttagtatgtggcagagctggcgtcggaaagtcaaccctcataaacagagtgtttgggtcggtagtaacgcaagaatcgtcgaacgaccatggaattcacgacgtcgatgaaggttttgagatggatactcttccgggattgatcgtgcatgactcgagaggcttccagagtggcgcaaccgaagaaatcgaattattagaaaaattcgtgaaaaaacgggcggcagcggcgaagcgtgaggacagactcgatgcgatttggttctgtatcgacgtaccgtcgactcgtgtgatacacgaagcagacaagaagatttttgaaattctcgataagtacgcccgagctgtgcctgtagtcatcgtacgaacgatgaaggatcgattcatcaacgagcactacggtgcggcacgagagcaacttgaggattctggatacattggtgaagaactcgatcgtcgagcccgggctcaagctgaggagaagttcaatgtggtcaagggagatgatattcatcaacttgagcagaaactcggactagaaaaggactttgccccgtttgtctacacatcaaaacgagactccgagtctatcaaagaactcgtgaaaatcacaattatgctcgtcccggacgacgctgcgcggaataacttcgtcagcgcccagactgcggacatcgacgtcaagatccacgcatcgatcgaggaaagcttacggcttctgaactactcgaattggagctcgatcatgggatcgatgtttttcacaagcatattgtcaacgcccacaatctcacatttcctatgtgcgcggatcatcaagtgtttcggcctatcagacgccgcaaaggtgaatgaaatcgagaaaatcgcgaaaaatctgctatggaagaacatgggcagtttcgtcacgcagaattttacccagatcgtcgcgatgctgggtcttggtattggtcttaccatggcaactggaatcggaggtattccagcccttgcctcactaccattcgccacgatcccaccagcggccagattaatcgcaaaatgcacatgcgacctggttctcgttctatccgccgcattcacacgaaaagggaaattcgtcacgaaacaagactttgaagaatccgtacagcaatactgcgctaaacgggagggcgtactaggagaaaaaggcggagcgtcatcagttcgcacactggcacaccaggaaatcgatcgccttatccccattcattccgtatctaagatctacgagcccctaagtatcgtgaagatgcgcagcgaaatctcgcgcatcgttgcgaaatatcgcttcaccctcgacgaagagttcctcatcccgccaggttttgacagacaagagacggatgccggagatgaggatctccgcggtcttgatcggtggatgggacggatggactacagaactgacagtgggacgtttttctccgatgacacaccatcgacgacaacaccgactaccgtgccgactaccgttagtccatggcaggacattaccaataaaccattaccgctgcctcctacaccacagactctgcataacatgaagtctatggagaacgtcatgtatgatgctggctataaggcttatcatcacgacgcggtggctccagtagaacttccagatgtttcggcgaaagacccttggtttggaggtgcatctgaactaccaggctcgctccatgcttggcatcccagcatggcagagctcccatagatttcttacctcaaaatgggaaccaatgtcttgaaacttggatctgatatttagcggacggcggttgggaaaccacgtaatggattacactcctgctcatgaacaggaacaagcattaagacaaagatgttttgggtttcttttgtttacaacgataccaacggcttttatgacggggttgcgtgcttgattttagttctagctcttcatgcgtcgtatacagacagcattgcgtatgcatcaccaataaacagactacacttgctccgacatcttattaagcatttttcaccacaattgcccatagatagtagaacgtttcgaatcacacagacttgtatgtgaatatttgaagatagaatcgactcaaacaaagcccctaataagactaagatgggacacctcctacgccaagaacaccggagccgtagatgcagtgtagataaccaaccatttgagttacagggattaccatcatcattcctcgtcagattcttcctcggcgacctgatgaatatttgtcagcacaaacctcagctaggacgtatatacgaattgcttacgttgtcgtggaagttctgtccatcagtggtcgccacgataacaccaacacggatgcagaagtcgccgaagtgttcgccttcctcacgctcggatgcgtaccgtttcagaagccccttcatgatctcgaggatctcatcctctttgatactagagcggtaaagcttgttgagacgctgaccgtggtaacctccacccaggtacatattgtaagctccataggctttgcccacaaatgcaacttcagctagccagggacgggcgcaaccgttaggacagccggtcatacgcatgacgatagagtcctgctttaaaccattctcctcgaggcatccttctaacttagtgataagctctggtaggtagcgctcactttcagccatggcaagaccacaggttgggaaagcgacacacgccgaagagctgagacggagaccagagaattggacgttgtcaagtttatacttcttgagtagatcctttatctggggcaggtcctcgtcagccacattgctcaaaatcagatgctggtttcccgtcaacctgaactcgcccttatgaactttagcaatttctctgaggccggttttcatttgaaactcggcagtatcctcaatacgaccattttcgatgaagaacgtaaagtggttgagaccagtttcgtccttgagccagccgaatgtatcaatgttgctcttgaactggaatggtttttctggttcaaaggacttgccccacatggcctctaccttgccacggaacacatccacagtcatgtcatcgatggtgtacttgagacgagcatgctttcggtttttacggtcaccgtgatctctctgcacgagcatgactttctcgcaagcaatgtgcacttcgtcagctttgacgaaacccatcatgcgaccagtctgggggtaagtctttttgttgttgtgggtggcacccataccaccacctgcaagcaggttgaaacctaaaaggtgtccgtcatcgcccttgatagcgattagaccaacgtcatgtgcgtacacatcggtgtcgttgtgaggagggatggcaatagtgatcttaaacttgcgggggaggtaagttgggccataaaggggctcgaagtcctgaacggcatctccagcgatttgagtttttccatcatcgtctttgagccagatttcgtggtaggcagtggtagcagggagaaggtggtcgctgattttctgcgagcaagcccagacctctctgtggtatgcggattgcgtcggtagagagctgcacatgacatttcgattgacatcaccacaggcagcaatggtggtcatgagagctctattaatagcctgcatagccggcttaagcttgcctttcactacaccgtgaaactggaaagtctgtcttgtcgtaagcttcatggtttcgttaccaagagcggtgctgatatcgtccatctggttccactgctggggagtcgagataccgccaggcagtctgcaacgtatcatgaaagagtatgcaggctccaatccctgggccttacgctcatcccggacatcacgatcatcctgcatgtaagtaccatggaacttggtcaactgctgatctgaggcagatattgctccggtactcgggtcgtttaggccttccacaatggttccacggagatagttcgaagccaacttgatgtcttcgttggtaattggcggtggttcttctggtagaccctcaacgttggcaacacctagtgcttgccaaatcttgggttcccaatcggcgtagccggtttgaaatccatcagggtcctggtcatcaccgaggccgacctctgacagcctcttgccgccaaaggttccgagcagtctgtcgaggtctttggcaggcttgttataatacactcggtcttctttacgaggccagtagtgcttatcaccgagaccaaacactgagaagttgacagatgcaaggtcgagttcggtgttgtctttgacggcatgccagaaaggtagaccattttgaggaaactcaccctgaccagcggtcgaagtaatgaagacgatattctcctcagacgggaggtcttcaactgggtaatcctccatggccatcactgttgtcttgagcccgcgagcacgtcctcttgtgcctaatctctttgccaaagactgtgcattgccgttatctgaagcgaacaagatagtaagcggggccccgaagagaccttccagtaactgagcgtatgcatctttggctttccgcttctgctgagctcggacttctgttccaaagtcttgagccaagctggcggcaaactctggctctcgtcgcatcatttgtgtcaattggttgtcgcgggccaagaacttcttcagttcgtccttaatgcgctcagagtctagcgaaaagtttggctctcccttctcctcgttctgcgggttccatctatacaggggccagtatccaagatccacggcctttttagtttcttgcaagacagtcaaaggtgagtcatgttcgccgaagtacggcaggtatgcgagtactacggatggaccactgaatttgtcggcttcgagcatagcctggagaacttgtgtatatgatccgtatactgccgtcgatgctacataagcattgccaaagttcatggcatacaaaccaatatccttcttgcggcgttcagcatctgctgcagcacgctcagagtaaggcgtagaatcgatgatgagcatgttgacattttcgccagaggccaaaacatggtggacaccagagttgccgagatcgtaggcccatgcatcggacccaacaagccagagggactccttgcgaaatagacctttgttagagagcagattgcgggcagtcgaagaaccatcagtctcaaggcgggcaataacactatcggcaacttcaccagcttcttgcgagtctccagcgctagctgcccacttcgcgagccagtttacgggagcttcggtagtgaaagaacccgagctggctgcctgctttacctccttgacaaatctctggcgacgttctttacgtgcaagtaaagatccgaacccgaattcaggactagctgcgagattagtggaaatacctgcattcttagagttaagggcattggccatatagactctctgtccaaataactgatccagaatttttgtataagctgtttccagctgcggctgttccaagccagaggccaccacttcgggacgctcggtctttccaatctcgagattctgcaggggcttttcggaggacaaattttggaaaattcctttaagggcctgttgtatagtgtctggcgcaatgtatccaagttgatgtccaacgatggtgtcaacaccgccacctgggctcgctttcactgaagtcaggacatcaatcaacaaggggccccactttgtggtcttccttgaaacttgttccaaaaccgcgagacgctggactgacttcggaatgacttcgagaagcttggctccaagccacggtctgtacagacgagcggtgatcatgccagcctgggcataaacatcagtgggcttggcatcatcaagtgccttcgcaaacaatcctgcatcagacccgaaaacgaagatggccttttctgcagtagccggtccggaccactcaaacggcctatactcgtggccatttgcctctttcagcttcgcccatatcgatgtcacatatttgtaaatatcttctgacgttaccaatggcgcagcagcttcgattgttgttgcttctgacacgctcggcgaagcgctagaattgctcggttcggcggatttctcagatccttgagaagatgtggccttcgacgcagcacccagaatcgttgaatctgtgaggttagcagcggcaggtgtagctacaacgtctgcgtgctcagatacaaccgcagtccgcccatcatcggcataaatacccgaagtattaacggtgtgggattgatatcggcgcaaatcgtcaaggttgaggatctggcggactagatttgagtcctcggcttggattggcctgtcctcggaagcggagctagagtcgaagaaatgaacaacacccttgccagagcggacagcaagcgcatgagcagtgatggccatatcctgagcttcttggaccgactcggactgtaggaacgtccatcctgagttccttattgctgtgatggccgaataatccggaaactgactgggatgtaatgcaacatgcaatactaccgggtagttggcgagtttatagaggtgagcaatggatgggagaagggtagtagaatcggtggtgacagatgtgagttgacccgagcggataggcgcgaagactgatagaagagggtcgttgttgtgtctaacggtttgtatctgattttgatcagtcaatcaagcctcaacacacataggcataaatggtcatacttctgggattgcgccctcggccttggacacaagacctgggtcttttctggcggcatatctcttgaggtgagatgagaaagccgaatcttgtccttgagacggctggacagagacgattacatcactggcaaggtatgcgatgcgcgcaactacaacagcgaggcactattagctatcacaagcattggccctgaatgtactcggcgatatacgacttaccagcctcttcaggcgtgcggatctggatactattgctcgccatggctgtggaggcggcagaagattgatctgccctaccaaagagaaacgacatggcaaagacgccagacgactacgacatagcaatgattaataaaaagggctcggctcggtgaccgctccgtctaggatcatgggctacgactatttttttcgtcgtctacgtggaattttgctgggcgatggcgacataggc

SEQ ID NO: 39115 - DNA, 4587 bp, Muscodor strobelii
  misc_feature: SGI cDNA ID NO. 573603
  misc_feature: Encodes the peptide sequence at SEQ ID NO 39116
atggcgagcaatagtatccagatccgcacgcctgaagaggctgttgcgcgcatcgcataccttgccagtgatgtaatcgtctctgtccagccgtctcaaggacaagattcggctttctcatctcacctcaagagatatgccgccagaaaagacccaggtcttgtgtccaaggccgagggcgcaatcccagaaatacaaaccgttagacacaacaacgaccctcttctatcagtcttcgcgcctatccgctcgggtcaactcacatctgtcaccaccgattctactacccttctcccatccattgctcacctctataaactcgccaactacccggtagtattgcatgttgcattacatcccagtcagtttccggattattcggccatcacagcaataaggaactcaggatggacgttcctacagtccgagtcggtccaagaagctcaggatatggccatcactgctcatgcgcttgctgtccgctctggcaagggtgttgttcatttcttcgactctagctccgcttccgaggacaggccaatccaagccgaggactcaaatctagtccgccagatcctcaaccttgacgatttgcgccgatatcaatcccacaccgttaatacttcgggtatttatgccgatgatgggcggactgcggttgtatctgagcacgcagacgttgtagctacacctgccgctgctaacctcacagattcaacgattctgggtgctgcgtcgaaggccacatcttctcaaggatctgagaaatccgccgaaccgagcaattctagcgcttcgccgagcgtgtcagaagcaacaacaatcgaagctgctgcgccattggtaacgtcagaagatatttacaaatatgtgacatcgatatgggcgaagctgaaagaggcaaatggccacgagtataggccgtttgagtggtccggaccggctactgcagaaaaggccatcttcgttttcgggtctgatgcaggattgtttgcgaaggcacttgatgatgccaagcccactgatgtttatgcccaggctggcatgatcaccgctcgtctgtacagaccgtggcttggagccaagcttctcgaagtcattccgaagtcagtccagcgtctcgcggttttggaacaagtttcaaggaagaccacaaagtggggccccttgttgattgatgtcctgacttcagtgaaagcgagcccaggtggcggtgttgacaccatcgttggacatcaacttggatacattgcgccagacactatacaacaggcccttaaaggaattttccaaaatttgtcctccgaaaagcccctgcagaatctcgagattggaaagaccgagcgtcccgaagtggtggcctctggcttggaacagccgcagctggaaacagcttatacaaaaattctggatcagttatttggacagagagtctatatggccaatgcccttaactctaagaatgcaggtatttccactaatctcgcagctagtcctgaattcgggttcggatctttacttgcacgtaaagaacgtcgccagagatttgtcaaggaggtaaagcaggcagccagctcgggttctttcactaccgaagctcccgtaaactggctcgcgaagtgggcagctagcgctggagactcgcaagaagctggtgaagttgccgatagtgttattgcccgccttgagactgatggttcttcgactgcccgcaatctgctctctaacaaaggtctatttcgcaaggagtccctctggcttgttgggtccgatgcatgggcctacgatctcggcaactctggtgtccaccatgttttggcctctggcgaaaatgtcaacatgctcatcatcgattctacgccttactctgagcgtgctgcagcagatgctgaacgccgcaagaaggatattggtttgtatgccatgaactttggcaatgcttatgtagcatcgacggcagtatacggatcatatacacaagttctccaggctatgctcgaagccgacaaattcagtggtccatccgtagtactcgcatacctgccgtacttcggcgaacatgactcacctttgactgtcttgcaagaaactaaaaaggccgtggatcttggatactggcccctgtatagatggaacccgcagaacgaggagaagggagagccaaacttttcgctagactctgagcgcattaaggacgaactgaagaagttcttggcccgcgacaaccaattgacacaaatgatgcgacgagagccagagtttgccgccagcttggctcaagactttggaacagaagtccgagctcagcagaagcggaaagccaaagatgcatacgctcagttactggaaggtctcttcggggccccgcttactatcttgttcgcttcagataacggcaatgcacagtctttggcaaagagattaggcacaagaggacgtgctcgcgggctcaagacaacagtgatggccatggaggattacccagttgaagacctcccgtctgaggagaatatcgtcttcattacttcgaccgctggtcagggtgagtttcctcaaaatggtctacctttctggcatgccgtcaaagacaacaccgaactcgaccttgcatctgtcaacttctcagtgtttggtctcggtgataagcactactggcctcgtaaagaagaccgagtgtattataacaagcctgccaaagacctcgacagactgctcggaacctttggcggcaagaggctgtcagaggtcggcctcggtgatgaccaggaccctgatggatttcaaaccggctacgccgattgggaacccaagatttggcaagcactaggtgttgccaacgttgagggtctaccagaagaaccaccgccaattaccaacgaagacatcaagttggcttcgaactatctccgtggaaccattgtggaaggcctaaacgacccgagtaccggagcaatatctgcctcagatcagcagttgaccaagttccatggtacttacatgcaggatgatcgtgatgtccgggatgagcgtaaggcccagggattggagcctgcatactctttcatgatacgttgcagactgcctggcggtatctcgactccccagcagtggaaccagatggacgatatcagcaccgctcttggtaacgaaaccatgaagcttacgacaagacagactttccagtttcacggtgtagtgaaaggcaagcttaagccggctatgcaggctattaatagagctctcatgaccaccattgctgcctgtggtgatgtcaatcgaaatgtcatgtgcagctctctaccgacgcaatccgcataccacagagaggtctgggcttgctcgcagaaaatcagcgaccaccttctccctgctaccactgcctaccacgaaatctggctcaaagacgatgatggaaaaactcaaatcgctggagatgccgttcaggacttcgagcccctttatggcccaacttacctcccccgcaagtttaagatcactattgccatccctcctcacaacgacaccgatgtgtacgcacatgacgttggtctaatcgctatcaagggcgatgacggacaccttttaggtttcaacctgcttgcaggtggtggtatgggtgccacccacaacaacaaaaagacttacccccagactggtcgcatgatgggtttcgtcaaagctgacgaagtgcacattgcttgcgagaaagtcatgctcgtgcagagagatcacggtgaccgtaaaaaccgaaagcatgctcgtctcaagtacaccatcgatgacatgactgtggatgtgttccgtggcaaggtagaggccatgtggggcaagtcctttgaaccagaaaaaccattccagttcaagagcaacattgatacattcggctggctcaaggacgaaactggtctcaaccactttacgttcttcatcgaaaatggtcgtattgaggatactgccgagtttcaaatgaaaaccggcctcagagaaattgctaaagttcataagggcgagttcaggttgacgggaaaccagcatctgattttgagcaatgtggctgacgaggacctgccccagataaaggatctactcaagaagtataaacttgacaacgtccaattctctggtctccgtctcagctcttcggcgtgtgtcgctttcccaacctgtggtcttgccatggctgaaagtgagcgctacctaccagagcttatcactaagttagaaggatgcctcgaggagaatggtttaaagcaggactctatcgtcatgcgtatgaccggctgtcctaacggttgcgcccgtccctggctagctgaagttgcatttgtgggcaaagcctatggagcttacaatatgtacctgggtggaggttaccacggtcagcgtctcaacaagctttaccgctctagtatcaaagaggatgagatcctcgagatcatgaaggggcttctgaaacggtacgcatccgagcgtgaggaaggcgaacacttcggcgacttctgcatccgtgttggtgttatcgtggcgaccactgatggacagaacttccacgacaacgtcgccgaggaagaatctgacgaggaatga

SEQ ID NO: 39116 - protein, 1528 aa, Muscodor strobelii
  misc_feature: SGI Peptide ID NO. 573603
  misc_feature (792)..(934): Pfam Id: PF00258 Pfam Desc: Flavodoxin
  misc_feature (1112)..(1279): Pfam Id: PF01077 Pfam Desc: Nitrite and sulphite reductase 4Fe-4S domain
  misc_feature (1294)..(1366): Pfam Id: PF03460 Pfam Desc: Nitrite/Sulfite reductase ferredoxin-like half domain
  misc_feature (1011)..(1080): Pfam Id: PF03460 Pfam Desc: Nitrite/Sulfite reductase ferredoxin-like half domain
  misc_feature (123)..(171): Pfam Id: PF01855 Pfam Desc: Pyruvate flavodoxin/ferredoxin oxidoreductase, thiamine diP-binding domain
  misc_feature (345)..(1523): NCBI GI: 117958159 Blast Desc: sulfite reductase beta subunit [Saccharomyces cerevisiae]
  misc_feature (1)..(1528): NCBI GI: 39944266 Blast Desc: MGG_04144 [Magnaporthe grisea 70-15] gi|145014878|gb|EDJ99446.1| MGG_04144 [Magnaporthe grisea 70-15]
  misc_feature (2)..(1521): NCBI GI: 256726032 Blast Desc: [Nectria haematococca mpVI 77-13-4]
  misc_feature (2)..(1528): NCBI GI: 46111201 Blast Desc: FG02482.1 [Gibberella zeae PH-1]
  misc_feature (1)..(1528): NCBI GI: 164429217 Blast Desc: sulfite reductase beta subunit [Neurospora crassa OR74A] gi|157072986|gb|EAA32766.2| sulfite reductase beta subunit [Neurospora crassa OR74A]
  misc_feature (15)..(1520): NCBI GI: 171683629 Blast Desc: protein product [Podospora anserina] gi|170941774|emb|CAP67428.1| protein product [Podospora anserina]
  misc_feature (1)..(1528): NCBI GI: 154303655 Blast Desc: BC1G_08712 [Botryotinia fuckeliana B05.10] gi|150854506|gb|EDN29698.1| BC1G_08712 [Botryotinia fuckeliana B05.10]
  misc_feature (1)..(1522): NCBI GI: 19068028 Blast Desc: sulfite reductase [Neurospora crassa]
  misc_feature (6)..(1528): NCBI GI: 116194332 Blast Desc: CHGG_03764 [Chaetomium globosum CBS 148.51] gi|88179677|gb|EAQ87145.1| CHGG_03764 [Chaetomium globosum CBS 148.51]
  misc_feature (8)..(1528): NCBI GI: 169611184 Blast Desc: SNOG_08700 [Phaeosphaeria nodorum SN15] gi|111062748|gb|EAT83868.1| SNOG_08700 [Phaeosphaeria nodorum SN15]
  misc_feature (345)..(1523): SWISSPROT Homolog: EC 1.8.1.2 Sulfite reductase (NADPH)
MASNSIQIRTPEEAVARIAYLASDVIVSVQPSQGQDSAFSSHLKRYAARKDPGLVSKAEGAIPEIQTVRHNNDPLLSVFAPIRSGQLTSVTTDSTTLLPSIAHLYKLANYPVVLHVALHPSQFPDYSAITAIRNSGWTFLQSESVQEAQDMAITAHALAVRSGKGVVHFFDSSSASEDRPIQAEDSNLVRQILNLDDLRRYQSHTVNTSGIYADDGRTAVVSEHADVVATPAAANLTDSTILGAASKATSSQGSEKSAEPSNSSASPSVSEATTIEAAAPLVTSEDIYKYVTSIWAKLKEANGHEYRPFEWSGPATAEKAIFVFGSDAGLFAKALDDAKPTDVYAQAGMITARLYRPWLGAKLLEVIPKSVQRLAVLEQVSRKTTKWGPLLIDVLTSVKASPGGGVDTIVGHQLGYIAPDTIQQALKGIFQNLSSEKPLQNLEIGKTERPEVVASGLEQPQLETAYTKILDQLFGQRVYMANALNSKNAGISTNLAASPEFGFGSLLARKERRQRFVKEVKQAASSGSFTTEAPVNWLAKWAASAGDSQEAGEVADSVIARLETDGSSTARNLLSNKGLFRKESLWLVGSDAWAYDLGNSGVHHVLASGENVNMLIIDSTPYSERAAADAERRKKDIGLYAMNFGNAYVASTAVYGSYTQVLQAMLEADKFSGPSVVLAYLPYFGEHDSPLTVLQETKKAVDLGYWPLYRWNPQNEEKGEPNFSLDSERIKDELKKFLARDNQLTQMMRREPEFAASLAQDFGTEVRAQQKRKAKDAYAQLLEGLFGAPLTILFASDNGNAQSLAKRLGTRGRARGLKTTVMAMEDYPVEDLPSEENIVFITSTAGQGEFPQNGLPFWHAVKDNTELDLASVNFSVFGLGDKHYWPRKEDRVYYNKPAKDLDRLLGTFGGKRLSEVGLGDDQDPDGFQTGYADWEPKIWQALGVANVEGLPEEPPPITNEDIKLASNYLRGTIVEGLNDPSTGAISASDQQLTKFHGTYMQDDRDVRDERKAQGLEPAYSFMIRCRLPGGISTPQQWNQMDDISTALGNETMKLTTRQTFQFHGVVKGKLKPAMQAINRALMTTIAACGDVNRNVMCSSLPTQSAYHREVWACSQKISDHLLPATTAYHEIWLKDDDGKTQIAGDAVQDFEPLYGPTYLPRKFKITIAIPPHNDTDVYAHDVGLIAIKGDDGHLLGFNLLAGGGMGATHNNKKTYPQTGRMMGFVKADEVHIACEKVMLVQRDHGDRKNRKHARLKYTIDDMTVDVFRGKVEAMWGKSFEPEKPFQFKSNIDTFGWLKDETGLNHFTFFIENGRIEDTAEFQMKTGLREIAKVHKGEFRLTGNQHLILSNVADEDLPQIKDLLKKYKLDNVQFSGLRLSSSACVAFPTCGLAMAESERYLPELITKLEGCLEENGLKQDSIVMRMTGCPNGCARPWLAEVAFVGKAYGAYNMYLGGGYHGQRLNKLYRSSIKEDEILEIMKGLLKRYASEREEGEHFGDFCIRVGVIVATTDGQNFHDNVAEEESDEE

SEQ ID NO: 39117 - DNA, 6408 bp, Muscodor strobelii
  misc_feature: SGI EST ID NO. CUFF.94222.1
  misc_feature: Variant of the nucleotide sequence at SEQ ID NO 39115
gcctatgtcgccatcgcccagcaaaattccacgtagacgacgaaaaaaatagtcgtagcccatgatcctagacggagcggtcaccgagccgagccctttttattaatcattgctatgtcgtagtcgtctggcgtctttgccatgtcgtttctctttggtagggcagatcaatcttctgccgcctccacagccatggcgagcaatagtatccagatccgcacgcctgaagaggctgttgcgcgcatcgcataccttgccagtgatgtaatcgtctctgtccagccgtctcaaggacaagattcggctttctcatctcacctcaagagatatgccgccagaaaagacccaggtcttgtgtccaaggccgagggcgcaatcccagaaatacaaaccgttagacacaacaacgaccctcttctatcagtcttcgcgcctatccgctcgggtcaactcacatctgtcaccaccgattctactacccttctcccatccattgctcacctctataaactcgccaactacccggtagtattgcatgttgcattacatcccagtcagtttccggattattcggccatcacagcaataaggaactcaggatggacgttcctacagtccgagtcggtccaagaagctcaggatatggccatcactgctcatgcgcttgctgtccgctctggcaagggtgttgttcatttcttcgactctagctccgcttccgaggacaggccaatccaagccgaggactcaaatctagtccgccagatcctcaaccttgacgatttgcgccgatatcaatcccacaccgttaatacttcgggtatttatgccgatgatgggcggactgcggttgtatctgagcacgcagacgttgtagctacacctgccgctgctaacctcacagattcaacgattctgggtgctgcgtcgaaggccacatcttctcaaggatctgagaaatccgccgaaccgagcaattctagcgcttcgccgagcgtgtcagaagcaacaacaatcgaagctgctgcgccattggtaacgtcagaagatatttacaaatatgtgacatcgatatgggcgaagctgaaagaggcaaatggccacgagtataggccgtttgagtggtccggaccggctactgcagaaaaggccatcttcgttttcgggtctgatgcaggattgtttgcgaaggcacttgatgatgccaagcccactgatgtttatgcccaggctggcatgatcaccgctcgtctgtacagaccgtggcttggagccaagcttctcgaagtcattccgaagtcagtccagcgtctcgcggttttggaacaagtttcaaggaagaccacaaagtggggccccttgttgattgatgtcctgacttcagtgaaagcgagcccaggtggcggtgttgacaccatcgttggacatcaacttggatacattgcgccagacactatacaacaggcccttaaaggaattttccaaaatttgtcctccgaaaagcccctgcagaatctcgagattggaaagaccgagcgtcccgaagtggtggcctctggcttggaacagccgcagctggaaacagcttatacaaaaattctggatcagttatttggacagagagtctatatggccaatgcccttaactctaagaatgcaggtatttccactaatctcgcagctagtcctgaattcgggttcggatctttacttgcacgtaaagaacgtcgccagagatttgtcaaggaggtaaagcaggcagccagctcgggttctttcactaccgaagctcccgtaaactggctcgcgaagtgggcagctagcgctggagactcgcaagaagctggtgaagttgccgatagtgttattgcccgccttgagactgatggttcttcgactgcccgcaatctgctctctaacaaaggtctatttcgcaaggagtccctctggcttgttgggtccgatgcatgggcctacgatctcggcaactctggtgtccaccatgttttggcctctggcgaaaatgtcaacatgctcatcatcgattctacgccttactctgagcgtgctgcagcagatgctgaacgccgcaagaaggatattggtttgtatgccatgaactttggcaatgcttatgtagcatcgacggcagtatacggatcatatacacaagttctccaggctatgctcgaagccgacaaattcagtggtccatccgtagtactcgcatacctgccgtacttcggcgaacatgactcacctttgactgtcttgcaagaaactaaaaaggccgtggatcttggatactggcccctgtatagatggaacccgcagaacgaggagaagggagagccaaacttttcgctagactctgagcgcattaaggacgaactgaagaagttcttggcccgcgacaaccaattgacacaaatgatgcgacgagagccagagtttgccgccagcttggctcaagactttggaacagaagtccgagctcagcagaagcggaaagccaaagatgcatacgctcagttactggaaggtctcttcggggccccgcttactatcttgttcgcttcagataacggcaatgcacagtctttggcaaagagattaggcacaagaggacgtgctcgcgggctcaagacaacagtgatggccatggaggattacccagttgaagacctcccgtctgaggagaatatcgtcttcattacttcgaccgctggtcagggtgagtttcctcaaaatggtctacctttctggcatgccgtcaaagacaacaccgaactcgaccttgcatctgtcaacttctcagtgtttggtctcggtgataagcactactggcctcgtaaagaagaccgagtgtattataacaagcctgccaaagacctcgacagactgctcggaacctttggcggcaagaggctgtcagaggtcggcctcggtgatgaccaggaccctgatggatttcaaaccggctacgccgattgggaacccaagatttggcaagcactaggtgttgccaacgttgagggtctaccagaagaaccaccgccaattaccaacgaagacatcaagttggcttcgaactatctccgtggaaccattgtggaaggcctaaacgacccgagtaccggagcaatatctgcctcagatcagcagttgaccaagttccatggtacttacatgcaggatgatcgtgatgtccgggatgagcgtaaggcccagggattggagcctgcatactctttcatgatacgttgcagactgcctggcggtatctcgactccccagcagtggaaccagatggacgatatcagcaccgctcttggtaacgaaaccatgaagcttacgacaagacagactttccagtttcacggtgtagtgaaaggcaagcttaagccggctatgcaggctattaatagagctctcatgaccaccattgctgcctgtggtgatgtcaatcgaaatgtcatgtgcagctctctaccgacgcaatccgcataccacagagaggtctgggcttgctcgcagaaaatcagcgaccaccttctccctgctaccactgcctaccacgaaatctggctcaaagacgatgatggaaaaactcaaatcgctggagatgccgttcaggacttcgagcccctttatggcccaacttacctcccccgcaagtttaagatcactattgccatccctcctcacaacgacaccgatgtgtacgcacatgacgttggtctaatcgctatcaagggcgatgacggacaccttttaggtttcaacctgcttgcaggtggtggtatgggtgccacccacaacaacaaaaagacttacccccagactggtcgcatgatgggtttcgtcaaagctgacgaagtgcacattgcttgcgagaaagtcatgctcgtgcagagagatcacggtgaccgtaaaaaccgaaagcatgctcgtctcaagtacaccatcgatgacatgactgtggatgtgttccgtggcaaggtagaggccatgtggggcaagtcctttgaaccagaaaaaccattccagttcaagagcaacattgatacattcggctggctcaaggacgaaactggtctcaaccactttacgttcttcatcgaaaatggtcgtattgaggatactgccgagtttcaaatgaaaaccggcctcagagaaattgctaaagttcataagggcgagttcaggttgacgggaaaccagcatctgattttgagcaatgtggctgacgaggacctgccccagataaaggatctactcaagaagtataaacttgacaacgtccaattctctggtctccgtctcagctcttcggcgtgtgtcgctttcccaacctgtggtcttgccatggctgaaagtgagcgctacctaccagagcttatcactaagttagaaggatgcctcgaggagaatggtttaaagcaggactctatcgtcatgcgtatgaccggctgtcctaacggttgcgcccgtccctggctagctgaagttgcatttgtgggcaaagcctatggagcttacaatatgtacctgggtggaggttaccacggtcagcgtctcaacaagctttaccgctctagtatcaaagaggatgagatcctcgagatcatgaaggggcttctgaaacggtacgcatccgagcgtgaggaaggcgaacacttcggcgacttctgcatccgtgttggtgttatcgtggcgaccactgatggacagaacttccacgacaacgtcgccgaggaagaatctgacgaggaatgatgatggtaatccctgtaactcaaatggttggttatctacactgcatctacggctccggtgttcttggcgtaggaggtgtcccatcttagtcttattaggggctttgtttgagtcgattctatcttcaaatattcacatacaagtctgtgtgattcgaaacgttctactatctatgggcaattgtggtgaaaaatgcttaataagatgtcggagcaagtgtagtctgtttattggtgatgcatacgcaatgctgtctgtatacgacgcatgaagagctagaactaaaatcaagcacgcaaccccgtcataaaagccgttggtatcgttgtaaacaaaagaaacccaaaacatctttgtcttaatgcttgttcctgttcatgagcaggagtgtaatccattacgtggtttcccaaccgccgtccgctaaatatcagatccaagtttcaagacattggttcccattttgaggtaagaaatctatgggagctctgccatgctgggatgccaagcatggagcgagcctggtagttcagatgcacctccaaaccaagggtctttcgccgaaacatctggaagttctactggagccaccgcgtcgtgatgataagccttatagccagcatcatacatgacgttctccatagacttcatgttatgcagagtctgtggtgtaggaggcagcggtaatggtttattggtaatgtcctgccatggactaacggtagtcggcacggtagtcggtgttgtcgtcgatggtgtgtcatcggagaaaaacgtcccactgtcagttctgtagtccatccgtcccatccaccgatcaagaccgcggagatcctcatctccggcatccgtctcttgtctgtcaaaacctggcgggatgaggaactcttcgtcgagggtgaagcgatatttcgcaacgatgcgcgagatttcgctgcgcatcttcacgatacttaggggctcgtagatcttagatacggaatgaatggggataaggcgatcgatttcctggtgtgccagtgtgcgaactgatgacgctccgcctttttctcctagtacgccctcccgtttagcgcagtattgctgtacggattcttcaaagtcttgtttcgtgacgaatttcccttttcgtgtgaatgcggcggatagaacgagaaccaggtcgcatgtgcattttgcgattaatctggccgctggtgggatcgtggcgaatggtagtgaggcaagggctggaatacctccgattccagttgccatggtaagaccaataccaagacccagcatcgcgacgatctgggtaaaattctgcgtgacgaaactgcccatgttcttccatagcagatttttcgcgattttctcgatttcattcacctttgcggcgtctgataggccgaaacacttgatgatccgcgcacataggaaatgtgagattgtgggcgttgacaatatgcttgtgaaaaacatcgatcccatgatcgagctccaattcgagtagttcagaagccgtaagctttcctcgatcgatgcgtggatcttgacgtcgatgtccgcagtctgggcgctgacgaagttattccgcgcagcgtcgtccgggacgagcataattgtgattttcacgagttctttgat

SEQ ID NO: 39118 - DNA, 4587 bp, Muscodor strobelii
  misc_feature: SGI cDNA ID NO. 573604
  misc_feature: Encodes the peptide sequence at SEQ ID NO 39119
atggcgagcaatagtatccagatccgcacgcctgaagaggctgttgcgcgcatcgcataccttgccagtgatgtaatcgtctctgtccagccgtctcaaggacaagattcggctttctcatctcacctcaagagatatgccgccagaaaagacccaggtcttgtgtccaaggccgagggcgcaatcccagaaatacaaaccgttagacacaacaacgaccctcttctatcagtcttcgcgcctatccgctcgggtcaactcacatctgtcaccaccgattctactacccttctcccatccattgctcacctctataaactcgccaactacccggtagtattgcatgttgcattacatcccagtcagtttccggattattcggccatcacagcaataaggaactcaggatggacgttcctacagtccgagtcggtccaagaagctcaggatatggccatcactgctcatgcgcttgctgtccgctctggcaagggtgttgttcatttcttcgactctagctccgcttccgaggacaggccaatccaagccgaggactcaaatctagtccgccagatcctcaaccttgacgatttgcgccgatatcaatcccacaccgttaatacttcgggtatttatgccgatgatgggcggactgcggttgtatctgagcacgcagacgttgtagctacacctgccgctgctaacctcacagattcaacgattctgggtgctgcgtcgaaggccacatcttctcaaggatctgagaaatccgccgaaccgagcaattctagcgcttcgccgagcgtgtcagaagcaacaacaatcgaagctgctgcgccattggtaacgtcagaagatatttacaaatatgtgacatcgatatgggcgaagctgaaagaggcaaatggccacgagtataggccgtttgagtggtccggaccggctactgcagaaaaggccatcttcgttttcgggtctgatgcaggattgtttgcgaaggcacttgatgatgccaagcccactgatgtttatgcccaggctggcatgatcaccgctcgtctgtacagaccgtggcttggagccaagcttctcgaagtcattccgaagtcagtccagcgtctcgcggttttggaacaagtttcaaggaagaccacaaagtggggccccttgttgattgatgtcctgacttcagtgaaagcgagcccaggtggcggtgttgacaccatcgttggacatcaacttggatacattgcgccagacactatacaacaggcccttaaaggaattttccaaaatttgtcctccgaaaagcccctgcagaatctcgagattggaaagaccgagcgtcccgaagtggtggcctctggcttggaacagccgcagctggaaacagcttatacaaaaattctggatcagttatttggacagagagtctatatggccaatgcccttaactctaagaatgcaggtatttccactaatctcgcagctagtcctgaattcgggttcggatctttacttgcacgtaaagaacgtcgccagagatttgtcaaggaggtaaagcaggcagccagctcgggttctttcactaccgaagctcccgtaaactggctcgcgaagtgggcagctagcgctggagactcgcaagaagctggtgaagttgccgatagtgttattgcccgccttgagactgatggttcttcgactgcccgcaatctgctctctaacaaaggtctatttcgcaaggagtccctctggcttgttgggtccgatgcatgggcctacgatctcggcaactctggtgtccaccatgttttggcctctggcgaaaatgtcaacatgctcatcatcgattctacgccttactctgagcgtgctgcagcagatgctgaacgccgcaagaaggatattggtttgtatgccatgaactttggcaatgcttatgtagcatcgacggcagtatacggatcatatacacaagttctccaggctatgctcgaagccgacaaattcagtggtccatccgtagtactcgcatacctgccgtacttcggcgaacatgactcacctttgactgtcttgcaagaaactaaaaaggccgtggatcttggatactggcccctgtatagatggaacccgcagaacgaggagaagggagagccaaacttttcgctagactctgagcgcattaaggacgaactgaagaagttcttggcccgcgacaaccaattgacacaaatgatgcgacgagagccagagtttgccgccagcttggctcaagactttggaacagaagtccgagctcagcagaagcggaaagccaaagatgcatacgctcagttactggaaggtctcttcggggccccgcttactatcttgttcgcttcagataacggcaatgcacagtctttggcaaagagattaggcacaagaggacgtgctcgcgggctcaagacaacagtgatggccatggaggattacccagttgaagacctcccgtctgaggagaatatcgtcttcattacttcgaccgctggtcagggtgagtttcctcaaaatggtctacctttctggcatgccgtcaaagacaacaccgaactcgaccttgcatctgtcaacttctcagtgtttggtctcggtgataagcactactggcctcgtaaagaagaccgagtgtattataacaagcctgccaaagacctcgacagactgctcggaacctttggcggcaagaggctgtcagaggtcggcctcggtgatgaccaggaccctgatggatttcaaaccggctacgccgattgggaacccaagatttggcaagcactaggtgttgccaacgttgagggtctaccagaagaaccaccgccaattaccaacgaagacatcaagttggcttcgaactatctccgtggaaccattgtggaaggcctaaacgacccgagtaccggagcaatatctgcctcagatcagcagttgaccaagttccatggtacttacatgcaggatgatcgtgatgtccgggatgagcgtaaggcccagggattggagcctgcatactctttcatgatacgttgcagactgcctggcggtatctcgactccccagcagtggaaccagatggacgatatcagcaccgctcttggtaacgaaaccatgaagcttacgacaagacagactttccagtttcacggtgtagtgaaaggcaagcttaagccggctatgcaggctattaatagagctctcatgaccaccattgctgcctgtggtgatgtcaatcgaaatgtcatgtgcagctctctaccgacgcaatccgcataccacagagaggtctgggcttgctcgcagaaaatcagcgaccaccttctccctgctaccactgcctaccacgaaatctggctcaaagacgatgatggaaaaactcaaatcgctggagatgccgttcaggacttcgagcccctttatggcccaacttacctcccccgcaagtttaagatcactattgccatccctcctcacaacgacaccgatgtgtacgcacatgacgttggtctaatcgctatcaagggcgatgacggacaccttttaggtttcaacctgcttgcaggtggtggtatgggtgccacccacaacaacaaaaagacttacccccagactggtcgcatgatgggtttcgtcaaagctgacgaagtgcacattgcttgcgagaaagtcatgctcgtgcagagagatcacggtgaccgtaaaaaccgaaagcatgctcgtctcaagtacaccatcgatgacatgactgtggatgtgttccgtggcaaggtagaggccatgtggggcaagtcctttgaaccagaaaaaccattccagttcaagagcaacattgatacattcggctggctcaaggacgaaactggtctcaaccactttacgttcttcatcgaaaatggtcgtattgaggatactgccgagtttcaaatgaaaaccggcctcagagaaattgctaaagttcataagggcgagttcaggttgacgggaaaccagcatctgattttgagcaatgtggctgacgaggacctgccccagataaaggatctactcaagaagtataaacttgacaacgtccaattctctggtctccgtctcagctcttcggcgtgtgtcgctttcccaacctgtggtcttgccatggctgaaagtgagcgctacctaccagagcttatcactaagttagaaggatgcctcgaggagaatggtttaaagcaggactctatcgtcatgcgtatgaccggctgtcctaacggttgcgcccgtccctggctagctgaagttgcatttgtgggcaaagcctatggagcttacaatatgtacctgggtggaggttaccacggtcagcgtctcaacaagctttaccgctctagtatcaaagaggatgagatcctcgagatcatgaaggggcttctgaaacggtacgcatccgagcgtgaggaaggcgaacacttcggcgacttctgcatccgtgttggtgttatcgtggcgaccactgatggacagaacttccacgacaacgtaagcaattcgtatatacgtcctagctga

SEQ ID NO: 39119 - protein, 1528 aa, Muscodor strobelii
  misc_feature: SGI Peptide ID NO. 573604
  misc_feature (792)..(934): Pfam Id: PF00258 Pfam Desc: Flavodoxin
  misc_feature (1112)..(1279): Pfam Id: PF01077 Pfam Desc: Nitrite and sulphite reductase 4Fe-4S domain
  misc_feature (1294)..(1366): Pfam Id: PF03460 Pfam Desc: Nitrite/Sulfite reductase ferredoxin-like half domain
  misc_feature (1011)..(1080): Pfam Id: PF03460 Pfam Desc: Nitrite/Sulfite reductase ferredoxin-like half domain
  misc_feature (123)..(171): Pfam Id: PF01855 Pfam Desc: Pyruvate flavodoxin/ferredoxin oxidoreductase, thiamine diP-binding domain
  misc_feature (1)..(1521): NCBI GI: 39944266 Blast Desc: MGG_04144 [Magnaporthe grisea 70-15] gi|145014878|gb|EDJ99446.1| MGG_04144 [Magnaporthe grisea 70-15]
  misc_feature (2)..(1522): NCBI GI: 46111201 Blast Desc: FG02482.1 [Gibberella zeae PH-1]
  misc_feature (1)..(1521): NCBI GI: 164429217 Blast Desc: sulfite reductase beta subunit [Neurospora crassa OR74A] gi|157072986|gb|EAA32766.2| sulfite reductase beta subunit [Neurospora crassa OR74A]
  misc_feature (15)..(1520): NCBI GI: 171683629 Blast Desc: protein product [Podospora anserina] gi|170941774|emb|CAP67428.1| protein product [Podospora anserina]
  misc_feature (1)..(1521): NCBI GI: 154303655 Blast Desc: BC1G_08712 [Botryotinia fuckeliana B05.10] gi|150854506|gb|EDN29698.1| BC1G_08712 [Botryotinia fuckeliana B05.10]
  misc_feature (1)..(1524): NCBI GI: 19068028 Blast Desc: sulfite reductase [Neurospora crassa]
  misc_feature (6)..(1521): NCBI GI: 116194332 Blast Desc: CHGG_03764 [Chaetomium globosum CBS 148.51] gi|88179677|gb|EAQ87145.1| CHGG_03764 [Chaetomium globosum CBS 148.51]
  misc_feature (8)..(1521): NCBI GI: 169611184 Blast Desc: SNOG_08700 [Phaeosphaeria nodorum SN15] gi|111062748|gb|EAT83868.1| SNOG_08700 [Phaeosphaeria nodorum SN15]
  misc_feature (8)..(1521): NCBI GI: 189206015 Blast Desc: sulfite reductase hemoprotein beta-component [Pyrenophora tritici-repentis Pt-1C-BFP] gi|187975435|gb|EDU42061.1| sulfite reductase hemoprotein
  misc_feature (146)..(1521): NCBI GI: 156049363 Blast Desc: SS1G_08388 [Sclerotinia sclerotiorum 1980] gi|154692787|gb|EDN92525.1| SS1G_08388 [Sclerotinia sclerotiorum 1980]
  misc_feature (345)..(1521): SWISSPROT Homolog: EC 1.8.1.2 Sulfite reductase (NADPH)
MASNSIQIRTPEEAVARIAYLASDVIVSVQPSQGQDSAFSSHLKRYAARKDPGLVSKAEGAIPEIQTVRHNNDPLLSVFAPIRSGQLTSVTTDSTTLLPSIAHLYKLANYPVVLHVALHPSQFPDYSAITAIRNSGWTFLQSESVQEAQDMAITAHALAVRSGKGVVHFFDSSSASEDRPIQAEDSNLVRQILNLDDLRRYQSHTVNTSGIYADDGRTAVVSEHADVVATPAAANLTDSTILGAASKATSSQGSEKSAEPSNSSASPSVSEATTIEAAAPLVTSEDIYKYVTSIWAKLKEANGHEYRPFEWSGPATAEKAIFVFGSDAGLFAKALDDAKPTDVYAQAGMITARLYRPWLGAKLLEVIPKSVQRLAVLEQVSRKTTKWGPLLIDVLTSVKASPGGGVDTIVGHQLGYIAPDTIQQALKGIFQNLSSEKPLQNLEIGKTERPEVVASGLEQPQLETAYTKILDQLFGQRVYMANALNSKNAGISTNLAASPEFGFGSLLARKERRQRFVKEVKQAASSGSFTTEAPVNWLAKWAASAGDSQEAGEVADSVIARLETDGSSTARNLLSNKGLFRKESLWLVGSDAWAYDLGNSGVHHVLASGENVNMLIIDSTPYSERAAADAERRKKDIGLYAMNFGNAYVASTAVYGSYTQVLQAMLEADKFSGPSVVLAYLPYFGEHDSPLTVLQETKKAVDLGYWPLYRWNPQNEEKGEPNFSLDSERIKDELKKFLARDNQLTQMMRREPEFAASLAQDFGTEVRAQQKRKAKDAYAQLLEGLFGAPLTILFASDNGNAQSLAKRLGTRGRARGLKTTVMAMEDYPVEDLPSEENIVFITSTAGQGEFPQNGLPFWHAVKDNTELDLASVNFSVFGLGDKHYWPRKEDRVYYNKPAKDLDRLLGTFGGKRLSEVGLGDDQDPDGFQTGYADWEPKIWQALGVANVEGLPEEPPPITNEDIKLASNYLRGTIVEGLNDPSTGAISASDQQLTKFHGTYMQDDRDVRDERKAQGLEPAYSFMIRCRLPGGISTPQQWNQMDDISTALGNETMKLTTRQTFQFHGVVKGKLKPAMQAINRALMTTIAACGDVNRNVMCSSLPTQSAYHREVWACSQKISDHLLPATTAYHEIWLKDDDGKTQIAGDAVQDFEPLYGPTYLPRKFKITIAIPPHNDTDVYAHDVGLIAIKGDDGHLLGFNLLAGGGMGATHNNKKTYPQTGRMMGFVKADEVHIACEKVMLVQRDHGDRKNRKHARLKYTIDDMTVDVFRGKVEAMWGKSFEPEKPFQFKSNIDTFGWLKDETGLNHFTFFIENGRIEDTAEFQMKTGLREIAKVHKGEFRLTGNQHLILSNVADEDLPQIKDLLKKYKLDNVQFSGLRLSSSACVAFPTCGLAMAESERYLPELITKLEGCLEENGLKQDSIVMRMTGCPNGCARPWLAEVAFVGKAYGAYNMYLGGGYHGQRLNKLYRSSIKEDEILEIMKGLLKRYASEREEGEHFGDFCIRVGVIVATTDGQNFHDNVSNSYIRPS

SEQ ID NO: 39120 - DNA, 6408 bp, Muscodor strobelii; identical to SEQ ID NO: 39117
  misc_feature: SGI EST ID NO. CUFF.94222.1
  misc_feature: Variant of the nucleotide sequence at SEQ ID NO 39118

SEQ ID NO: 39121 - DNA, 861 bp, Muscodor strobelii
  misc_feature: SGI cDNA ID NO. 573605
  misc_feature: Encodes the peptide sequence at SEQ ID NO 39122
atggcaaccgtccccagcaacccgccgaccgaccaggtcgaagccgccaagcgcgccgcctgccagcaagccgtgtccgagaacttcaacccctccttcaaatacgtcggcatcggctccggttcgaccgtcgcctacgtcgtcgaagccatcgccgccctcggccgcgacataacctcgtccatgaagttcatccccactggctccggctccaccaacctgatccgcgacgccggcctcgccgtcctccaaatccccgatctcctcgcagaagtcggtctcggggcgccaggcacaaacacgcaatatatcgatatttacttcgacggcgcagacgaggtcgacgaagaacttaactgcatcaagggcggcggcgcatgtctcttccaggagaagggcgtgtctcaactgtccaagaaattcgtctgcgtagccgactcccgcaagagagtaccccggctgctcaccaactggggatacgtgcctatcgaggtcgaccgcacgtccgctgactacgtgcgccaaaagcttgtcgatctgggttccaagaaccccgtcatccgcgtctcgggtcccacgtacacgcatgcgataactgataacggcaactatctcatcgatgcaccgttcccccctttgctactaaatagcgaggccgacaagatcgacgtcgcgaaaggcatatggacacctaatgcgctgtcagctgagatccgcgggatatggggcgtgctggaggtgggcatcttctctgggttgactggtcccgaggcgcagcttgctggtccccgtgttgtaggggccaagccagtaaaaatctacttcggtgcggctaatggcagtgttgagatattagagtaa

SEQ ID NO: 39122 - protein, 286 aa, Muscodor strobelii
  misc_feature: SGI Peptide ID NO. 573605
  misc_feature (62)..(282): Pfam Id: PF06026 Pfam Desc: Ribose 5-phosphate isomerase A (phosphoriboisomerase A)
  misc_feature (62)..(253): Pfam Id: PF06026 Pfam Desc: Ribose 5-phosphate isomerase A (phosphoriboisomerase A)
  misc_feature (13)..(284): NCBI GI: 154317487 Blast Desc: BC1G_03095 [Botryotinia fuckeliana B05.10] gi|150844269|gb|EDN19462.1| BC1G_03095 [Botryotinia fuckeliana B05.10]
  misc_feature (13)..(284): NCBI GI: 156049403 Blast Desc: SS1G_08408 [Sclerotinia sclerotiorum 1980] gi|154692807|gb|EDN92545.1| SS1G_08408 [Sclerotinia sclerotiorum 1980]
  misc_feature (13)..(284): NCBI GI: 256725626 Blast Desc: [Nectria haematococca mpVI 77-13-4]
  misc_feature (13)..(284): NCBI GI: 261190606 Blast Desc: ribose 5-phosphate isomerase A [Ajellomyces dermatitidis SLH14081] gi|239591135|gb|EEQ73716.1| ribose 5-phosphate isomerase A [Ajellomyces dermatitidis SLH14081] A
  misc_feature (13)..(284): NCBI GI: 242819189 Blast Desc: ribose 5-phosphate isomerase A [Talaromyces stipitatus ATCC 10500] gi|218713731|gb|EED13155.1| ribose 5-phosphate isomerase A [Talaromyces stipitatus ATCC 10500]
  misc_feature (13)..(284): NCBI GI: 121699800 Blast Desc: ribose 5-phosphate isomerase A [Aspergillus clavatus NRRL 1] gi|119396307|gb|EAW06739.1| ribose 5-phosphate isomerase A [Aspergillus clavatus NRRL 1]
  misc_feature (13)..(284): NCBI GI: 226278531 Blast Desc: ribose 5-phosphate isomerase A [Paracoccidioides brasiliensis Pb01]
  misc_feature (13)..(284): NCBI GI: 225684095 Blast Desc: ribose-5-phosphate isomerase [Paracoccidioides brasiliensis Pb03]
  misc_feature (13)..(284): NCBI GI: 46111197 Blast Desc: FG02480.1 [Gibberella zeae PH-1]
  misc_feature (13)..(284): NCBI GI: 240280202 Blast Desc: ribose 5-phosphate isomerase A [Ajellomyces capsulatus H143]
  misc_feature (11)..(285): SWISSPROT Homolog: EC 5.3.1.6 Ribose-5-phosphate isomerase
MATVPSNPPTDQVEAAKRAACQQAVSENFNPSFKYVGIGSGSTVAYVVEAIAALGRDITSSMKFIPTGSGSTNLIRDAGLAVLQIPDLLAEVGLGAPGTNTQYIDIYFDGADEVDEELNCIKGGGACLFQEKGVSQLSKKFVCVADSRKRVPRLLTNWGYVPIEVDRTSADYVRQKLVDLGSKNPVIRVSGPTYTHAITDNGNYLIDAPFPPLLLNSEADKIDVAKGIWTPNALSAEIRGIWGVLEVGIFSGLTGPEAQLAGPRVVGAKPVKIYFGAANGSVEILE

SEQ ID NO: 39123 - DNA, 3975 bp, Muscodor strobelii
  misc_feature: SGI EST ID NO. CUFF.94310.0
  misc_feature: Variant of the nucleotide sequence at SEQ ID NO 39121
ctcaagaatatcaagaatggcaagggaagtgtctggtgtacggaatccgagctgacgtgcgccttctgcgatatcagtccgagtccgacttttgaacggccgttcataacggatcgtttgcaaaggggtctcatatgtaatttctgaatatttacatgctacctaggttgaccaaacatctacaatcacttattcttgaccaaaaaactgtctcttgggtaattttcatgacccggacgtaattcggcatccagccaagcacctcactatggcatttacacgaactgcaactaagagaggtattactttcggatcggtataccgccagtcaaggtctgtttcggtgggctaatatcgattttggacacacttctaagagaatcttgactgtcataagataatcctgaggattacgttcaacattcccagctcaggttgcttaacaagatatcttcacgcggggtgtaacaagtcggatctccaggctgctgactcaggtgcgggatggaccgccgagaccgtcacgtcagatctgccccgcggacggcgattagaagcaaatcgtgaactcggaggggttttctgacaacaggttccagcaaactagcaaacagcagagaaagatcccactctccaggagagcatcaattcggacttgagatcattaaagcactgcatctattaagcgactccagagaaaataacgtgcggttgttcgatcccgttgctccgtgcgttttgatcatctgtttagcacctatcgtatcccgctttcgatccaggaatcaatccgacatcaccgggcatcagcaagctctaaacttaccccgtcatcggtcgaacagtcacatctgtcgtgctatattcgcacgaaacacctcgcatcagacgagttatcgtgcaaaactcaccatcacgagaccaatccctcgccatccttcccactaccactccacgcgcacaatggcaaccgtccccagcaacccgccgaccgaccaggtcgaagccgccaagcgcgccgcctgccagcaagccgtgtccgagaacttcaacccctccttcaaatacgtcggcatcggctccggttcgaccgtcgcctacgtcgtcgaagccatcgccgccctcggccgcgacataacctcgtccatgaagttcatccccactggctccggctccaccaacctgatccgcgacgccggcctcgccgtcctccaaatccccgatctcctcgcagaagtcggtctcggggcgccaggcacaaacacgcaatatatcgatatttacttcgacggcgcagacgaggtcgacgaagaacttaactgcatcaagggcggcggcgcatgtctcttccaggagaagggcgtgtctcaactgtccaagaaattcgtctgcgtagccgactcccgcaagagagtaccccggctgctcaccaactggggatacgtgcctatcgaggtcgaccgcacgtccgctgactacgtgcgccaaaagcttgtcgatctgggttccaagaaccccgtcatccgcgtctcgggtcccacgtacacgcatgcgataactgataacggcaactatctcatcgatgcaccgttcccccctttgctactaaatagcgaggccgacaagatcgacgtcgcgaaaggcatatggacacctaatgcgctgtcagctgagatccgcgggatatggggcgtgctggaggtgggcatcttctctgggttgactggtcccgaggcgcagcttgctggtccccgtgttgtaggggccaagccagtaaaaatctacttcggtgcggctaatggcagtgttgagatattagagtaaggagtagataaatgaataataagcatacagacatgcgaataccacaatgtataaaattccgaatagaccaacgaataatgtcccgatagccatctgacgtttaaacgcaattaatttcggaaggtttgtaatatacatttatcaatttaatctttcatagacaatatcttaaaagtgtgttgccagtagagttaactattagtgtagcctgtcaacgtggcgtcaggcatagtatgagcatcgaagtaattaactaacaactaccgtctaattatccaacagtcttataacgacgtgtttatcctgtcgttaggcataagatcatgacatttcacctcccgatgcactaattatgggacactgcggccagctcccccaatattgaaacagaaacgaaaggtattagatatactaaaatggtcataatcttgtaaatgctgtctctctgtctctgatgatcgtgacttctttcttctgtctgcatatgtcgtggggctgtgtgtttgtgtgtcctcttcgtataatacaactctgattctcgctgggtcgtttaagattcgctataccacggtaaactccccgaatccacgactcttcattcatctcgtatcgcgttcacggtgacgtctaacatgagcagccatcctgcgcgggtgcctgggtattggtcttgacgtcgatcactgcaatttggtcagcaaagccagtcaagcgagaaacccatataagtacgtactctgcgatgaggcctgggcggcggcatccgtcccctccatgccaggcagagcttgtgctatcctcctgaagagcgtcttcacgttgtggccgagcttggcgctcgtctctacgaacatgagattgttcttttttggcctcctcctcgccttgctgcgtcgtgacctcgcgcttgtcgttgagatcggtcttgttgccgacaaggacgatgataacatcgtttccgcgctcagcgcgcacgtcgtctatccatttctttgtgttttggaaggatttggcatctatcgccctgtgtcagctgatagtcggcagtgggtgtgccaggaaaagcggttcgtactagaaatatcatatacgactacagctacactggagtcgcggatgtatgagggaatcagactcctgaatctttcctggccagctgtgtcccatagttgtaaccgcaccgtccggtcctcaaggtacatagtcttcgaggttatggctgattagctatcgagaacatattcgattgggagccatcctggagcggacacgggcgctcaccttgctgagaaagtcgataccgatagtggcctggtacatgttgtcgaaggaatcgtacatgaagcgtgttattagtgatgttttgccaactgcccctcgttagcccctgacctcgaggtacgctggcgttgatcgcatcacatgcgcatgttcaggagtggaattgggtggcataccgctttgttcgccgagaaacacaagcctggggcaatatggtcagtacaaggtaatacgacgttgcgggtgctattgagggcggacatacttgaatttcttcagggggttgttgtacccgcctgctcctccggtctgagccatctttggtgaggtgtgtggtgctgtcggaaatcggggtgcagatgattttttacttcgtatagacactgctgcgatgtctggcggctcgatagtgtagtgtggtggtttcggtggttcagtcgctaaatgtcttgtcgaagcacaaggacaggctgtggtagtggattaagtcgcaagttggtcaaagaaggatccagtgtggatggagcacggtgctgtgagtgggatgcagcaaatactacaatgactggctgatgagaagttgcaatgaattaaagtagtgtaaatgcgccagctctcgcagaggaacaaagtcggagagaaaatgctggatgaagaatggcccttactgttgctcaaaaggaggtgaagtatttccaacgcagcgattcatgcagcctgccccaggtggtggtaactggcggcagcttgtacgaggtcccagtggtcataggcgcttttcggactcgcagtggacccgtgcagcgcgtcagtcaggaggcaggccgcggcatgccgcttgaccgtcagactcgcaccgtacgcccttga

SEQ ID NO: 39124 - DNA, 666 bp, Muscodor strobelii
  misc_feature: SGI cDNA ID NO. 573606
  misc_feature: Encodes the peptide sequence at SEQ ID NO 39125
atggctcagaccggaggagcaggcgggtacaacaaccccctgaagaaattcaagcttgtgtttctcggcgaacaaagcgttggcaaaacatcactaataacacgcttcatgtacgattccttcgacaacatgtaccaggccactatcggtatcgactttctcagcaagactatgtaccttgaggaccggacggtgcggttacaactatgggacacagctggccaggaaagattcaggagtctgattccctcatacatccgcgactccagtgtagctgtagtcgtatatgatatttctaatgccaaatccttccaaaacacaaagaaatggatagacgacgtgcgcgctgagcgcggaaacgatgttatcatcgtccttgtcggcaacaagaccgatctcaacgacaagcgcgaggtcacgacgcagcaaggcgaggaggaggccaaaaaagaacaatctcatgttcgtagagacgagcgccaagctcggccacaacgtgaagacgctcttcaggaggatagcacaagctctgcctggcatggaggggacggatgccgccgcccaggcctcatcgcagatgatcgacgtcaagaccaatacccaggcacccgcgcaggatggctgctcatgttagacgtcaccgtgaacgcgatacgagatgaatga

SEQ ID NO: 39125 - protein, 221 aa, Muscodor strobelii
  misc_feature: SGI Peptide ID NO. 573606
  misc_feature (18)..(132): Pfam Id: PF08477 Pfam Desc: Miro-like protein
  misc_feature (18)..(160): Pfam Id: PF00071 Pfam Desc: Ras family
  misc_feature (18)..(150): Pfam Id: PF00071 Pfam Desc: Ras family
  misc_feature (1)..(150): NCBI GI: 171683621 Blast Desc: protein product [Podospora anserina] gi|170941770|emb|CAP67424.1| protein product [Podospora anserina]
  misc_feature (1)..(150): NCBI GI: 145607295 Blast Desc: RAS small monomeric GTPase Rab6 [Magnaporthe grisea 70-15] gi|145014877|gb|EDJ99445.1| RAS small monomeric GTPase Rab6 [Magnaporthe grisea 70-15]
  misc_feature (1)..(150): NCBI GI: 78057535 Blast Desc: secretion related GTPase C [Aspergillus niger]
  misc_feature (1)..(150): NCBI GI: 145251179 Blast Desc: An15g05740 [Aspergillus niger] gi|134082633|emb|CAK42527.1| protein product [Aspergillus niger]
  misc_feature (1)..(150): NCBI GI: 169762832 Blast Desc: [Aspergillus oryzae RIB40] gi|238488653|ref|XP_002375564.1| RAS small monomeric GTPase Rab6, [Aspergillus flavus NRRL3357] gi|83770344|dbj|BAE60477.1| protein
  misc_feature (1)..(150): NCBI GI: 242818595 Blast Desc: RAS small monomeric GTPase Rab6, [Talaromyces stipitatus ATCC 10500] gi|218713614|gb|EED13038.1| RAS small monomeric GTPase Rab6, [Talaromyces stipitatus ATCC 10500]
  misc_feature (1)..(150): NCBI GI: 226286413 Blast Desc: GTP-binding protein YPT52 [Paracoccidioides brasiliensis Pb01] gi|226291866|gb|EEH47294.1| GTP-binding protein ypt5 [Paracoccidioides brasiliensis Pb18]
  misc_feature (1)..(150): NCBI GI: 259483929 Blast Desc: TPA: similar to small GTP-binding protein (Eurofung) [Aspergillus nidulans FGSC A4]
  misc_feature (1)..(150): NCBI GI: 212530474 Blast Desc: RAS small monomeric GTPase Rab6, [Penicillium marneffei ATCC 18224] gi|210074792|gb|EEA28879.1| RAS small monomeric GTPase Rab6, [Penicillium marneffei ATCC 18224]
  misc_feature (1)..(150): NCBI GI: 164429212 Blast Desc: GTP-binding protein ryh1 [Neurospora crassa OR74A] gi|157072984|gb|EAA32658.2| GTP-binding protein ryh1 [Neurospora crassa OR74A]
  misc_feature (13)..(138): SWISSPROT Homolog: EC 2.7.11.1 Non-specific serine/threonine protein kinase
MAQTGGAGGYNNPLKKFKLVFLGEQSVGKTSLITRFMYDSFDNMYQATIGIDFLSKTMYLEDRTVRLQLWDTAGQERFRSLIPSYIRDSSVAVVVYDISNAKSFQNTKKWIDDVRAERGNDVIIVLVGNKTDLNDKREVTTQQGEEEAKKEQSHVRRDERQARPQREDALQEDSTSSAWHGGDGCRRPGLIADDRRQDQYPGTRAGWLLMLDVTVNAIRDE

SEQ ID NO: 39126 - DNA, 3440 bp, Muscodor strobelii
  misc_feature: SGI EST ID NO. CUFF.94311.3
  misc_feature: Variant of the nucleotide sequence at SEQ ID NO 39124
tcgctgcgttggaaatacttcacctccttttgagcaacagtaagggccattcttcatccagcattttctctccgactttgttcctctgcgagagctggcgcatttacactactttaattcattgcaacttctcatcagccagtcattgtagtatttgctgcatcccactcacagcaccgtgctccatccacactggatccttctttgaccaacttgcgacttaatccactaccacagcctgtccttgtgcttcgacaagacatttagcgactgaaccaccgaaaccaccacactacactatcgagccgccagacatcgcagcagtgtctatacgaagtaaaaaatcatctgcaccccgatttccgacagcaccacacacctcaccaaagatggctcagaccggaggagcaggcgggtacaacaaccccctgaagaaattcaagcttgtgtttctcggcgaacaaagcgttggcaaaacatcactaataacacgcttcatgtacgattccttcgacaacatgtaccaggccactatcggtatcgactttctcagcaagactatgtaccttgaggaccggacggtgcggttacaactatgggacacagctggccaggaaagattcaggagtctgattccctcatacatccgcgactccagtgtagctgtagtcgtatatgatatttctaatgccaaatccttccaaaacacaaagaaatggatagacgacgtgcgcgctgagcgcggaaacgatgttatcatcgtccttgtcggcaacaagaccgatctcaacgacaagcgcgaggtcacgacgcagcaaggcgaggaggaggccaaaaaagaacaatctcatgttcgtagagacgagcgccaagctcggccacaacgtgaagacgctcttcaggaggatagcacaagctctgcctggcatggaggggacggatgccgccgcccaggcctcatcgcagatgatcgacgtcaagaccaatacccaggcacccgcgcaggatggctgctcatgttagacgtcaccgtgaacgcgatacgagatgaatgaagagtcgtggattcggggagtttaccgtggtatagcgaatcttaaacgacccagcgagaatcagagttgtattatacgaagaggacacacaaacacacagccccacgacatatgcagacagaagaaagaagtcacgatcatcagagacagagagacagcatttacaagattatgaccattttagtatatctaatacctttcgtttctgtttcaatattgggggagctggccgcagtgtcccataattagtgcatcgggaggtgaaatgtcatgatcttatgcctaacgacaggataaacacgtcgttataagactgttggataattagacggtagttgttagttaattacttcgatgctcatactatgcctgacgccacgttgacaggctacactaatagttaactctactggcaacacacttttaagatattgtctatgaaagattaaattgataaatgtatattacaaaccttccgaaattaattgcgtttaaacgtcagatggctatcgggacattattcgttggtctattcggaattttatacattgtggtattcgcatgtctgtatgcttattattcatttatctactccttactctaatatctcaacactgccattagccgcaccgaagtagatttttactggcttggcccctacaacacggggaccagcaagctgcgcctcgggaccagtcaacccagagaagatgcccacctccagcacgccccatatcccgcggatctcagctgacagcgcattaggtgtccatatgcctttcgcgacgtcgatcttgtcggcctcgctatttagtagcaaaggggggaacggtgcatcgatgagatagttgccgttatcagttatcgcatgcgtgtacgtgggacccgagacgcggatgacggggttcttggaacccagatcgacaagcttttggcgcacgtagtcagcggacgtgcggtcgacctcgataggcacgtatccccagttggtgagcagccggggtactctcttgcgggagtcggctacgcagacgaatttcttggacagttgagacacgcccttctcctggaagagacatgcgccgccgcccttgatgcagttaagttcttcgtcgacctcgtctgcgccgtcgaagtaaatatcgatatattgcgtgtttgtgcctggcgccccgagaccgacttctgcgaggagatcggggatttggaggacggcgaggccggcgtcgcggatcaggttggtggagccggagccagtggggatgaacttcatggacgaggttatgtcgcggccgagggcggcgatggcttcgacgacgtaggcgacggtcgaaccggagccgatgccgacgtatttgaaggaggggttgaagttctcggacacggcttgctggcaggcggcgcgcttggcggcttcgacctggtcggtcggcgggttgctggggacggttgccattgtgcgcgtggagtggtagtgggaaggatggcgagggattggtctcgtgatggtgagttttgcacgataactcgtctgatgcgaggtgtttcgtgcgaatatagcacgacagatgtgactgttcgaccgatgacggggtaagtttagagcttgctttttcgaaatgagtaagttgtaagaaataaagttgggaatcgcgcggtaaggcgggagtgaagccacacaattggacgagaggaagggcattttacacggaagtggtttccttacctgatgcccggtgatgtcggattgattcctggatcgaaagcgggatacgataggtgctaaacagatgatcaaaacgcacggagcaacgggatcgaacaaccgcacgttattttctctggagtcgcttaatagatgcagtgctttaatgatctcaagtccgaattgatgctctcctggagagtgggatctttctctgctgtttgctagtttgctggaacctgttgtcagaaaacccctccgagttcacgatttgcttctaatcgccgtccgcggggcagatctgacgtgacggtctcggcggtccatcccgcacctgagtcagcagcctggagatccgacttgttacaccccgcgtgaagatatcttgttaagcaacctgagctgggaatgttgaacgtaatcctcaggattatcttatgacagtcaagattctcttagaagtgtgtccaaaatcgatattagcccaccgaaacagaccttgactggcggtataccgatccgaaagtaatacctctcttagttgcagttcgtgtaaatgccatagtgaggtgcttggctggatgccgaattacgtccgggtcatgaaaattacccaagagacagttttttggtcaagaataagtgattgtagatgtttggtcaacctaggtagcatgtaa

SEQ ID NO: 39127 - DNA, 1323 bp, Muscodor strobelii
  misc_feature: SGI cDNA ID NO. 573607
  misc_feature: Reduced expression when VOC is produced
  misc_feature: Encodes the peptide sequence at SEQ ID NO 39128
atgcctgttttgaaacggccaacgggctcgacagaggcgcccgccacttacaagcagccttcgagaaaaggcaagaaagcatggaggaagaatgtcgatgtcacccaagtcaccaagggcctcgaagagctgcaagaccagattgagaagggcggtgtcattgccgaacgtgcctcggacgagcttttcatgctggacacagtgggcgacgcctccatccccaccaagttccctaagcacacctccaagcccttgaaagccgacgagatcatcgccgcccgcaaccaacacatccctgccgtgtctcagcgaaagagagctggcgacaagaccacagatggcatcgtccccgcaaaacgcccgaggcgcgagtatgtcaccgtcaaggagttggcacgtctcaagagagttgccgacggccagcacgagacaacagtggacgtcacagatgccacatacgacccgtgggatgtcacgcaggctactacaactaccgaagaggtcgatatcgtcaagaacgatgtacgcaaccaacaagcaaaggcccccaaatcctttgcccagaagcccctgtcgctcttggccaacggaaaaaccatgccggccgtcagcaagccttccggtggctacagttacaacccaaagttcgaagactatgaggctcgatataccgaagagtccaataaggctgtcgaagctgaacaaaaacgatttgctgaggaggaagccgctacactaaaggctgaggccgccgctcgatcagcagccgaagccgaagctgcggaagctcgagctgagctgtccgagtgggacgaagattcggagtgggaaggcgttcagagtggggccgaggagttgaagccgtctgcccggagatcaaagaggaagacacctgcagagcgcaacagagtcaagaggcggaaggaggaagagagacgcttgaaacacgatgcaaagaccaaaattcgcaaagcacaactagaacagatcaagcagattgcccgcgaagcagcggagcgcgaccagcaactcgagctggctgaggacgaggagagcgacagcagtatggcgagcaatgatgatgcactacggcgcaaacagctcggcaagatgaagttgcccgagaaggatctggagttggtactgccagacgagctgcaggattcgcttaggctattgaaacctgaaggcaatctattgaaagaccgctaccgaagtttacttgtccggggaagaatggaggcccgacggaagagaccattcaggaagcaggccaggaccacaatcactgaaaaatggacgtacaaggactttgatatctag

SEQ ID NO: 39128 - protein, 440 aa, Muscodor strobelii
  misc_feature: SGI Peptide ID NO. 573607
  misc_feature (21)..(408): Pfam Id: PF07767 Pfam Desc: Nop53 (60S ribosomal biogenesis)
  misc_feature (1)..(440): NCBI GI: 171683619 Blast Desc: protein product [Podospora anserina] gi|170941769|emb|CAP67423.1| protein product [Podospora anserina]
  misc_feature (1)..(440): NCBI GI: 85105117 Blast Desc: NCU05233 [Neurospora crassa OR74A] gi|28923476|gb|EAA32657.1| conserved [Neurospora crassa OR74A]
  misc_feature (1)..(440): NCBI GI: 39944262 Blast Desc: MGG_04142 [Magnaporthe grisea 70-15] gi|145014876|gb|EDJ99444.1| MGG_04142 [Magnaporthe grisea 70-15]
  misc_feature (1)..(438): NCBI GI: 156049369 Blast Desc: SS1G_08391 [Sclerotinia sclerotiorum 1980] gi|154692790|gb|EDN92528.1| SS1G_08391 [Sclerotinia sclerotiorum 1980]
  misc_feature (1)..(438): NCBI GI: 154303649 Blast Desc: BC1G_08709 [Botryotinia fuckeliana B05.10] gi|150854503|gb|EDN29695.1| BC1G_08709 [Botryotinia fuckeliana B05.10]
  misc_feature (1)..(440): NCBI GI: 46111193 Blast Desc: FG02478.1 [Gibberella zeae PH-1]
  misc_feature (1)..(440): NCBI GI: 261359805 Blast Desc: p60 domain-containing protein [Verticillium albo-atrum VaMs.102]
  misc_feature (11)..(440): NCBI GI: 159129091 Blast Desc: conserved [Aspergillus fumigatus A1163]
  misc_feature (11)..(440): NCBI GI: 70989669 Blast Desc: conserved [Aspergillus fumigatus Af293] gi|66847315|gb|EAL87646.1| conserved [Aspergillus fumigatus Af293]
  misc_feature (8)..(440): NCBI GI: 119480297 Blast Desc: NFIA_082270 [Neosartorya fischeri NRRL 181] gi|119408331|gb|EAW18280.1| conserved [Neosartorya fischeri NRRL 181]
  misc_feature: Useful for introducing or modulating the production of volatile compounds
MPVLKRPTGSTEAPATYKQPSRKGKKAWRKNVDVTQVTKGLEELQDQIEKGGVIAERASDELFMLDTVGDASIPTKFPKHTSKPLKADEIIAARNQHIPAVSQRKRAGDKTTDGIVPAKRPRREYVTVKELARLKRVADGQHETTVDVTDATYDPWDVTQATTTTEEVDIVKNDVRNQQAKAPKSFAQKPLSLLANGKTMPAVSKPSGGYSYNPKFEDYEARYTEESNKAVEAEQKRFAEEEAATLKAEAAARSAAEAEAAEARAELSEWDEDSEWEGVQSGAEELKPSARRSKRKTPAERNRVKRRKEEERRLKHDAKTKIRKAQLEQIKQIAREAAERDQQLELAEDEESDSSMASNDDALRRKQLGKMKLPEKDLELVLPDELQDSLRLLKPEGNLLKDRYRSLLVRGRMEARRKRPFRKQARTTITEKWTYKDFDI

SEQ ID NO: 39129 - DNA, 3849 bp, Muscodor strobelii
  misc_feature: SGI EST ID NO. CUFF.94110.0
  misc_feature: Variant of the nucleotide sequence at SEQ ID NO 39127
gcattttcaagaaaatttcaagtgctacattcacccccactacccaaggtaccacctaaggcactaccttatgggcgttttctctacggtcgcttcaactccggactctttctacccgttcagacgcagtccgcccacaaccctcagtcattcgtctttgacgtgtttatcccgagccgcatgaatagcagcacacgcaatgcctgttttgaaacggccaacgggctcgacagaggcgcccgccacttacaagcagccttcgagaaaaggcaagaaagcatggaggaagaatgtcgatgtcacccaagtcaccaagggcctcgaagagctgcaagaccagattgagaagggcggtgtcattgccgaacgtgcctcggacgagcttttcatgctggacacagtgggcgacgcctccatccccaccaagttccctaagcacacctccaagcccttgaaagccgacgagatcatcgccgcccgcaaccaacacatccctgccgtgtctcagcgaaagagagctggcgacaagaccacagatggcatcgtccccgcaaaacgcccgaggcgcgagtatgtcaccgtcaaggagttggcacgtctcaagagagttgccgacggccagcacgagacaacagtggacgtcacagatgccacatacgacccgtgggatgtcacgcaggctactacaactaccgaagaggtcgatatcgtcaagaacgatgtacgcaaccaacaagcaaaggcccccaaatcctttgcccagaagcccctgtcgctcttggccaacggaaaaaccatgccggccgtcagcaagccttccggtggctacagttacaacccaaagttcgaagactatgaggctcgatataccgaagagtccaataaggctgtcgaagctgaacaaaaacgatttgctgaggaggaagccgctacactaaaggctgaggccgccgctcgatcagcagccgaagccgaagctgcggaagctcgagctgagctgtccgagtgggacgaagattcggagtgggaaggcgttcagagtggggccgaggagttgaagccgtctgcccggagatcaaagaggaagacacctgcagagcgcaacagagtcaagaggcggaaggaggaagagagacgcttgaaacacgatgcaaagaccaaaattcgcaaagcacaactagaacagatcaagcagattgcccgcgaagcagcggagcgcgaccagcaactcgagctggctgaggacgaggagagcgacagcagtatggcgagcaatgatgatgcactacggcgcaaacagctcggcaagatgaagttgcccgagaaggatctggagttggtactgccagacgagctgcaggattcgcttaggctattgaaacctgaaggcaatctattgaaagaccgctaccgaagtttacttgtccggggaagaatggaggcccgacggaagagaccattcaggaagcaggccaggaccacaatcactgaaaaatggacgtacaaggactttgatatctagattcgagtctattgtatatagtgaaaagataagcaacgaagaagatacattcaactacataatgtcattggaatctcttgagaacattcttcaagcaacccggtgagccaatctcactcatttgccaactcgtctcaacaattcgagcatcacttataaggcgaatttcgctacacgcccggtgcatatacaatgctcaaaatgtcgctcttggctgtacccctgaatgtggatgtctgtggaatgctgtgttccgatggggtcaggatgtgaagctcgtatctgtggatacaattgtcattgaaactgctaccttgatcttaaaaatgcagaaaatcgcgactctgaatctacaacctaacgcatcttattatgccttcgaaacaaggaaaacacctcttgacatgggaacaaatcttgctatggcagcggtacggcgtcctcgcagcccagatggtctatactgactagaaccaccaagcgataatgagttcattttgacaagctatcggcccgcatcattctcatatgcaaaatctctatccagcatacttcaaatccataacgagaccgcaaacatatggtcacacctcctcggagccctgtggttcgttaccagtctgtgtcatttcatcaaatccaaatacactgccgaggcaagcccaactcaagataccttggttgtcattctttaccacatatcagtaatactctgcttcaccctctcaacgattttccacaccttctccgaccatactaccgagatgcacaagtttggcaacgagctagatcatctcggtatcgtcctcgtgatgtggggaacaggaatgtctggcacccatttcgcatttcacgaagacctcgttcttcgaaacttctacgctgcgtttttgacagcgactgaactgggttgtgcgatattcacagttcgaccagagtttagattgcctgcatatcgtacaatgcggttcttgatgtacgtcttcttggggactagcttgtttgcgccggtagcacatggcctcgtcatttatggctcggagctggaagatatgatgggactacgatcatttctgggactggctgtgatcaatttcacaggcgcggctatttacgccgctagggttcctgaacgctggtttccggggacattcgacctccttggccagagtcacaatttgatgcacgttatggttttgactggagcggtcgtaagattacgaggccttatagaggttgcggcgtactgggaaacggcttcataaacgtcattggctataatcatgcagcattctcgcagcaatcatggtttccgatctgatagatacaaacgcgcagccgtatgaaactgatcatgaaattgcgagcttctacaaaactgatcttcagacgctttgctatggaagacgaatgtggtgtactcaagtcgcaggacccgtttacagtgttctgcgtgatcgaatagcggcaggtattataaattccgggcacgcattcagaagaatcgactcgagtttttggtattaatgggagagtgaaagttggcaacacgaaaaagactcaaagaagacactgttggctattatctagactgttcgctggtatatcgccctctcggccgacagagtattccttcgtgccgttcggcggttcgcgcttcggtcacattcgtgaagagggagtagtctccacatcgcgagattcggtggctctctaataaacacttctgacccaatttatgatgtcagccatgaaggcatattgaacttgaaaattacctataaatcttagggtttgcatgaatcgagttcgggtctgtacgcgatattatccaggagactgagatataacttgggccggatattgcaagtagtgcaatccgaagacacagctagtggcatgattcaggaatataacgacgcaacgaactagccacgtctatgggatcttcacggtgagtcgtggataatagtctttagtctctatgtgggtcttattgggtatgcgtcttgatttctttcgtctcttccggaacattccccctttcttatcatttcatttctctgctctccctagccctgacatgcaacgactatagagccaattgtcagtatgacttgaacacttgcctacacacctgtttaaaaaccggacatgtgaggaaggtcctgtcacctccttcaggtttcccaagtcttatattcgattgcgatttaggttactcaataaataccctggagcttacacacatctagtgtatgacttgtcgtaaagccttgtaatagtgcaattacgtgggtgtacatagcacacaagataagcacatg

SEQ ID NO: 39130 - DNA, 843 bp, Muscodor strobelii
  misc_feature: SGI cDNA ID NO. 573608
  misc_feature: Encodes the peptide sequence at SEQ ID NO 39131
atgccttcgaaacaaggaaaacacctcttgacatgggaacaaatcttgctatggcagcgcgataatgagttcattttgacaagctatcggcccgcatcattctcatatgcaaaatctctatccagcatacttcaaatccataacgagaccgcaaacatatggtcacacctcctcggagccctgtggttcgttaccagtctgtgtcatttcatcaaatccaaatacactgccgaggcaagcccaactcaagataccttggttgtcattctttaccacatatcagtaatactctgcttcaccctctcaacgattttccacaccttctccgaccatactaccgagatgcacaagtttggcaacgagctagatcatctcggtatcgtcctcgtgatgtggggaacaggaatgtctggcacccatttcgcatttcacgaagacctcgttcttcgaaacttctacgctgcgtttttgacagcgactgaactgggttgtgcgatattcacagttcgaccagagtttagattgcctgcatatcgtacaatgcggttcttgatgtacgtcttcttggggactagcttgtttgcgccggtagcacatggcctcgtcatttatggctcggagctggaagatatgatgggactacgatcatttctgggactggctgtgatcaatttcacaggcgcggctatttacgccgctagggttcctgaacgctggtttccggggacattcgacctccttggccagagtcacaatttgatgcacgttatggttttgactggagcggtcgtaagattacgaggccttatagaggttgcggcgtactgggaaacggcttcataa

SEQ ID NO: 39131 - protein, 280 aa, Muscodor strobelii
  misc_feature: SGI Peptide ID NO. 573608
  misc_feature (44)..(266): Pfam Id: PF03006 Pfam Desc: Haemolysin-III related
  misc_feature (49)..(278): NCBI GI: 39956468 Blast Desc: MGG_09091 [Magnaporthe grisea 70-15] gi|145016486|gb|EDK00916.1| MGG_09091 [Magnaporthe grisea 70-15]
  misc_feature (2)..(271): NCBI GI: 121705596 Blast Desc: haemolysin-III channel protein Izh2, [Aspergillus clavatus NRRL 1] gi|119399207|gb|EAW09635.1| haemolysin-III channel protein Izh2, [Aspergillus clavatus NRRL 1]
  misc_feature (12)..(271): NCBI GI: 169609615 Blast Desc: SNOG_07900 [Phaeosphaeria nodorum SN15] gi|111063056|gb|EAT84176.1| SNOG_07900 [Phaeosphaeria nodorum SN15]
  misc_feature (2)..(275): NCBI GI: 70999690 Blast Desc: haemolysin-III channel protein Izh2 [Aspergillus fumigatus Af293] gi|66852199|gb|EAL92524.1| haemolysin-III channel protein Izh2, [Aspergillus fumigatus Af293] channel Izh2,
  misc_feature (5)..(275): NCBI GI: 225556629 Blast Desc: hemolysin-III family protein [Ajellomyces capsulatus G186AR]
  misc_feature (2)..(275): NCBI GI: 119491815 Blast Desc: haemolysin-III channel protein Izh2, [Neosartorya fischeri NRRL 181] gi|119411562|gb|EAW21505.1| haemolysin-III channel protein Izh2, [Neosartorya fischeri NRRL 181]
  misc_feature (2)..(275): NCBI GI: 169770593 Blast Desc: [Aspergillus oryzae RIB40] gi|83767625|dbj|BAE57764.1| protein product [Aspergillus oryzae]
  misc_feature (2)..(275): NCBI GI: 242782435 Blast Desc: hemolysin-III channel protein Izh2, [Talaromyces stipitatus ATCC 10500] gi|218720145|gb|EED19564.1| hemolysin-III channel protein Izh2, [Talaromyces stipitatus ATCC 10500]
  misc_feature (2)..(275): NCBI GI: 242782440 Blast Desc: hemolysin-III channel protein Izh2, [Talaromyces stipitatus ATCC 10500] gi|218720146|gb|EED19565.1| hemolysin-III channel protein Izh2, [Talaromyces stipitatus ATCC 10500]
  misc_feature (2)..(275): NCBI GI: 67537524 Blast Desc: AN4932.2 [Aspergillus nidulans FGSC A4] gi|40741820|gb|EAA61010.1| AN4932.2 [Aspergillus nidulans FGSC A4] gi|259482197|tpe|CBF76449.1| TPA: haemolysin-III channel FGSC
MPSKQGKHLLTWEQILLWQRDNEFILTSYRPASFSYAKSLSSILQIHNETANIWSHLLGALWFVTSLCHFIKSKYTAEASPTQDTLVVILYHISVILCFTLSTIFHTFSDHTTEMHKFGNELDHLGIVLVMWGTGMSGTHFAFHEDLVLRNFYAAFLTATELGCAIFTVRPEFRLPAYRTMRFLMYVFLGTSLFAPVAHGLVIYGSELEDMMGLRSFLGLAVINFTGAAIYAARVPERWFPGTFDLLGQSHNLMHVMVLTGAVVRLRGLIEVAAYWETAS

SEQ ID NO: 39132 - DNA, 3849 bp, Muscodor strobelii; identical to SEQ ID NO: 39129
  misc_feature: SGI EST ID NO. CUFF.94110.0
  misc_feature: Variant of the nucleotide sequence at SEQ ID NO 39130

SEQ ID NO: 39133 - DNA, 678 bp, Muscodor strobelii
  misc_feature: SGI cDNA ID NO. 573609
  misc_feature: Encodes the peptide sequence at SEQ ID NO 39134
atgaactcttcgaggggacgcccaggtccgtcaacggccaacaagaggcgaactgtttcgtggcgagagatccgtgattggcaactcgacaacaagtacgtactcagtggctaccggccacagagagcagactatgtagaagtcttcaccagcttgactttcttgcacaacgagacttgcaatatttatactcatctgattggggctcttcttctgcccatcctcgcaactggtttcatgcgtttcatggctgggcctcagttttctaatgttgcctccaaggaatacgttgcctttggagtatatttctggtgtgcagagacctgcttggtcttgagcgcgctttaccacttaatgcaggatcactcgcagcctgtagaacaattctaccacaggggagatttgcttggtattgtcattgtgacaacggcaacatttgcttccgccgtctattatttgttcttctgtgagccaagcttacaaaaagctcactgggccatcatcatgaccacaggtagtttcaccggtgtactgatggccaatcccacgtttcagactatgccctatcggaaattgagagtgagctccttcgttgtgtttggtgcatcatccttcatccctttgctgcatggagtccagcgttatggtcttgatttcatgatgcagtactcagaatga

SEQ ID NO: 39134 - protein, 225 aa, Muscodor strobelii
  misc_feature: SGI Peptide ID NO. 573609
  misc_feature (54)..(223): Pfam Id: PF03006 Pfam Desc: Haemolysin-III related
  misc_feature (54)..(210): Pfam Id: PF03006 Pfam Desc: Haemolysin-III related
  misc_feature (3)..(224): NCBI GI: 119493727 Blast Desc: Haemolysin-III related protein [Neosartorya fischeri NRRL 181] gi|119412111|gb|EAW22053.1| Haemolysin-III related protein [Neosartorya fischeri NRRL 181]
  misc_feature (16)..(193): NCBI GI: 242825744 Blast Desc: adiponectin receptor, [Talaromyces stipitatus ATCC 10500] gi|218712319|gb|EED11745.1| adiponectin receptor, [Talaromyces stipitatus ATCC 10500]
  misc_feature (14)..(223): NCBI GI: 242826274 Blast Desc: adiponectin receptor, [Talaromyces stipitatus ATCC 10500] gi|218712425|gb|EED11851.1| adiponectin receptor, [Talaromyces stipitatus ATCC 10500]
  misc_feature (3)..(222): NCBI GI: 189205110 Blast Desc: adiponectin receptor protein 1 [Pyrenophora tritici-repentis Pt-1C-BFP] gi|187985989|gb|EDU51477.1| adiponectin receptor protein 1 [Pyrenophora tritici-repentis
  misc_feature (14)..(222): NCBI GI: 169609615 Blast Desc: SNOG_07900 [Phaeosphaeria nodorum SN15] gi|111063056|gb|EAT84176.1| SNOG_07900 [Phaeosphaeria nodorum SN15]
  misc_feature (2)..(220): NCBI GI: 256727336 Blast Desc: NECHADRAFT_76108 [Nectria haematococca mpVI 77-13-4]
  misc_feature (16)..(222): NCBI GI: 67537524 Blast Desc: AN4932.2 [Aspergillus nidulans FGSC A4] gi|40741820|gb|EAA61010.1| AN4932.2 [Aspergillus nidulans FGSC A4] gi|259482197|tpe|CBF76449.1| TPA: haemolysin-III channel FGSC
  misc_feature (16)..(222): NCBI GI: 239606869 Blast Desc: hemolysin-III channel protein Izh2 [Ajellomyces dermatitidis ER-3]
  misc_feature (16)..(222): NCBI GI: 261191248 Blast Desc: hemolysin-III channel protein Izh2 [Ajellomyces dermatitidis SLH14081] gi|239589798|gb|EEQ72441.1| hemolysin-III channel protein Izh2 [Ajellomyces dermatitidis SLH14081]
  misc_feature (16)..(222): NCBI GI: 169770593 Blast Desc: [Aspergillus oryzae RIB40] gi|83767625|dbj|BAE57764.1| protein product [Aspergillus oryzae]
MNSSRGRPGPSTANKRRTVSWREIRDWQLDNKYVLSGYRPQRADYVEVFTSLTFLHNETCNIYTHLIGALLLPILATGFMRFMAGPQFSNVASKEYVAFGVYFWCAETCLVLSALYHLMQDHSQPVEQFYHRGDLLGIVIVTTATFASAVYYLFFCEPSLQKAHWAIIMTTGSFTGVLMANPTFQTMPYRKLRVSSFVVFGASSFIPLLHGVQRYGLDFMMQYSE

SEQ ID NO: 39135 - DNA, 2097 bp, Muscodor strobelii
  misc_feature: SGI cDNA ID NO. 573610
  misc_feature: Reduced expression when VOC is produced
  misc_feature: Encodes the peptide sequence at SEQ ID NO 39136
atggcgacgcggcctggagccaccgctggccgcgcacttcggctcgcccagttacacccgagctcaagctcaagtgcaggctctccgacatgcggccgtggctttgtgccattgaaggcagtgatcccgtttcatgccgcgcaaagtcgtcaactcggaacatttagtcgtaaatccacaacatcggcgcgggcaattatatccaaaccataccagccaattctccctttccgacgaagcctctcgggcaagcctctaccccagcgcccgtccgcgttcctcaacttcggctaccgcaccgctgccatcttcggcacaggcgtgggctttattggagccctgttcgctgcctttttcatctacgatgccactacatacaaagaaggttttaccttcggcgactgtcatgtctcggaaatggccttagccccacggcgcggtggccctaaaaacttacccatagtagaagctctgcttgacgataacgacagtgatgagactaaggcgcagaaagagaagccacgattggtcatattgggcggcggctggggtagcgttgcgctgctcaaacagctcaatccagatgactaccacgtcacgctgatcagtcctaagaattatttcctgtttactcctatgctgccatctgccactgtcggtaccttggaattccgaagtctcgtcgagccaatacgacggatcctgtctagagtcagtggtcattacctacgggcgacggcggaagatgtcgaattctctcacaagctggtcgaagtttcgcagactgatgcgtacggaaaggaagtccggttttatgtcccctatgacaagctcgtcattggagttggatcagtcaccaatcctcacggagttaagggcctcgagaactgctttttcttgaaggatatcaacgatgctcgtatgattcgcaatcaagttatgaggaatctggaactggcttgcctgcccacgactgaggatgccgagcgtaaacgacttctttctttcgtcatcagtggtggaggcccgactggtgtggaatttgctgctgagcttttcgacctgctgaacgaagatctgaccagaagattccctcgactcctacgcaatgaaatctccgtccatatcattcagagccgatctcacatcctgaacacatatgatgaagccttgtcgaaatatgcggaagacagattcgcgcgcgatcaggttcaagtgctgacaaactcccgagtcaaggaagtcaaacccgataagatcatctttactcaaaatggagaaaatggagagattgttaccaaggagctggaaatgggcttctgtctctggtcgaccggtgtgtcacaagcgcctatttgccagcgtatagctgccaagctgggcaatgtacagaacaatcgacacgctctcgagactgacactcaccttcgactaaacggcacgcctcttggcgatgtgtacgccatcggcgattgctccacagtacagaacaacgttgcggataacgtcgtctcattcctgcgcggcctcgcattcaagcacggtaaagacccggagaatctcgagctcacattcagcgaatggcgcaacgtcgccaatgacgtgaagcggaagttcccccagtctgtcggccatctcaagcgtctagacaaactcttcgaaactttcgacaaagaccactctggtactctcgatttcggcgagcttagagagctcctgaagcagattgacagcaagctgacctcactccccgctacggcgcagcgcgccaatcagcaaggtatctacctcgcgaacaaattcaacaaattggctcacgccgctccggggctaagcgcgaatgaaattaaagatggtgatgtggacgaggcttgttataaagcattcgagtatcatcatctgggtagtctggcgtatgtgggcaattccgcgattttcgaccttggtggcaagtggaatttcaccggtggtttatgggctgtgtatgcatggaggagcgcgtatttcgctcaaagtgtaggtattaggacgaagttccttatggcgatggattggttgaagaggggattgtttggtagagatctaatgagtttctaa

SEQ ID NO: 39136 - protein, 698 aa, Muscodor strobelii
  misc_feature: SGI Peptide ID NO. 573610
  misc_feature (548)..(576): Pfam Id: PF00036 Pfam Desc: EF hand
  misc_feature (335)..(446): Pfam Id: PF00070 Pfam Desc: Pyridine nucleotide-disulphide oxidoreductase
  misc_feature (175)..(497): Pfam Id: PF07992 Pfam Desc: Pyridine nucleotide-disulphide oxidoreductase
  misc_feature (175)..(312): Pfam Id: PF07992 Pfam Desc: Pyridine nucleotide-disulphide oxidoreductase
  misc_feature (39)..(698): NCBI GI: 154303667 Blast Desc: BC1G_08718 [Botryotinia fuckeliana B05.10] gi|150854512|gb|EDN29704.1| BC1G_08718 [Botryotinia fuckeliana B05.10]
  misc_feature (39)..(698): NCBI GI: 70663486 Blast Desc: alternative NADH dehydrogenase [Botryotinia fuckeliana]
  misc_feature (67)..(698): NCBI GI: 85105087 Blast Desc: NCU05225 [Neurospora crassa OR74A] gi|28923468|gb|EAA32649.1| NCU05225 [Neurospora crassa OR74A]
  misc_feature (2)..(698): NCBI GI: 256726035 Blast Desc: [Nectria haematococca mpVI 77-13-4]
  misc_feature (67)..(698): NCBI GI: 4753821 Blast Desc: 64 kDa mitochondrial NADH dehydrogenase [Neurospora crassa]
  misc_feature (5)..(698): NCBI GI: 46111191 Blast Desc: FG02477.1 [Gibberella zeae PH-1]
  misc_feature (77)..(693): NCBI GI: 145607291 Blast Desc: MGG_04140 [Magnaporthe grisea 70-15] gi|145014874|gb|EDJ99442.1| MGG_04140 [Magnaporthe grisea 70-15]
  misc_feature (73)..(673): NCBI GI: 156049351 Blast Desc: SS1G_08382 [Sclerotinia sclerotiorum 1980] gi|154692781|gb|EDN92519.1| SS1G_08382 [Sclerotinia sclerotiorum 1980]
  misc_feature (55)..(698): NCBI GI: 116194380 Blast Desc: CHGG_03788 [Chaetomium globosum CBS 148.51] gi|88179701|gb|EAQ87169.1| CHGG_03788 [Chaetomium globosum CBS 148.51]
  misc_feature (79)..(698): NCBI GI: 169621494 Blast Desc: SNOG_13957 [Phaeosphaeria nodorum SN15] gi|160704270|gb|EAT78582.2| SNOG_13957 [Phaeosphaeria nodorum SN15]
  misc_feature (172)..(694): SWISSPROT Homolog: EC 1.6.5.3 NADH dehydrogenase (ubiquinone)
  misc_feature: Useful for introducing or modulating the production of volatile compounds
MATRPGATAGRALRLAQLHPSSSSSAGSPTCGRGFVPLKAVIPFHAAQSRQLGTFSRKSTTSARAIISKPYQPILPFRRSLSGKPLPQRPSAFLNFGYRTAAIFGTGVGFIGALFAAFFIYDATTYKEGFTFGDCHVSEMALAPRRGGPKNLPIVEALLDDNDSDETKAQKEKPRLVILGGGWGSVALLKQLNPDDYHVTLISPKNYFLFTPMLPSATVGTLEFRSLVEPIRRILSRVSGHYLRATAEDVEFSHKLVEVSQTDAYGKEVRFYVPYDKLVIGVGSVTNPHGVKGLENCFFLKDINDARMIRNQVMRNLELACLPTTEDAERKRLLSFVISGGGPTGVEFAAELFDLLNEDLTRRFPRLLRNEISVHIIQSRSHILNTYDEALSKYAEDRFARDQVQVLTNSRVKEVKPDKIIFTQNGENGEIVTKELEMGFCLWSTGVSQAPICQRIAAKLGNVQNNRHALETDTHLRLNGTPLGDVYAIGDCSTVQNNVADNVVSFLRGLAFKHGKDPENLELTFSEWRNVANDVKRKFPQSVGHLKRLDKLFETFDKDHSGTLDFGELRELLKQIDSKLTSLPATAQRANQQGIYLANKFNKLAHAAPGLSANEIKDGDVDEACYKAFEYHHLGSLAYVGNSAIFDLGGKWNFTGGLWAVYAWRSAYFAQSVGIRTKFLMAMDWLKRGLFGRDLMSF

SEQ ID NO: 39137 - DNA, 6315 bp, Muscodor strobelii
  misc_feature: SGI EST ID NO. CUFF.94476.0
  misc_feature: Variant of the nucleotide sequence at SEQ ID NO 39135
cgacaattgaccacttaaaacgacagcggtgattccctgctattatctcatgtagtagctataaacccgcagatcaccacatcaaaacaccaaaacgcgcctgaacttttcctgcgctgaattgcaatacgatgtcgcttcgaccgtagattatcacccgtaattataatagtcgacagcgagcatggcgacgcggcctggagccaccgctggccgcgcacttcggctcgcccagttacacccgagctcaagctcaagtgcaggctctccgacatgcggccgtggctttgtgccattgaaggcagtgatcccgtttcatgccgcgcaaagtcgtcaactcggaacatttagtcgtaaatccacaacatcggcgcgggcaattatatccaaaccataccagccaattctccctttccgacgaagcctctcgggcaagcctctaccccagcgcccgtccgcgttcctcaacttcggctaccgcaccgctgccatcttcggcacaggcgtgggctttattggagccctgttcgctgcctttttcatctacgatgccactacatacaaagaaggttttaccttcggcgactgtcatgtctcggaaatggccttagccccacggcgcggtggccctaaaaacttacccatagtagaagctctgcttgacgataacgacagtgatgagactaaggcgcagaaagagaagccacgattggtcatattgggcggcggctggggtagcgttgcgctgctcaaacagctcaatccagatgactaccacgtcacgctgatcagtcctaagaattatttcctgtttactcctatgctgccatctgccactgtcggtaccttggaattccgaagtctcgtcgagccaatacgacggatcctgtctagagtcagtggtcattacctacgggcgacggcggaagatgtcgaattctctcacaagctggtcgaagtttcgcagactgatgcgtacggaaaggaagtccggttttatgtcccctatgacaagctcgtcattggagttggatcagtcaccaatcctcacggagttaagggcctcgagaactgctttttcttgaaggatatcaacgatgctcgtatgattcgcaatcaagttatgaggaatctggaactggcttgcctgcccacgactgaggatgccgagcgtaaacgacttctttctttcgtcatcagtggtggaggcccgactggtgtggaatttgctgctgagcttttcgacctgctgaacgaagatctgaccagaagattccctcgactcctacgcaatgaaatctccgtccatatcattcagagccgatctcacatcctgaacacatatgatgaagccttgtcgaaatatgcggaagacagattcgcgcgcgatcaggttcaagtgctgacaaactcccgagtcaaggaagtcaaacccgataagatcatctttactcaaaatggagaaaatggagagattgttaccaaggagctggaaatgggcttctgtctctggtcgaccggtgtgtcacaagcgcctatttgccagcgtatagctgccaagctgggcaatgtacagaacaatcgacacgctctcgagactgacactcaccttcgactaaacggcacgcctcttggcgatgtgtacgccatcggcgattgctccacagtacagaacaacgttgcggataacgtcgtctcattcctgcgcggcctcgcattcaagcacggtaaagacccggagaatctcgagctcacattcagcgaatggcgcaacgtcgccaatgacgtgaagcggaagttcccccagtctgtcggccatctcaagcgtctagacaaactcttcgaaactttcgacaaagaccactctggtactctcgatttcggcgagcttagagagctcctgaagcagattgacagcaagctgacctcactccccgctacggcgcagcgcgccaatcagcaaggtatctacctcgcgaacaaattcaacaaattggctcacgccgctccggggctaagcgcgaatgaaattaaagatggtgatgtggacgaggcttgttataaagcattcgagtatcatcatctgggtagtctggcgtatgtgggcaattccgcgattttcgaccttggtggcaagtggaatttcaccggtggtttatgggctgtgtatgcatggaggagcgcgtatttcgctcaaagtgtaggtattaggacgaagttccttatggcgatggattggttgaagaggggattgtttggtagagatctaatgagtttctaaagtctgtattggcgttttaagaagggatggggttcaaatgccttcgaaattaaggtcacaagtcggtcttgaaaaagattcgagacagcttaatgtctggtattagacctctgtatctagatataccactgaatgcgacaagtttcgcacatgttatctacctaatgacttgcgcatcctgatcgtcgtttcttataagcggcttcctcaataccttacgcttgaagtaccaacctgtatttgtgcacgctggctgtgacattcaatgtgtagtttccaaagcgtggtcagcattacatcctcccgtcctcacagaagatgtatgacctcattcactgagaacttctcatctttagcatctttagtgtggttggtaaatagtcgcattgctcaattggcaatgccttgattaagaaacaccacttccattattatgaattctatacttatatacatgccgccgaacaacgctatggtattttaaaagccgaagcctcaaaagaacaacatatcctcctccttccactgtaagcccatgaatatagtcctaacattttcttcaagtggttttggaccgcaaactagaaccatgtcctccgctcccgcttccccgctattgcctaactccttcacaatcatatctcgatcaatatgccctgtaatccctttccaagactcgctcgggcggctgagagtgtaattcacccttaatctatgccccttttcctttaccagttcatccagttcggctctgcacagtatatcctcctccgtcctgttgccatttagaacaaggcactctgtctcatctccgctatccttcataacagctctcagcacggcaaaaataggcgtgatacccgaacctccacaaatcatcacgaatcgtctcacctttctcttttcccctgaaatagagcagagagaattggaaagatattcgaatttccccgctgggcccttgaattcgacgaaatgcccaagcgggatggaatccaacgcctgcgtcatctttccacccttttggtcgcccgtgtcgcggtaaatcttgatcaatatctccaccttgccgcgtgtatcgggggtggaaagaggtgtgtaggcccgtataaccgcctctctcgtcacagggtcgcgaaggcgcaggatcacgtgctggcccacaggcaagccaagggcttgtgaggcgtgcgagagctcgaaggtgaagatcttcgtatctggagatacgctcttttttgaggatagaagcgcttttgtccagactttgtggtcgaggaatgtgtctcttgtgcttgttggttgaggcgatggttcggaatttagaagctcggttatagcagtggctgacaatgtgccgatgtggtagttcaccagcattgctttcgcattttcgctgtctgtgaggatcgggtcagtaaatatagcttgatacgagtgcatggagttaagtgacatacggatggcaagaaattcttcactggcatcctgtcccgcggcgccagtgatagatgttgcacctccaggatgaccctcaagatagcttgtcccatcgtacacttccccattaacaacaaaccatggttccgtctcgttctcgtgagatttgagttcttccaatgtaattactcggttcaccttcgtattcaccatgcatatctctttggcaggctctgctacctgaacgcttgctgtctcgttggccaattgttctccccaatagccattggtaaggtttccgccatctttcttgactctctccatccaaccaccggccatgagagcaggaagagttggatgctcaaatctcaatttgtcaccttcgcgatgtatcacaactcgaaaccacgggttgttcatcatgcctagcacactccaatacatgtcgcgaggttgaaccatcattgcctcgtccatcgcacgcaccattaggtcgtctgcggtctgtaactgagagaggggtatgtccaattcccagaaacaccagcagaagcagctttctctccgggaaatgtccaagctcccgccatataatgattcgccacgtggcgcacggcgatagtcgtcttcgggataggacacattggcgagtatccatgactggcctttgtccagagtaatctctactcttgtgactcgtttaccgcctccggcgtaggcatagcctctgaccttataggcggtcgttattccactgagtgacatttcctcgtcatgagcaggatagcacgttgcgctgttggtattgaggtcgtaaatggcagtcctttcatctttccagacttcagggacatccgcgctcatctctggggatatcgtggttggtagaactctgttgtcgtagatatggtaccagttatcacttggctcctgggtaacgatgattctctttaaccacttgacgcttcgacctccaatttgtcccgggatgacgattcgaagtggcttcccgtgatcaggggtgagtgcttcgccattcatcttgtgggcaagcattactccgcgctcgtcatccatggcccatgtcaacttgatagacgttccataataaccatttggtaatttatccgccccttcgaagcatacgtatcttgcgcctcgtttggggtttgccgctcttaatacgtcaccgatagggacgccagtccatagagctgtcgagagtccagcggctccccatgagaatcccttcgtcttgcgtacaacattttgttcctttcttctgtttcccgcgcagactagcgtcacagggtaggtttgctgttcgtaatccatcaaaagatctgcaagtttcatctgaatggggttatccaccatgccttctactgtgaaatcccagtccaacatatccgaatcatcgactttcggtactcctccatggttacggacataatgtagatctttacttgtcaaaaagccttcgtcgtagagctcgctgagtggagcttcgacattgaaaggatgaatgccagtcaggcgaatgagccgagggtcgcgcaccacatgggcatccggagttttcaggtcttccgtgagaacgacattgtctgtcctgtgtctaggtggaagaggataacgtggcttcgttcgaacagaaaagctgccggatttggatttccctgcctctgtatcacttggttctgcgccggaatctgctgactctctatcggtctccggaggagatggaggaaaggtttgcttgtcgacgtattgaggtacattcgaggagcttggatacttggcgctagagctcgacattatgcaaaactaaaggactgatacaagaatacaacattaagtgccgagaaagtgatgccacaagtaacacaggcttaaaacttgatagcactcaaccctaggtgactgatggatgaaacatgcgtaagcgacaaagcacctgattttttgaagtgcggatctgtgaagatagaatggcagtcagagatcgactatgcgttctcaaaatacaggcatctccggttgccatcttggcacgatcttcttacgtggaggacgatgaagcaatcatcttcacctcttgctgttgtactaggtctgtgccgctggcgacaaacccccgacccagcgttgcattgccgggaatccatgcgagcacgtatgcggtgcgaaagcggtgggaggcgttactaaccgcggagcgaccgagcttacggtcacccaattgtcagttttgtgaccgcgacttgagtgtgccagttgtcacgagcgggtcaattgttcgtcaattgtattgtgaaggaggatccccgcggattctgctcttatcaggagtaaaaatgttcagcggagatgttcaattcgattatctatctagatgagattcggattgccttccgagatctagcccttcaatggttcaattgtgcatcacgcctcctgacagcaacgtttgaaagaattgaccagtagttgttggaggattcgaccggagttgcgataagaaattgcgccctgtgattcgtcctgcgttgaataatcacaattatgtacagaattaaggtggcgtgacgtcg

SEQ ID NO: 39138 - DNA, 2703 bp, Muscodor strobelii
  misc_feature: SGI cDNA ID NO. 573611
  misc_feature: Encodes the peptide sequence at SEQ ID NO 39139
atgtcgagctctagcgccaagtatccaagctcctcgaatgtacctcaatacgtcgacaagcaaacctttcctccatctcctccggagaccgatagagagtcagcagattccggcgcagaaccaagtgatacagaggcagggaaatccaaatccggcagcttttctgttcgaacgaagccacgttatcctcttccacctagacacaggacagacaatgtcgttctcacggaagacctgaaaactccggatgcccatgtggtgcgcgaccctcggctcattcgcctgactggcattcatcctttcaatgtcgaagctccactcagcgagctctacgacgaaggctttttgacaagtaaagatctacattatgtccgtaaccatggaggagtaccgaaagtcgatgattcggatatgttggactgggatttcacagtagaaggcatggtggataaccccattcagatgaaacttgcagatcttttgatggattacgaacagcaaacctaccctgtgacgctagtctgcgcgggaaacagaagaaaggaacaaaatgttgtacgcaagacgaagggattctcatggggagccgctggactctcgacagctctatggactggcgtccctatcggtgacgtattaagagcggcaaaccccaaacgaggcgcaagatacgtatgcttcgaaggggcggataaattaccaaatggttattatggaacgtctatcaagttgacatgggccatggatgacgagcgcggagtaatgcttgcccacaagatgaatggcgaagcactcacccctgatcacgggaagccacttcgaatcgtcatcccgggacaaattggaggtcgaagcgtcaagtggttaaagagaatcatcgttacccaggagccaagtgataactggtaccatatctacgacaacagagttctaccaaccacgatatccccagagatgagcgcggatgtccctgaagtctggaaagatgaaaggactgccatttacgacctcaataccaacagcgcaacgtgctatcctgctcatgacgaggaaatgtcactcagtggaataacgaccgcctataaggtcagaggctatgcctacgccggaggcggtaaacgagtcacaagagtagagattactctggacaaaggccagtcatggatactcgccaatgtgtcctatcccgaagacgactatcgccgtgcgccacgtggcgaatcattatatggcgggagcttggacatttcccggagagaaagctgcttctgctggtgtttctgggaattggacatacccctctctcagttacagaccgcagacgacctaatggtgcgtgcgatggacgaggcaatgatggttcaacctcgcgacatgtattggagtgtgctaggcatgatgaacaacccgtggtttcgagttgtgatacatcgcgaaggtgacaaattgagatttgagcatccaactcttcctgctctcatggccggtggttggatggagagagtcaagaaagatggcggaaaccttaccaatggctattggggagaacaattggccaacgagacagcaagcgttcaggtagcagagcctgccaaagagatatgcatggtgaatacgaaggtgaaccgagtaattacattggaagaactcaaatctcacgagaacgagacggaaccatggtttgttgttaatggggaagtgtacgatgggacaagctatcttgagggtcatcctggaggtgcaacatctatcactggcgccgcgggacaggatgccagtgaagaatttcttgccatccacagcgaaaatgcgaaagcaatgctggtgaactaccacatcggcacattgtcagccactgctataaccgagcttctaaattccgaaccatcgcctcaaccaacaagcacaagagacacattcctcgaccacaaagtctggacaaaagcgcttctatcctcaaaaaagagcgtatctccagatacgaagatcttcaccttcgagctctcgcacgcctcacaagcccttggcttgcctgtgggccagcacgtgatcctgcgccttcgcgaccctgtgacgagagaggcggttatacgggcctacacacctctttccacccccgatacacgcggcaaggtggagatattgatcaagatttaccgcgacacgggcgaccaaaagggtggaaagatgacgcaggcgttggattccatcccgcttgggcatttcgtcgaattcaagggcccagcggggaaattcgaatatctttccaattctctctgctctatttcaggggaaaagagaaaggtgagacgattcgtgatgatttgtggaggttcgggtatcacgcctatttttgccgtgctgagagctgttatgaaggatagcggagatgagacagagtgccttgttctaaatggcaacaggacggaggaggatatactgtgcagagccgaactggatgaactggtaaaggaaaaggggcatagattaagggtgaattacactctcagccgcccgagcgagtcttggaaagggattacagggcatattgatcgagatatgattgtgaaggagttaggcaatagcggggaagcgggagcggaggacatggttctagtttgcggtccaaaaccacttgaagaaaatgttaggactatattcatgggcttacagtggaaggaggaggatatgttgttcttttga

SEQ ID NO: 39139 - protein, 900 aa, Muscodor strobelii
  misc_feature: SGI Peptide ID NO. 573611
  misc_feature (544)..(617): Pfam Id: PF00173 Pfam Desc: Cytochrome b5-like Heme/Steroid binding domain
  misc_feature (648)..(754): Pfam Id: PF00970 Pfam Desc: Oxidoreductase FAD-binding domain
  misc_feature (331)..(479): Pfam Id: PF03404 Pfam Desc: Mo-co oxidoreductase dimerisation domain
  misc_feature (773)..(885): Pfam Id: PF00175 Pfam Desc: Oxidoreductase NAD-binding domain
  misc_feature (123)..(305): Pfam Id: PF00174 Pfam Desc: Oxidoreductase molybdopterin binding domain
  misc_feature (22)..(900): NCBI GI: 256720749 Blast Desc: NECHADRAFT_105480 [Nectria haematococca mpVI 77-13-4]
  misc_feature (22)..(900): NCBI GI: 31322226 Blast Desc: nitrate reductase [Verticillium fungicola]
  misc_feature (21)..(900): NCBI GI: 1171706 Blast Desc: NIA_BEABA RecName: Full=Nitrate reductase [NADPH]; Short=NR gi|693926|emb|CAA59336.1| nitrate reductase (NADH) [Cordyceps bassiana]
  misc_feature (23)..(900): NCBI GI: 39976023 Blast Desc: MGG_06062 [Magnaporthe grisea 70-15] gi|145011655|gb|EDJ96311.1| MGG_06062 [Magnaporthe grisea 70-15]
  misc_feature (11)..(900): NCBI GI: 2342599 Blast Desc: Nitrate reductase [Metarhizium anisopliae]
  misc_feature (10)..(900): NCBI GI: 730144 Blast Desc: NIA_FUSOX RecName: Full=Nitrate reductase [NADPH]; Short=NR gi|296099|emb|CAA80270.1| nitrate reductase [Fusarium oxysporum]
  misc_feature (9)..(900): NCBI GI: 261352230 Blast Desc: nitrate reductase [Verticillium albo-atrum VaMs.102]
  misc_feature (21)..(900): NCBI GI: 46110130 Blast Desc: NIA_FUSOX Nitrate reductase [NADPH] (NR) [Gibberella zeae PH-1]
  misc_feature (7)..(900): NCBI GI: 1561580 Blast Desc: nitrate reductase [Gibberella fujikuroi]
  misc_feature (10)..(900): NCBI GI: 169990914 Blast Desc: nitrate reductase [Fusarium oxysporum]
  misc_feature (21)..(900): SWISSPROT Homolog: EC 1.7.1.3 Nitrate reductase (NADPH)
MSSSSAKYPSSSNVPQYVDKQTFPPSPPETDRESADSGAEPSDTEAGKSKSGSFSVRTKPRYPLPPRHRTDNVVLTEDLKTPDAHVVRDPRLIRLTGIHPFNVEAPLSELYDEGFLTSKDLHYVRNHGGVPKVDDSDMLDWDFTVEGMVDNPIQMKLADLLMDYEQQTYPVTLVCAGNRRKEQNVVRKTKGFSWGAAGLSTALWTGVPIGDVLRAANPKRGARYVCFEGADKLPNGYYGTSIKLTWAMDDERGVMLAHKMNGEALTPDHGKPLRIVIPGQIGGRSVKWLKRIIVTQEPSDNWYHIYDNRVLPTTISPEMSADVPEVWKDERTAIYDLNTNSATCYPAHDEEMSLSGITTAYKVRGYAYAGGGKRVTRVEITLDKGQSWILANVSYPEDDYRRAPRGESLYGGSLDISRRESCFCWCFWELDIPLSQLQTADDLMVRAMDEAMMVQPRDMYWSVLGMMNNPWFRVVIHREGDKLRFEHPTLPALMAGGWMERVKKDGGNLTNGYWGEQLANETASVQVAEPAKEICMVNTKVNRVITLEELKSHENETEPWFVVNGEVYDGTSYLEGHPGGATSITGAAGQDASEEFLAIHSENAKAMLVNYHIGTLSATAITELLNSEPSPQPTSTRDTFLDHKVWTKALLSSKKSVSPDTKIFTFELSHASQALGLPVGQHVILRLRDPVTREAVIRAYTPLSTPDTRGKVEILIKIYRDTGDQKGGKMTQALDSIPLGHFVEFKGPAGKFEYLSNSLCSISGEKRKVRRFVMICGGSGITPIFAVLRAVMKDSGDETECLVLNGNRTEEDILCRAELDELVKEKGHRLRVNYTLSRPSESWKGITGHIDRDMIVKELGNSGEAGAEDMVLVCGPKPLEENVRTIFMGLQWKEEDMLFF

SEQ ID NO: 39140 - DNA, 6310 bp, Muscodor strobelii
  misc_feature: SGI EST ID NO. CUFF.94477.1
  misc_feature: Variant of the nucleotide sequence at SEQ ID NO 39138
cgacgtcacgccaccttaattctgtacataattgtgattattcaacgcaggacgaatcacagggcgcaatttcttatcgcaactccggtcgaatcctccaacaactactggtcaattctttcaaacgttgctgtcaggaggcgtgatgcacaattgaaccattgaagggctagatctcggaaggcaatccgaatctcatctagatagataatcgaattgaacatctccgctgaacatttttactcctgataagagcagaatccgcggggatcctccttcacaatacaattgacgaacaattgacccgctcgtgacaactggcacactcaagtcgcggtcacaaaactgacaattgggtgaccgtaagctcggtcgctccgcggttagtaacgcctcccaccgctttcgcaccgcatacgtgctcgcatggattcccggcaatgcaacgctgggtcgggggtttgtcgccagcggcacagacctagtacaacagcaagaggtgaagatgattgcttcatcgtcctccacgtaagaagatcgtgccaagatggcaaccggagatgcctgtattttgagaacgcatagtcgatctctgactgccattctatcttcacagatccgcacttcaaaaaatcaggtgctttgtcgcttacgcatgtttcatccatcagtcacctagggttgagtgctatcaagttttaagcctgtgttacttgtggcatcactttctcggcacttaatgttgtattcttgtatcagtcctttagttttgcataatgtcgagctctagcgccaagtatccaagctcctcgaatgtacctcaatacgtcgacaagcaaacctttcctccatctcctccggagaccgatagagagtcagcagattccggcgcagaaccaagtgatacagaggcagggaaatccaaatccggcagcttttctgttcgaacgaagccacgttatcctcttccacctagacacaggacagacaatgtcgttctcacggaagacctgaaaactccggatgcccatgtggtgcgcgaccctcggctcattcgcctgactggcattcatcctttcaatgtcgaagctccactcagcgagctctacgacgaaggctttttgacaagtaaagatctacattatgtccgtaaccatggaggagtaccgaaagtcgatgattcggatatgttggactgggatttcacagtagaaggcatggtggataaccccattcagatgaaacttgcagatcttttgatggattacgaacagcaaacctaccctgtgacgctagtctgcgcgggaaacagaagaaaggaacaaaatgttgtacgcaagacgaagggattctcatggggagccgctggactctcgacagctctatggactggcgtccctatcggtgacgtattaagagcggcaaaccccaaacgaggcgcaagatacgtatgcttcgaaggggcggataaattaccaaatggttattatggaacgtctatcaagttgacatgggccatggatgacgagcgcggagtaatgcttgcccacaagatgaatggcgaagcactcacccctgatcacgggaagccacttcgaatcgtcatcccgggacaaattggaggtcgaagcgtcaagtggttaaagagaatcatcgttacccaggagccaagtgataactggtaccatatctacgacaacagagttctaccaaccacgatatccccagagatgagcgcggatgtccctgaagtctggaaagatgaaaggactgccatttacgacctcaataccaacagcgcaacgtgctatcctgctcatgacgaggaaatgtcactcagtggaataacgaccgcctataaggtcagaggctatgcctacgccggaggcggtaaacgagtcacaagagtagagattactctggacaaaggccagtcatggatactcgccaatgtgtcctatcccgaagacgactatcgccgtgcgccacgtggcgaatcattatatggcgggagcttggacatttcccggagagaaagctgcttctgctggtgtttctgggaattggacatacccctctctcagttacagaccgcagacgacctaatggtgcgtgcgatggacgaggcaatgatggttcaacctcgcgacatgtattggagtgtgctaggcatgatgaacaacccgtggtttcgagttgtgatacatcgcgaaggtgacaaattgagatttgagcatccaactcttcctgctctcatggccggtggttggatggagagagtcaagaaagatggcggaaaccttaccaatggctattggggagaacaattggccaacgagacagcaagcgttcaggtagcagagcctgccaaagagatatgcatggtgaatacgaaggtgaaccgagtaattacattggaagaactcaaatctcacgagaacgagacggaaccatggtttgttgttaatggggaagtgtacgatgggacaagctatcttgagggtcatcctggaggtgcaacatctatcactggcgccgcgggacaggatgccagtgaagaatttcttgccatccacagcgaaaatgcgaaagcaatgctggtgaactaccacatcggcacattgtcagccactgctataaccgagcttctaaattccgaaccatcgcctcaaccaacaagcacaagagacacattcctcgaccacaaagtctggacaaaagcgcttctatcctcaaaaaagagcgtatctccagatacgaagatcttcaccttcgagctctcgcacgcctcacaagcccttggcttgcctgtgggccagcacgtgatcctgcgccttcgcgaccctgtgacgagagaggcggttatacgggcctacacacctctttccacccccgatacacgcggcaaggtggagatattgatcaagatttaccgcgacacgggcgaccaaaagggtggaaagatgacgcaggcgttggattccatcccgcttgggcatttcgtcgaattcaagggcccagcggggaaattcgaatatctttccaattctctctgctctatttcaggggaaaagagaaaggtgagacgattcgtgatgatttgtggaggttcgggtatcacgcctatttttgccgtgctgagagctgttatgaaggatagcggagatgagacagagtgccttgttctaaatggcaacaggacggaggaggatatactgtgcagagccgaactggatgaactggtaaaggaaaaggggcatagattaagggtgaattacactctcagccgcccgagcgagtcttggaaagggattacagggcatattgatcgagatatgattgtgaaggagttaggcaatagcggggaagcgggagcggaggacatggttctagtttgcggtccaaaaccacttgaagaaaatgttaggactatattcatgggcttacagtggaaggaggaggatatgttgttcttttgaggcttcggcttttaaaataccatagcgttgttcggcggcatgtatataagtatagaattcataataatggaagtggtgtttcttaatcaaggcattgccaattgagcaatgcgactatttaccaaccacactaaagatgctaaagatgagaagttctcagtgaatgaggtcatacatcttctgtgaggacgggaggatgtaatgctgaccacgctttggaaactacacattgaatgtcacagccagcgtgcacaaatacaggttggtacttcaagcgtaaggtattgaggaagccgcttataagaaacgacgatcaggatgcgcaagtcattaggtagataacatgtgcgaaacttgtcgcattcagtggtatatctagatacagaggtctaataccagacattaagctgtctcgaatctttttcaagaccgacttgtgaccttaatttcgaaggcatttgaaccccatcccttcttaaaacgccaatacagactttagaaactcattagatctacgcggtggttagcaatctcatcaagcacatttaggacgggagaaaaacatacctctaccaaacaatcccctcttcaaccaatccatcgccataaggaacttcgtcctaatacctacactttgagcgaaatacgcgctcctccatgcatacacagcccataaaccaccggtgaaattccacttgccaccaaggtcgaaaatcgcggaattgcccacatacgccagactacccagatgatgatactcgaatgctttataacaagcctcgtccacatcaccatctttaatttcattcgcgcttagccccggagcggcgtgagccaatttgttgaatttgttcgcgaggtagataccttgctgattggcgcgctgcgccgtagcggggagtgaggtcagcttgctgtcaatctgcttcaggagctctctaagctcgccgaaatcgagagtaccagagtggtctttgtcgaaagtttcgaagagtttgtctagacgcttgagatggccgacagactgggggaacttccgcttcacgtcattggcgacgttgcgccattcgctgaatgtgagctcgagattctccgggtctttaccgtgcttgaatgcgaggccgcgcaggaatgagacgacgttatccgcaacgttgttctgtactgtggagcaatcgccgatggcgtacacatcgccaagaggcgtgccgtttagtcgaaggtgagtgtcagtctcgagagcgtgtcgattgttctgtacattgcccagcttggcagctatacgctggcaaataggcgcttgtgacacaccggtcgaccagagacagaagcccatttccagctccttggtaacaatctctccattttctccattttgagtaaagatgatcttatcgggtttgacttccttgactcgggagtttgtcagcacttgaacctgatcgcgcgcgaatctgtcttccgcatatttcgacaaggcttcatcatatgtgttcaggatgtgagatcggctctgaatgatatggacggagatttcattgcgtaggagtcgagggaatcttctggtcagatcttcgttcagcaggtcgaaaagctcagcagcaaattccacaccagtcgggcctccaccactgatgacgaaagaaagaagtcgtttacgctcggcatcctcagtcgtgggcaggcaagccagttccagattcctcataacttgattgcgaatcatacgagcatcgttgatatccttcaagaaaaagcagttctcgaggcccttaactccgtgaggattggtgactgatccaactccaatgacgagcttgtcataggggacataaaaccggacttcctttccgtacgcatcagtctgcgaaacttcgaccagcttgtgagagaattcgacatcttccgccgtcgcccgtaggtaatgaccactgactctagacaggatccgtcgtattggctcgacgagacttcggaattccaaggtaccgacagtggcagatggcagcataggagtaaacaggaaataattcttaggactgatcagcgtgacgtggtagtcatctggattgagctgtttgagcagcgcaacgctaccccagccgccgcccaatatgaccaatcgtggcttctctttctgcgccttagtctcatcactgtcgttatcgtcaagcagagcttctactatgggtaagtttttagggccaccgcgccgtggggctaaggccatttccgagacatgacagtcgccgaaggtaaaaccttctttgtatgtagtggcatcgtagatgaaaaaggcagcgaacagggctccaataaagcccacgcctgtgccgaagatggcagcggtgcggtagccgaagttgaggaacgcggacgggcgctggggtagaggcttgcccgagaggcttcgtcggaaagggagaattggctggtatggtttggatataattgcccgcgccgatgttgtggatttacgactaaatgttccgagttgacgactttgcgcggcatgaaacgggatcactgccttcaatggcacaaagccacggccgcatgtcggagagcctgcacttgagcttgagctcgggtgtaactgggcgagccgaagtgcgcggccagcggtggctccaggccgcgtcgccatgctcgctgtcgactattataattacgggtgataatctacggtcgaagcgacatcgtattgcaattcagcgcaggaaaagttcaggcgcgttttggtgttttgatgtggtgatctgcgggtttatagctactacatgagataatagcagggaatcaccgctgtcgttttaagtggtcaattgtcg

SEQ ID NO: 39141 - DNA, 9774 bp, Muscodor strobelii
  misc_feature: SGI cDNA ID NO. 573612
  misc_feature: Encodes the peptide sequence at SEQ ID NO 39142
atgagcaccagtgagaggggtggcgccattgcaatcattggcatgggctgtcggtaccctggtggtgcacacagtccagaggatctgtggaatttagtcgcttccagccgcgacacatggagtgaggttcctaaagatcgcttcaatgcacaggcattttaccacccagaccccagcgcacctgaggccgtcggccagaagggcgggcactttctcaaccaggctttggcggatttcgacccaggtttctttgatatatccgcacccgaggccgaggctttggatccacttcaacgtgtcgtgctcgagacggcgtgggaggccgtagaaaatgcctgtatacccatgacgaagtttcggggttcggatacggccgtatacatggcaatgttcggacacgacgccgagcagctcgcccacaaagatccgttggacttcaatagatataaatactatggggtcacgaaacctctgcttgctaataggctgtcatacattttcgatcttcatggtccatcagtcatgctcgacacagcatgttccggcagtttagttgctatacacttggcatgtcaagctttgaggttgggtgagaccaccacagccgtggccggtggcgttggcttgacattctccccaaaccagatggcactcatgtcactggcaggcgccttcaacagtgatggccattcatacacttgggacgagcgtgggcatggttacgggcgtggagaaggagtcggcatagttgttgttagacagctgaaacgcctcgatgacgctatggccgacggtgatccaattcgtgctgttatccgctcttcggctgttaatcaagatggcaaaaccaatggaatctccctccctagccagacggcacaagagctgctcgtccgcgatgttttccgcaacctacaattctcccataaggacgtacaatacgccgaggcacatggaacaggcactgaggctggcgataagatagagatgcaggctattcgatctgtactagccttgaaccgcgaggctgataagccgctgtttgtcggttcagtcaagtccaatattggacactcagaagcggcaagtggcgctgcgggacttatcaggacggtgatggccatggagaaaggccagatcgcacctcaggctttgctcaataagtttaaaccaggtttagagcctgatggttggaatattgtcgtaagtcaactgcaattctctacattagtgggcaatacaaatactaacgtaaaagagattccgcgagaaatgataccttggccgacaatagaaggctatcgtagggcagtcgtaagtaactttggctttggtggtacaaactgcatgttggtgctcgagtctgctgctcaaccaaaaccattgccaaatgatggaacgctgagcgaaacagaaacgtcacatagaacagagcactccgaagcctccgaagcttcccgcctcttttttatatctgccaaatcggaacattccgcttccaaggcagtcggaagattgctgaaacacctgaggaggcatatgtctatcgatcttgatgcactctcgtataccctcgccaataagcgcagccacttttcttggcgctttgcagtcactgctcatgatacagactcgttgattcgaaaactctctgaagaagctgtaccccataaaccgcctgggcggaagagcttgatcgttttactatttacaggtcaaggtgcgcaatgggctcagatgggctataagctcttcgctgtcagcccgatatttagaaagtccatcgaagattttgatgatttgctacaaaagaaacttggcgcggactggagtcttttggcggagctctcgcatggcgagtcgtctacccgcctcaacgacagtcgctttgggcagcccgccagcacggccattcagctagctcttgtcgacttactcagaagctggggaatattaccagcagccgtgttgggccattcgagcggcgaaattgccgccgcctacgccgccggagtgctcacgcgcagtgcagccatgtccatctcttatcatcgaagtttcctggctggtatatccaaagagaaagctgacgggccaggggcaatgcttgcagttggcctaggagagaaagaagtagcaaaatatctggaaggtcgcgagggactaaatacagcatgcatcaacagcccgttgagtgttaccgtctctggagatgagaaagaaattacgaaactggaaatcgagctcgaaaaggagcagattttctaccgtcgactcaaggtcgacaccgcttaccactcgtatcatatgcagctagtagccgacgactacttgaaacgtctccaggaactagactcaagtagcaccggtcccatgacgcgcttcttttccaccgtgacagagcaggaaaagcacaatcacttcgatgcctcttactgggtgagcaatttagtatcccctgtacggtttgccggtgcgctccaaacaatgatgcgcgaggtaggaagcggcggacaatttgtcaatctagttgaagtcgggccacacaaggcccttgcaggacctgtcagacagacacttcaacagcagcaaacggatggactcttgtatacgtacactcccactctgaatcgaggggataactgttttgcttcactgctcaatacagcttcccagctatacaaactgggtgtagatggtttagacccggtgatcgttgctgccctgggcatctcaggctccaaaccctcgcctgctcctctgactgatctcccgccttacccctgggaccatcaggtccaatattggaccgaatcgcgtctaagtcgggaatatcggttccgtcgccacgggtaccacgaccttttgggctcgcgggtaatcgcatcgccaagtatcaacccatcatggcgcatgttattaagccatgagaggataccttggctcaaagaccatatggtggatgatattgcagtcttccctgccgctgcatatatgaccatggcgatccaagctctggcgcaagtgcacgacgacggcccaattccggttcagggatacaatctgaagcgtatttcattcaaaagggcgcttttcgtcccacaggacgcacaagcgattgaagtcatgttaaacttcaggcttctggacattgatgattcatacaactttaccgtttcctccgtctcagcccagggcaaatggcttgagcactgcactggcaacatctcccggagagaggacaaagcatttgggcaatcgggtgacgggcaaagacttccacgccactttgaggatgtaaggaaggcatgtaccatggttctcagtggtgcggaactctatagccgtcttgcagctttaggtaactattatggcccttgcttctccatttgtagagaggtacgtctgggggatttccaagccgtaagtacagtcgagatcccagacattgcctccactatgccagccaagtatattcagccgcatgttgttcatccgacagtactggacggtattctccagaccgcactgccagtttttgcacaacatgccaagcctgggtcggttatgccactctacatagctgacgtctggatctccaccgacatcataagccaacacggccagcagcttcatgcaatctgcgatttgagcgacacgtttgctcgctcaacaaacttcgatgtctcggccttccagtacgcgaaacattctggcagtgaaagcccagatttacagtgcgtcctgacgatatcaggtggcgaagcgctcgtgctgggagatactaaagcagcatctgtcatggagtccgagcaagagaaagagaaaaggaaagagagggaatttatttggacatcaaaatggggcgtggatattatgtcagtaacagcagagatgcttgaatcggtcgttgtgccgctccagtctgacaaggcgggcatgacgcagggcgagaaggtcgatctcttgaacgcaatctcagcgaggtacattagcatggcgatgcaagaaatagatagcaatctaggtggtgaagatgctatcgccaaggactttcgcaagcaccaatggaggtctttccaggctttggcagaatcagctggctggaaagaccttgctaaccaggtccccaattcttacaccgagctaagacagctgacagcacacctcggagccgagggagaagcaacagagcgcattggttcgaatcttgtgcatattcttaccgggcacactgatgcccttggcctgttgcttgaggaccagctactatatcgaatataccacggcgacgagggtgcgcgagcaagccagtacatagctgactatgcggcgcacttgaccttccaacggccaggagtacgcatattagagatcggcgctgggactggcggcacaactgccaaggtctttcaagcatgtagtcaactgaatgccgcgcccttctgcacggagtacatgttcaccgacatttcttcgggatttttcgacgaggtgcggtccgggccactgaagtcatggtcacacatgttgtcgttccgggcgtttgatctagaaaaggacccgatcgaacagggcttcgaggctaatgcatacgacctggttattgcagctaatgtagttcacgcgactgcgagcatacggaagtcatcgaaacgcatccgacagctcctcaagcccggcggcgtactcggcctagtagagctaacacgatcgaccacgtcgggaagcatgatatttggatgtctcgagggatggtgggccggcgttcatgaggggagagtagatggccctgttcaaaatgctgagcaatgggatagccatctccgtgcatcagggttctcaggggtcgatatagctgcttacgaccttcctgaaccacaacggcattcggctttactactgtcgactgcccttccagaggctatggcggacgataagtgtacaaagggagtgtctggggagtgcaacgaagtcctgatacacatgctcagcgctttgccagagacatcggcaaaaagttattttgtagaaagtctagcccttgagttggccaacacaaatcaatacaaagtggctatgggcagctggttggactcaggagtcaacgaccagtgctcatacgttatccttgactcagccgagaatcgccttataacgaaagcgacgcaagaacaattctcgcgagtaatgagcctgctcaatggcgccaccaagttatactggattacgtttgcgggaacaacgggtaagggagcaaacaggatcaagccagataatgcactggtgacaggtctcgcacgtgttgcacgtgcagaaaacaacaagctggaatgtttcacactggatgtacaggatgacatgacaacatcgccagccctcgtgcgggattcgatcatcgaactcatcagatcgagcgaggctcggatggctttgggcgtacctctggaatatgaatatctactccagggtggtctcatgcgcattcagcgcctcgtgaccgagccgtcacttcgacgactagtgactgacgactacaaggatggcgataatgacactgataaggagacgattccgttctttagcacagagaggctgcgactcgaggttcaaaagccaggattgcttgggagtctctcttttgttgtggaacaagagccagaaccagccctggaaccctacgaggtcgtgataaagccacaggcctggggagtcaatttcaaagacgtactgattgcgcttggtcaactccaccctagacagacaatggtgggcgaggtggccggtgttatcgtacgcgtgggttcgaaggcgtctgagatgttccagctccggcccggcgatcgggtggctgcttttgccacctttaaaaagtactactcgaacctcacccggactgatgccagatttttgcaaaaaatccccgagagcatgacatgggtcgaggctgcgtcagtacctgtggcgtttgcaacagcatcgtactcgttgatcgactgcgccaggctagagcgaggtatgacagttctagtgcacgcggcgacgggagccttggggcaagccgccgtcgaaatcgcaatgaaagctggtgcgaccgtttttgcaacagccggcacccccgagaagcggcagctggttgctgagcgttttggtattccagaactacatatcttcagtagtcgcacgtccgactttgcccgtagtattaaacatatcacgggcggtagaggtgtcgacgtagtgctcaattcactagctggaccgttgctttcctcatcatgggaatgtgtagccgacctaggcacctttgtcgagctgggcaaggtagatatctggaaacgtgggcagattagcatggaaccgttcgatcgcggggtgcgcttcgtgtcggtagacatgggggtgctttcgcgaagacagcctgaggtgatgcaacacgtcctgcagcgagtctttggtgatgtcatggccggtcgtgtgaagccgctgccgccagcgactacttactccatcggcgatattgaaacggcttttcgctctatgcaagccggaaagcatattggcaagatcgtgctacaagctgatcaagatacaactgtgatttcccataatcagaagaggcgtccacctccaccgcggctctctggcgacgcgacatatatcatagccggggggctcggggctgtaggcaaggcactttgccttcacctccaagtactcggggcgcgtcatattatcctcttatccagaagagagtttggggatgaggacaggttggcccaggagaaggcacttatgtgtatggaaacgcccggatctcttattaaaattatgacgtgtgacgtgtcgaaccaagatgcgctccgtaaggccaccgtagagattcaagacagcaacttaccgcccgtcaaaggcgtgatccagggagccttggttctctcggatcggaccctcgatcagcttacccaagccgacttcaaagcggtgcttgcgccaagataccagggcacacagaatctctggtcggcgttcgcaatcccgcaaccgcttgacttcttcctcctgctttcgtctatgagcggcataataggctcactaggccagggtaactatgccgcgactgccacgtaccaggatatgttcagttacgccgtcgcgcaggcagcgtcttcgctggagtcttccttgaatgcgggtgctgagcagagcctgacaagaaatgtagtgtcacttgacctccccctaattcgcaacacacaggacgtcactcaagagcacgtcgagggcttacatcgccaaggtggtttatccgtcgatatagaagatgcattcacgatcatcgattacgccatcagtgggcgcgctatgagtgatgactgtcatcaaatctcattcggaatacacccagaactaacacgagatgctccattgttacgccatgctaaatttgagtacaagatgcagcagaaacaggctgagaatctgggtaccggtaatggtcaactcaatcatataagcatgaaacagaacattgacagggctattggtgctgcgacttctgctgccgatgctgtagagcttatcgtaacagctctgatagacaaggtatcgtctctaacagccgttggtggccagttagattctaacgttccggtggctggcatggggctagactcattgatcgcaaccgagctcaagaattggatattcaacacgttatcagcgcgagtgcagaacgcagacatagtggacgcgcccagcttaagggcgttggcagcacagatagctcaagtttcgaccttgttgagcgggaaacagttcaagtttgatggaataaaccaaatgaagaagagggaaaagaaagatgaaaccgacaccagcatgagcgatgatgccagcggctcagacttgataacgtctgcgtcgtctcttgaaacgagcacggatggtataaatgggatgttgccaccagagaccaacgccaacgaacagcagatgctgcccaagtatcccgtacagccgctcaagcaagtgctagacaacttcgtcgaggcggtatcccatatcggtaccactacagagctgaagcaaacacgccgagcgatggcagcttttctagaccctcatggcatgggccaggtaatgcagacgcgtctagaggggtactctcagtccaggagtgacagtaccagtcgtgccttgacaaaagtcgaccaaggcgatgtagtggagatgtacgttcgtagcaaatggctacgtactcgatcatggcgtccaagattgcggaacttcttcggcaccattccatataccatatcatctgggtctgaacgcgtccgattgcaggttataagagccgcgacgctctcgcttgcggcgtataattataagctcgcgctagatcagggcaaggtgcagcaggattaccaacacgatcaaccactttccatggagacagtccattggatattcaacgcccaccgaacgccggctatgggatgtgatcatatggaccggtggcccggtcatgattacatcgttgttatgcgtcgcgggcacgcctttaaagtccagctccagagctcagagacggctgtattaacagtcgagcggcttgcgaccatttttgaaagcatcctggcacatccgacagcaggcgaggtcaactgggcttgcgtctttactacggcgcatcgtgacgaatgggcaaccacacgtgatcagctcatagctgccaatcgggaaaacgccgagttcatagattgcattgagaagtcgctctttatcgtatacctagaagacgcaataccaaacacaccagcagaacgggctgaagtgtttcttcttgacgataattcaaatcgctggctggacaagactctggggcttattgtctgtgctaacggtgtggcagccgcgtttcttgagcatactatggtggacgggagtacatttgagggccttgccaaagcccttgctgaatttaaggaagacctgcacgagcacgatcaaccgaagacacgtaatgatgaccacagtatcgtgtacggtcctggtttcacctacctgccctttacgatgccgaccctgctagccgaccgcattaaaacgctccgagcagaccacattgccgcccatgatggatataagcttgtcaactacgatctgacatcgtatggcacccgctggctacgagagcaccgtctgcctcccaagagcgtgatacaggtgcttgtgcagcttacagtccgccttgtgctaggcactaacccatcagccgtcgacgtcgtgagccagcgtccgttccaaggagggcgaacagacatgatttatacctcgattcccgagataacagctttttgcaaggaagctacaggcgccgtccaaatacaaaatctactagtattgttcaaagaggccgtcagggcacatgccaagttgctcgctctggcccagcgcggcaaagggtggcgctggcaccttgctgcgctaggcgagaccctacgtggcgacgaggagctgccagaactgtaccgcgatcccgtatatttgcgcacaggtgagaggcgagtcgctacaagcttcacggagtttggcgtgccggagatgggccgatgtccacctaagcgtaaggacgtatggtttggcatcgaggctttcgaagagcgcgtgcacttctctatcataaatggacaggggagatctgaggatttcgtcgaaaagctcgcgaccgctgcaaatacgataagagatattgtcacacggttagagtga

SEQ ID NO: 39142 - protein, 3257 aa, Muscodor strobelii
  misc_feature: SGI Peptide ID NO. 573612
  misc_feature (567)..(900): Pfam Id: PF00698 Pfam Desc: Acyl transferase domain
  misc_feature (1893)..(1974): Pfam Id: PF08240 Pfam Desc: Alcohol dehydrogenase GroES-like domain
  misc_feature (2218)..(2390): Pfam Id: PF00106 Pfam Desc: short chain dehydrogenase
  misc_feature (2005)..(2153): Pfam Id: PF00107 Pfam Desc: Zinc-binding dehydrogenase
  misc_feature (2666)..(3251): Pfam Id: PF00755 Pfam Desc: Choline/Carnitine o-acyltransferase
  misc_feature (8)..(261): Pfam Id: PF00109 Pfam Desc: Beta-ketoacyl synthase, N-terminal domain
  misc_feature (269)..(387): Pfam Id: PF02801 Pfam Desc: Beta-ketoacyl synthase, C-terminal domain
  misc_feature (2218)..(2419): Pfam Id: PF08659 Pfam Desc: KR domain
  misc_feature (1457)..(1566): Pfam Id: PF08241 Pfam Desc: Methyltransferase domain
  misc_feature (1457)..(1564): Pfam Id: PF08242 Pfam Desc: Methyltransferase domain
  misc_feature (2782)..(2985): Pfam Id: PF00755 Pfam Desc: Choline/Carnitine o-acyltransferase
  misc_feature (2218)..(2379): Pfam Id: PF08659 Pfam Desc: KR domain
  misc_feature (10)..(3253): NCBI GI: 154319269 Blast Desc: BC1G_02586 [Botryotinia fuckeliana B05.10] gi|150857017|gb|EDN32209.1| BC1G_02586 [Botryotinia fuckeliana B05.10]
  misc_feature (3)..(3253): NCBI GI: 212543173 Blast Desc: polyketide synthase, [Penicillium marneffei ATCC 18224] gi|210066648|gb|EEA20741.1| polyketide synthase, [Penicillium marneffei ATCC 18224]
  misc_feature (10)..(2313): NCBI GI: 40787328 Blast Desc: polyketide synthase [Botryotinia fuckeliana]
  misc_feature (10)..(3254): NCBI GI: 46122833 Blast Desc: FG05794.1 [Gibberella zeae PH-1]
  misc_feature (10)..(3257): NCBI GI: 189200591 Blast Desc: mycocerosic acid synthase [Pyrenophora tritici-repentis Pt-1C-BFP] gi|187983731|gb|EDU49219.1| mycocerosic acid synthase [Pyrenophora tritici-repentis
  misc_feature (452)..(3183): NCBI GI: 156053511 Blast Desc: SS1G_06923 [Sclerotinia sclerotiorum 1980] gi|154704701|gb|EDO04440.1| SS1G_06923 [Sclerotinia sclerotiorum 1980]
  misc_feature (10)..(2313): NCBI GI: 256723827 Blast Desc: NECHADRAFT_37058 [Nectria haematococca mpVI 77-13-4]
  misc_feature (10)..(2600): NCBI GI: 171688048 Blast Desc: protein product [Podospora anserina] gi|170943986|emb|CAP70096.1| protein product [Podospora anserina]
  misc_feature (2)..(2602): NCBI GI: 121704114 Blast Desc: polyketide synthase, [Aspergillus clavatus NRRL 1] gi|119398465|gb|EAW08895.1| polyketide synthase, [Aspergillus clavatus NRRL 1]
  misc_feature (10)..(2591): NCBI GI: 23574645 Blast Desc: polyketide synthase [Penicillium citrinum]
  misc_feature: Useful for fungicidal and/or biocontrol applications
MSTSERGGAIAIIGMGCRYPGGAHSPEDLWNLVASSRDTWSEVPKDRFNAQAFYHPDPSAPEAVGQKGGHFLNQALADFDPGFFDISAPEAEALDPLQRVVLETAWEAVENACIPMTKFRGSDTAVYMAMFGHDAEQLAHKDPLDFNRYKYYGVTKPLLANRLSYIFDLHGPSVMLDTACSGSLVAIHLACQALRLGETTTAVAGGVGLTFSPNQMALMSLAGAFNSDGHSYTWDERGHGYGRGEGVGIVVVRQLKRLDDAMADGDPIRAVIRSSAVNQDGKTNGISLPSQTAQELLVRDVFRNLQFSHKDVQYAEAHGTGTEAGDKIEMQAIRSVLALNREADKPLFVGSVKSNIGHSEAASGAAGLIRTVMAMEKGQIAPQALLNKFKPGLEPDGWNIVVSQLQFSTLVGNTNTNVKEIPREMIPWPTIEGYRRAVVSNFGFGGTNCMLVLESAAQPKPLPNDGTLSETETSHRTEHSEASEASRLFFISAKSEHSASKAVGRLLKHLRRHMSIDLDALSYTLANKRSHFSWRFAVTAHDTDSLIRKLSEEAVPHKPPGRKSLIVLLFTGQGAQWAQMGYKLFAVSPIFRKSIEDFDDLLQKKLGADWSLLAELSHGESSTRLNDSRFGQPASTAIQLALVDLLRSWGILPAAVLGHSSGEIAAAYAAGVLTRSAAMSISYHRSFLAGISKEKADGPGAMLAVGLGEKEVAKYLEGREGLNTACINSPLSVTVSGDEKEITKLEIELEKEQIFYRRLKVDTAYHSYHMQLVADDYLKRLQELDSSSTGPMTRFFSTVTEQEKHNHFDASYWVSNLVSPVRFAGALQTMMREVGSGGQFVNLVEVGPHKALAGPVRQTLQQQQTDGLLYTYTPTLNRGDNCFASLLNTASQLYKLGVDGLDPVIVAALGISGSKPSPAPLTDLPPYPWDHQVQYWTESRLSREYRFRRHGYHDLLGSRVIASPSINPSWRMLLSHERIPWLKDHMVDDIAVFPAAAYMTMAIQALAQVHDDGPIPVQGYNLKRISFKRALFVPQDAQAIEVMLNFRLLDIDDSYNFTVSSVSAQGKWLEHCTGNISRREDKAFGQSGDGQRLPRHFEDVRKACTMVLSGAELYSRLAALGNYYGPCFSICREVRLGDFQAVSTVEIPDIASTMPAKYIQPHVVHPTVLDGILQTALPVFAQHAKPGSVMPLYIADVWISTDIISQHGQQLHAICDLSDTFARSTNFDVSAFQYAKHSGSESPDLQCVLTISGGEALVLGDTKAASVMESEQEKEKRKEREFIWTSKWGVDIMSVTAEMLESVVVPLQSDKAGMTQGEKVDLLNAISARYISMAMQEIDSNLGGEDAIAKDFRKHQWRSFQALAESAGWKDLANQVPNSYTELRQLTAHLGAEGEATERIGSNLVHILTGHTDALGLLLEDQLLYRIYHGDEGARASQYIADYAAHLTFQRPGVRILEIGAGTGGTTAKVFQACSQLNAAPFCTEYMFTDISSGFFDEVRSGPLKSWSHMLSFRAFDLEKDPIEQGFEANAYDLVIAANVVHATASIRKSSKRIRQLLKPGGVLGLVELTRSTTSGSMIFGCLEGWWAGVHEGRVDGPVQNAEQWDSHLRASGFSGVDIAAYDLPEPQRHSALLLSTALPEAMADDKCTKGVSGECNEVLIHMLSALPETSAKSYFVESLALELANTNQYKVAMGSWLDSGVNDQCSYVILDSAENRLITKATQEQFSRVMSLLNGATKLYWITFAGTTGKGANRIKPDNALVTGLARVARAENNKLECFTLDVQDDMTTSPALVRDSIIELIRSSEARMALGVPLEYEYLLQGGLMRIQRLVTEPSLRRLVTDDYKDGDNDTDKETIPFFSTERLRLEVQKPGLLGSLSFVVEQEPEPALEPYEVVIKPQAWGVNFKDVLIALGQLHPRQTMVGEVAGVIVRVGSKASEMFQLRPGDRVAAFATFKKYYSNLTRTDARFLQKIPESMTWVEAASVPVAFATASYSLIDCARLERGMTVLVHAATGALGQAAVEIAMKAGATVFATAGTPEKRQLVAERFGIPELHIFSSRTSDFARSIKHITGGRGVDVVLNSLAGPLLSSSWECVADLGTFVELGKVDIWKRGQISMEPFDRGVRFVSVDMGVLSRRQPEVMQHVLQRVFGDVMAGRVKPLPPATTYSIGDIETAFRSMQAGKHIGKIVLQADQDTTVISHNQKRRPPPPRLSGDATYIIAGGLGAVGKALCLHLQVLGARHIILLSRREFGDEDRLAQEKALMCMETPGSLIKIMTCDVSNQDALRKATVEIQDSNLPPVKGVIQGALVLSDRTLDQLTQADFKAVLAPRYQGTQNLWSAFAIPQPLDFFLLLSSMSGIIGSLGQGNYAATATYQDMFSYAVAQAASSLESSLNAGAEQSLTRNVVSLDLPLIRNTQDVTQEHVEGLHRQGGLSVDIEDAFTIIDYAISGRAMSDDCHQISFGIHPELTRDAPLLRHAKFEYKMQQKQAENLGTGNGQLNHISMKQNIDRAIGAATSAADAVELIVTALIDKVSSLTAVGGQLDSNVPVAGMGLDSLIATELKNWIFNTLSARVQNADIVDAPSLRALAAQIAQVSTLLSGKQFKFDGINQMKKREKKDETDTSMSDDASGSDLITSASSLETSTDGINGMLPPETNANEQQMLPKYPVQPLKQVLDNFVEAVSHIGTTTELKQTRRAMAAFLDPHGMGQVMQTRLEGYSQSRSDSTSRALTKVDQGDVVEMYVRSKWLRTRSWRPRLRNFFGTIPYTISSGSERVRLQVIRAATLSLAAYNYKLALDQGKVQQDYQHDQPLSMETVHWIFNAHRTPAMGCDHMDRWPGHDYIVVMRRGHAFKVQLQSSETAVLTVERLATIFESILAHPTAGEVNWACVFTTAHRDEWATTRDQLIAANRENAEFIDCIEKSLFIVYLEDAIPNTPAERAEVFLLDDNSNRWLDKTLGLIVCANGVAAAFLEHTMVDGSTFEGLAKALAEFKEDLHEHDQPKTRNDDHSIVYGPGFTYLPFTMPTLLADRIKTLRADHIAAHDGYKLVNYDLTSYGTRWLREHRLPPKSVIQVLVQLTVRLVLGTNPSAVDVVSQRPFQGGRTDMIYTSIPEITAFCKEATGAVQIQNLLVLFKEAVRAHAKLLALAQRGKGWRWHLAALGETLRGDEELPELYRDPVYLRTGERRVATSFTEFGVPEMGRCPPKRKDVWFGIEAFEERVHFSIINGQGRSEDFVEKLATAANTIRDIVTRLE

SEQ ID NO: 39143 - DNA, 1089 bp, Muscodor strobelii
  misc_feature: SGI cDNA ID NO. 573613
  misc_feature: Encodes the peptide sequence at SEQ ID NO 39144
atggatatcaacgattggacaagttttgtcaccctcggcatcatctgcgtcgccggcttaggattagatatggattcagtcctgaaccaagacgaagtctatacgaatttgcgaaaagtctacaagatggtatttaagcaggaaaaggcagacttgataatgctgtttcttcgtgtttacattctcccttcgtgggcgctgccctacgttcccctcaagagaaatagagccctcaggaaagcctcacaagatcttcgtgacgaatgcaagaaactgatccagcagaggaaaacagaactggagaacggcgtaacggaagaaactgaaatgaatatcctcacactcgccctatcacgtagcggctttactgacgagaacttagtcgatcagctttgtactttcttggccgctggccacgaaacgacagccactgcactgacctggatggtatatattctgagtactcatcctgatatacaaacaaagcttcgggaggaaatccgcgccaaattgcccagcccttcacgcgatgcgcaagagctttccacaattatcgacaaccacatgccctatctccacgcagtatgccaagaagtcctacggttcttcgcgccagtgccggcgacattccgcgaagcagtcgtagacacgacgatcaaaggctatgagataccgaagggcacccagctctttctctgtttgcgcggaacgaaccgcaacaaggctgtatggggcgaggacgctgaggagttcaaacccagccggttcctttcgcaggaggcataccagcaaaagcagcagagagacccactgctcgaggacgaccaccacgtcgatgagaagacagagcctggtcacaggagcaattttgcgaacatgactttcctgcatgggccacgaagctgtattggacagtcgttcgcgagagccgagctggccatcgtcaccgcattgctcgtgggtcgattcgaattcgccctcgcagacaaatcgcaggccgacttcagcacgatcccgctcagacggggcgcaaccttcaggccactcaatgggctgaaggtgaagatgaacgtgattgatgggtggtga

SEQ ID NO: 39144 - protein, 362 aa, Muscodor strobelii
  misc_feature: SGI Peptide ID NO. 573613
  misc_feature (1)..(354): Pfam Id: PF00067 Pfam Desc: Cytochrome P450
  misc_feature (60)..(354): Pfam Id: PF00067 Pfam Desc: Cytochrome P450
  misc_feature (1)..(362): NCBI GI: 154299019 Blast Desc: BC1G_11822 [Botryotinia fuckeliana B05.10] gi|150857525|gb|EDN32717.1| BC1G_11822 [Botryotinia fuckeliana B05.10]
  misc_feature (6)..(362): NCBI GI: 156058097 Blast Desc: SS1G_04780 [Sclerotinia sclerotiorum 1980] gi|154702565|gb|EDO02304.1| SS1G_04780 [Sclerotinia sclerotiorum 1980]
  misc_feature (1)..(362): NCBI GI: 145603111 Blast Desc: MGG_04469 [Magnaporthe grisea 70-15] gi|145011426|gb|EDJ96082.1| MGG_04469 [Magnaporthe grisea 70-15]
  misc_feature (1)..(362): NCBI GI: 46108332 Blast Desc: FG01048.1 [Gibberella zeae PH-1]
  misc_feature (1)..(359): NCBI GI: 87083855 Blast Desc: Fum15p [Gibberella moniliformis]
  misc_feature (1)..(359): NCBI GI: 170293012 Blast Desc: Fum15 [Fusarium oxysporum]
  misc_feature (1)..(361): NCBI GI: 256735154 Blast Desc: NECHADRAFT_98771 [Nectria haematococca mpVI 77-13-4]
  misc_feature (1)..(334): NCBI GI: 145229611 Blast Desc: An01g06910 [Aspergillus niger] gi|134055222|emb|CAK43809.1| protein product [Aspergillus niger]
  misc_feature (1)..(362): NCBI GI: 116180286 Blast Desc: CHGG_00771 [Chaetomium globosum CBS 148.51] gi|88185068|gb|EAQ92536.1| CHGG_00771 [Chaetomium globosum CBS 148.51]
  misc_feature (1)..(362): NCBI GI: 171687955 Blast Desc: protein product [Podospora anserina] gi|170943939|emb|CAP69591.1| protein product [Podospora anserina]
  misc_feature (23)..(328): SWISSPROT Homolog: EC 1.3.3.9 Secologanin synthase
MDINDWTSFVTLGIICVAGLGLDMDSVLNQDEVYTNLRKVYKMVFKQEKADLIMLFLRVYILPSWALPYVPLKRNRALRKASQDLRDECKKLIQQRKTELENGVTEETEMNILTLALSRSGFTDENLVDQLCTFLAAGHETTATALTWMVYILSTHPDIQTKLREEIRAKLPSPSRDAQELSTIIDNHMPYLHAVCQEVLRFFAPVPATFREAVVDTTIKGYEIPKGTQLFLCLRGTNRNKAVWGEDAEEFKPSRFLSQEAYQQKQQRDPLLEDDHHVDEKTEPGHRSNFANMTFLHGPRSCIGQSFARAELAIVTALLVGRFEFALADKSQADFSTIPLRRGATFRPLNGLKVKMNVIDGW

SEQ ID NO: 39145 - DNA, 1113 bp, Muscodor strobelii
  misc_feature: SGI EST ID NO. CUFF.94185.0
  misc_feature: Variant of the nucleotide sequence at SEQ ID NO 39143
tgagtactcatcctgatatacaaacaaagcttcgggaggaaatccgcgccaaattgcccagcccttcacgcgatgcgcaagagctttccacaattatcgacaaccacatgccctatctccacgcagtatgccaagaagtcctacggttcttcgcgccagtgccggcgacattccgcgaagcagtcgtagacacgacgatcaaaggctatgagataccgaagggcacccagctctttctctgtttgcgcggaacgaaccgcaacaaggctgtatggggcgaggacgctgaggagttcaaacccagccggttcctttcgcaggaggcataccagcaaaagcagcagagagacccactgctcgaggacgaccaccacgtcgatgagaagacagagcctggtcacaggagcaattttgcgaacatgactttcctgcatgggccacgaagctgtattggacagtcgttcgcgagagccgagctggccatcgtcaccgcattgctcgtgggtcgattcgaattcgccctcgcagacaaatcgcaggccgacttcagcacgatcccgctcagacggggcgcaaccttcaggccactcaatgggctgaaggtgaagatgaacgtgattgatgggtggtgacgatgatgttcatgtcagaagtcgtgcatgatactagccatgggcatcacgaggcggagttagctattctgggtataggcatataaactagatttgaatgaacaaaggagatatgatgcccaggcctcatcaagtgcatctactagctcactgaatacagcacacccgaacaaaatcttgtgagttatgctttcctctgcacgatacggacatcagtcgtattgtctgatgtaacctttgagtattttcgtaagcttacgcctataggccatacggtgtcatgatctttaacttgtacgagtcctgaggcatacgagtttgtaacaacatgtattatcgccttacagcggtccttctcctagttacctaaagcggtgaagtggtggtgatgacgacggaacctttggcggcgatgaggtgcgatagttacagactagcaaggtaggcagcaaaaaaaaaaaagaagagagagagagaagag

SEQ ID NO: 39146 - DNA, 3177 bp, Muscodor strobelii
  misc_feature: SGI cDNA ID NO. 573614
  misc_feature: Encodes the peptide sequence at SEQ ID NO 39147
atggaccgcctacgaaaacgcgagctgctgtctctaaaccagcgcgcttgggacggcgaacaagatgtgttccccgtcggatctgccttggattcgtcgctcaagaagaacacggccttcatcaagcgactgcgcactgccgtcacctcggccacccagagcaccttcctgcaagagatccgaaccctcagcttgaccaaatatctctccgagatcatctccgcctgctacgagggcctgtgcaagctgaagacccccgcagagatcgacgccgccatcgagattgtcagcgccctgcaccagcgcttcggccccgccgacttcaccgaatacctcggatggctgctaggcaagggtatggccacgcccgacaagagcctcctgaaatccctggctgccgaagtacgcgagaaggaagagaaggaccgcatcgttcgacagcgggcgctcctgcgagtcattaccgacctctggcttgtgggtgtcttgcgcaccctcgacgatgtgaaacctgacgacgcaacccgtggcgtcaacgggaagaacgccgagctcaagatcaaggccgccgcctcagccaaaggcggcaacgcggagcccttccctctcgaagtcttgaaagacttgcttggccacgatagagaccacgtgaatctaccccttctagtcatctttgtcaaatccttcagctgggatatcctgggcgtcaaaccagccggatccgagggccgcaagtcgatcgaggctgatggtgtcgcaaaacccatcgatgatcacgcaggagcatccgactctttggaccatgaagatcctccatttgcagcgccggagatgcaggaacgcttcaacaatgttctcaaacgctactttgaggatgccaaggcgcatctcatacgggaccagaaacacatcattgcccaaaaaggacgcaattccgaggcttatgtcaagtccggtgaggtattcgaagaccgccaagccaatttcgagaagcagctgaaagctcaggagcgcctcgctgccaacatccaggttattgccgacgcgattggtgccgatatgcccgatttgaaagacgcggcagacggctttgcagctacgaatggttccattggtctggtcaagactggagaatacctgcgaggccagagcgaaggcgctggcatctgggaagacgaagacgagcgccgcttctatgaaaatctggtagacctaaaaggcaaagtgcccggcatccttctggaggatggcaagaagaagaagacagattcggaggaggcagttggcaagcgggttgacgctacggatgcttcagagcctgcgaaagcgacagaaactactgatgatcaatcgacggccattgcgaataaaacaatcggcgcacaagtggacgtcctcctgacacggctgccagaactcaccaataaagatgcggtagatcagacggccatcgacttctgttttctaaactcgaaggcgtcgcgcaataggctgatcaaagggttgaccgaggttccaaaggggcgaaccgatctcttgccattctggtcacgcctcgtggctacactagggcgatatatgcctgatgttcccaagggcgtagtcgagtatctagacgccgagtttcgcagcctccaacggcgaaaggagaaagacttcttaggccaagtccggttgagcaacatacgttaccttgctgagctaacaaaattcggcatcgtgccagaacatgttgtcttccactgcttgaaggtctccctcgatgacttctcgcggatgaacatcgagattatctgcaatctcttagaaaactgcggaagatatctgctacgtaataacgatacactgcctcgtatggctactttcctcgagacacttcaacgtaaaaaatcagtacagcatatcggccaaccagaacgtatgctcattgagaatgccatttactacgttgaccctccggagcgggcctccattcagcagaaagagcgtacccctacggagttgttcattcggaagctcatatacgtggatatgaccaagcggaactacaccaagattcttaagcagattcgtcgcctccattgggaagagcccgaagttgttgcaattctcgccaagattttctctcgacctgctaaagttaagtacagcagcattcatatcttggcgattctcctcggcgcgatctatcggtaccacccaattttcgctctgaatgttatcgacaaggtctccaatgcggtagctttcggcctcgagcagaatgattttactttcaaccaaagacgtatcgccgaagtcaagtatctagccgagctctacaattataggatgctcgagcacccggtgattttcgagaccatgtacaagatcctgacgtttggtcatggtggcccacctgtgcccggtcgtttgaatcctcttgacctaccggatgacttctttcgcattcgtcttattgctaccatgctcgaaacctgcggttcgtacttcgacagaggagctgcaggcaagaaactcgactacttcttgtcattcctccagaacccattgcctatggatatcgagttcatagttcaagacacgttcaccctcactcgcccgcaatggaaacttgccaccaatctggaagaagcctcgaaagctcttcagcttgcaatcgctcgggaccagaagaattcggggcttgatagagtcgccgatgccgaagatgtttccagcggtccctctacagacgacgagggaatagaggctgacggcgatgctgagagtgacaaagactctgaccttggtgacgacaacgatccagaattagaagatgagggcgaagagctcgatgacaatgacccgtcacaatccaataaagattcagagtcagaagaagaagcaattgtagttaccaagaaggccgaggaattcgatccagaagccgaggcagaattcgagcgcgagttcgcgaaaatgatggcggaaagtctagagtcacgaaagttcgatcggaagcaactcttcgatgtgcccctaccccttcgcactaagacacgcgaccctagtgctcttacagacaccgaggagcaacacggctacgaaccgccgaagacaatggcgttctctcttctcaccaagaaaggaaacagacaacaggtgaggcacatgcctgggtttgataaggcataa

SEQ ID NO: 39147 - protein, 1058 aa, Muscodor strobelii
  misc_feature: SGI Peptide ID NO. 573614
  misc_feature (463)..(653): Pfam Id: PF02854 Pfam Desc: MIF4G domain
  misc_feature (668)..(869): Pfam Id: PF02854 Pfam Desc: MIF4G domain
  misc_feature (490)..(653): Pfam Id: PF02854 Pfam Desc: MIF4G domain
  misc_feature (918)..(1052): Pfam Id: PF04050 Pfam Desc: Up-frameshift suppressor 2
  misc_feature (1)..(1050): NCBI GI: 46110132 Blast Desc: FG01948.1 [Gibberella zeae PH-1]
  misc_feature (1)..(1050): NCBI GI: 116196478 Blast Desc: CHGG_04837 [Chaetomium globosum CBS 148.51] gi|88180750|gb|EAQ88218.1| CHGG_04837 [Chaetomium globosum CBS 148.51]
  misc_feature (1)..(1050): NCBI GI: 164429230 Blast Desc: NCU05267 [Neurospora crassa OR74A] gi|157072990|gb|EAA32521.2| NCU05267 [Neurospora crassa OR74A]
  misc_feature (1)..(1050): NCBI GI: 145603420 Blast Desc: MGG_06063 [Magnaporthe grisea 70-15] gi|145011654|gb|EDJ96310.1| MGG_06063 [Magnaporthe grisea 70-15]
  misc_feature (22)..(1050): NCBI GI: 171688540 Blast Desc: protein product [Podospora anserina] gi|170944232|emb|CAP70342.1| protein product [Podospora anserina]
  misc_feature (23)..(1050): NCBI GI: 156063538 Blast Desc: SS1G_01887 [Sclerotinia sclerotiorum 1980] gi|154697221|gb|EDN96959.1| SS1G_01887 [Sclerotinia sclerotiorum 1980]
  misc_feature (23)..(1050): NCBI GI: 154302179 Blast Desc: BC1G_09770 [Botryotinia fuckeliana B05.10] gi|150855544|gb|EDN30736.1| BC1G_09770 [Botryotinia fuckeliana B05.10]
  misc_feature (1)..(1052): NCBI GI: 189198007 Blast Desc: nonsense-mediated mRNA decay factor (Upf2) [Pyrenophora tritici-repentis Pt-1C-BFP] gi|187981289|gb|EDU47915.1| nonsense-mediated mRNA decay factor
  misc_feature (1)..(1052): NCBI GI: 169605799 Blast Desc: SNOG_05928 [Phaeosphaeria nodorum SN15] gi|160706844|gb|EAT86992.2| SNOG_05928 [Phaeosphaeria nodorum SN15]
  misc_feature (1)..(1052): NCBI GI: 242810481 Blast Desc: nonsense-mediated mRNA decay factor (Upf2), [Talaromyces stipitatus ATCC 10500] gi|218716215|gb|EED15637.1| nonsense-mediated mRNA decay factor (Upf2), [Talaromyces ATCC
MDRLRKRELLSLNQRAWDGEQDVFPVGSALDSSLKKNTAFIKRLRTAVTSATQSTFLQEIRTLSLTKYLSEIISACYEGLCKLKTPAEIDAAIEIVSALHQRFGPADFTEYLGWLLGKGMATPDKSLLKSLAAEVREKEEKDRIVRQRALLRVITDLWLVGVLRTLDDVKPDDATRGVNGKNAELKIKAAASAKGGNAEPFPLEVLKDLLGHDRDHVNLPLLVIFVKSFSWDILGVKPAGSEGRKSIEADGVAKPIDDHAGASDSLDHEDPPFAAPEMQERFNNVLKRYFEDAKAHLIRDQKHIIAQKGRNSEAYVKSGEVFEDRQANFEKQLKAQERLAANIQVIADAIGADMPDLKDAADGFAATNGSIGLVKTGEYLRGQSEGAGIWEDEDERRFYENLVDLKGKVPGILLEDGKKKKTDSEEAVGKRVDATDASEPAKATETTDDQSTAIANKTIGAQVDVLLTRLPELTNKDAVDQTAIDFCFLNSKASRNRLIKGLTEVPKGRTDLLPFWSRLVATLGRYMPDVPKGVVEYLDAEFRSLQRRKEKDFLGQVRLSNIRYLAELTKFGIVPEHVVFHCLKVSLDDFSRMNIEIICNLLENCGRYLLRNNDTLPRMATFLETLQRKKSVQHIGQPERMLIENAIYYVDPPERASIQQKERTPTELFIRKLIYVDMTKRNYTKILKQIRRLHWEEPEVVAILAKIFSRPAKVKYSSIHILAILLGAIYRYHPIFALNVIDKVSNAVAFGLEQNDFTFNQRRIAEVKYLAELYNYRMLEHPVIFETMYKILTFGHGGPPVPGRLNPLDLPDDFFRIRLIATMLETCGSYFDRGAAGKKLDYFLSFLQNPLPMDIEFIVQDTFTLTRPQWKLATNLEEASKALQLAIARDQKNSGLDRVADAEDVSSGPSTDDEGIEADGDAESDKDSDLGDDNDPELEDEGEELDDNDPSQSNKDSESEEEAIVVTKKAEEFDPEAEAEFEREFAKMMAESLESRKFDRKQLFDVPLPLRTKTRDPSALTDTEEQHGYEPPKTMAFSLLTKKGNRQQVRHMPGFDKA

SEQ ID NO: 39148 - DNA, 4475 bp, Muscodor strobelii
  misc_feature: SGI EST ID NO. CUFF.94240.2
  misc_feature: Variant of the nucleotide sequence at SEQ ID NO 39146
ttcggagcctcctcgcctcgctgctgccaccgcatcccactctcggcatcttcgcaacaacagtcgacaacaaccacgttcaacgccgccgccgtcgtcgaccgacctaccgatcgaccgtctgaacgccgaatctcttgtcgaacgatcgcattcaacacgtcacgttgctggatttattcctctgtcctgccttggacttcgtatcagggcagagtcctcgcactccccatgccgaccgaggctgatcctccatatcacttccactacctgggacgcttcatcccttagcagtggccgccaatagtcttgcgaatgtagcacttgcactgatcacccatcttctatctggagctgtccgccatggaccgcctacgaaaacgcgagctgctgtctctaaaccagcgcgcttgggacggcgaacaagatgtgttccccgtcggatctgccttggattcgtcgctcaagaagaacacggccttcatcaagcgactgcgcactgccgtcacctcggccacccagagcaccttcctgcaagagatccgaaccctcagcttgaccaaatatctctccgagatcatctccgcctgctacgagggcctgtgcaagctgaagacccccgcagagatcgacgccgccatcgagattgtcagcgccctgcaccagcgcttcggccccgccgacttcaccgaatacctcggatggctgctaggcaagggtatggccacgcccgacaagagcctcctgaaatccctggctgccgaagtacgcgagaaggaagagaaggaccgcatcgttcgacagcgggcgctcctgcgagtcattaccgacctctggcttgtgggtgtcttgcgcaccctcgacgatgtgaaacctgacgacgcaacccgtggcgtcaacgggaagaacgccgagctcaagatcaaggccgccgcctcagccaaaggcggcaacgcggagcccttccctctcgaagtcttgaaagacttgcttggccacgatagagaccacgtgaatctaccccttctagtcatctttgtcaaatccttcagctgggatatcctgggcgtcaaaccagccggatccgagggccgcaagtcgatcgaggctgatggtgtcgcaaaacccatcgatgatcacgcaggagcatccgactctttggaccatgaagatcctccatttgcagcgccggagatgcaggaacgcttcaacaatgttctcaaacgctactttgaggatgccaaggcgcatctcatacgggaccagaaacacatcattgcccaaaaaggacgcaattccgaggcttatgtcaagtccggtgaggtattcgaagaccgccaagccaatttcgagaagcagctgaaagctcaggagcgcctcgctgccaacatccaggttattgccgacgcgattggtgccgatatgcccgatttgaaagacgcggcagacggctttgcagctacgaatggttccattggtctggtcaagactggagaatacctgcgaggccagagcgaaggcgctggcatctgggaagacgaagacgagcgccgcttctatgaaaatctggtagacctaaaaggcaaagtgcccggcatccttctggaggatggcaagaagaagaagacagattcggaggaggcagttggcaagcgggttgacgctacggatgcttcagagcctgcgaaagcgacagaaactactgatgatcaatcgacggccattgcgaataaaacaatcggcgcacaagtggacgtcctcctgacacggctgccagaactcaccaataaagatgcggtagatcagacggccatcgacttctgttttctaaactcgaaggcgtcgcgcaataggctgatcaaagggttgaccgaggttccaaaggggcgaaccgatctcttgccattctggtcacgcctcgtggctacactagggcgatatatgcctgatgttcccaagggcgtagtcgagtatctagacgccgagtttcgcagcctccaacggcgaaaggagaaagacttcttaggccaagtccggttgagcaacatacgttaccttgctgagctaacaaaattcggcatcgtgccagaacatgttgtcttccactgcttgaaggtctccctcgatgacttctcgcggatgaacatcgagattatctgcaatctcttagaaaactgcggaagatatctgctacgtaataacgatacactgcctcgtatggctactttcctcgagacacttcaacgtaaaaaatcagtacagcatatcggccaaccagaacgtatgctcattgagaatgccatttactacgttgaccctccggagcgggcctccattcagcagaaagagcgtacccctacggagttgttcattcggaagctcatatacgtggatatgaccaagcggaactacaccaagattcttaagcagattcgtcgcctccattgggaagagcccgaagttgttgcaattctcgccaagattttctctcgacctgctaaagttaagtacagcagcattcatatcttggcgattctcctcggcgcgatctatcggtaccacccaattttcgctctgaatgttatcgacaaggtctccaatgcggtagctttcggcctcgagcagaatgattttactttcaaccaaagacgtatcgccgaagtcaagtatctagccgagctctacaattataggatgctcgagcacccggtgattttcgagaccatgtacaagatcctgacgtttggtcatggtggcccacctgtgcccggtcgtttgaatcctcttgacctaccggatgacttctttcgcattcgtcttattgctaccatgctcgaaacctgcggttcgtacttcgacagaggagctgcaggcaagaaactcgactacttcttgtcattcctccagtactacattcatacaaagaacccattgcctatggatatcgagttcatagttcaagacacgttcaccctcactcgcccgcaatggaaacttgccaccaatctggaagaagcctcgaaagctcttcagcttgcaatcgctcgggaccagaagaattcggggcttgatagagtcgccgatgccgaagatgtttccagcggtccctctacagacgacgagggaatagaggctgacggcgatgctgagagtgacaaagactctgaccttggtgacgacaacgatccagaattagaagatgagggcgaagagctcgatgacaatgacccgtcacaatccaataaagattcagagtcagaagaagaagcaattgtagttaccaagaaggccgaggaattcgatccagaagccgaggcagaattcgagcgcgagttcgcgaaaatgatggcggaaagtctagagtcacgaaagttcgatcggaagcaactcttcgatgtgcccctaccccttcgcactaagacacgcgaccctagtgctcttacagacaccgaggagcaacacggctacgaaccgccgaagacaatggcgttctctcttctcaccaagaaaggaaacagacaacagactcgaaacgtggagcttccctcagattctacctttgcagtcgcaatgaagaatcagcagcaagccgaacgtgaagagcagcaacgtatcaagaatctcgtactcaattacgaccttcgcgaaaatgaagaatcagatggtgatgctctcctaaccttgctacgtcccaacccaaatattcacaaatcaaatcattcaggccacgataaaccttcctatcattccaatcgcggcgagaagcccaacagagagcgtggcggacagcgggttcgccgactccaattgagcgatgttgactggacttgagatgccctataatcatcaactggaagacacagtatccattccatgaactctcgtggaggctacaggccctttttgggctgctcaagcactcacacatgcggccaatggagtgaatagaggcccacggctaacctacgttctgcagccggtgtaaccattggccccggacgccaggtcacaagaaccgcaggagctggtgtcactaatccgtgcaagtcaggaattggaccctgcgacgttcccttccctaatagcgatcatctaaaaagcaaggcttcagaagtctgcgtgacgagagacgacgtctacccagtgactgggctaagacgaatacaagttaagtcaccgatgatttacttattcactcaaacagtccagtggtgagagcggaacaagattggtgtctccgcagggagatgaggccgggagcgagattggagattgctgagtttgctcaagactgctgcagctatcgctcatatgaggatgttgccgggcgctgtctgactcgtggcttttgcgatgaatttgcacgccaatcacttacatcccgtatccgagggactctgtagtcctgcatgcagcgttgctttttgcccgtacaatagctcttagctacgaagccattcgtttgcaaaccccag

SEQ ID NO: 39149 - DNA, 402 bp, Muscodor strobelii
  misc_feature: SGI cDNA ID NO. 573615
  misc_feature: Encodes the peptide sequence at SEQ ID NO 39150
atgaagaatcagcagcaagccgaacgtgaagagcagcaacgtatcaagaatctcgtactcaattacgaccttcgcgaaaatgaagaatcagatggccacgataaaccttcctatcattccaatcgcggcgagaagcccaacagagagcgtggcggacagcgggttcgccgactccaattgagcgatgttgactggtatgcacacacccatgaaaaaaacaatgaaaacaaggaaaacgcacagagtgaccctgaagtgatgggcacatctgattgcgatactcgtgacggtaacaaagtcttggtgaacccgtcacaggacaacatgcaagacaagcgtcagaagcagcagacagattttcggcgacgttcacagaatcagtcacgcggaaaaagaaaatga

SEQ ID NO: 39150 - protein, 133 aa, Muscodor strobelii
  misc_feature: SGI Peptide ID NO. 573615
  misc_feature (1)..(65): NCBI GI: 164429230 Blast Desc: NCU05267 [Neurospora crassa OR74A] gi|157072990|gb|EAA32521.2| NCU05267 [Neurospora crassa OR74A]
  misc_feature (1)..(98): NCBI GI: 171688540 Blast Desc: protein product [Podospora anserina] gi|170944232|emb|CAP70342.1| protein product [Podospora anserina]
  misc_feature (1)..(72): NCBI GI: 145603420 Blast Desc: MGG_06063 [Magnaporthe grisea 70-15] gi|145011654|gb|EDJ96310.1| MGG_06063 [Magnaporthe grisea 70-15]
  misc_feature (1)..(99): NCBI GI: 154302179 Blast Desc: BC1G_09770 [Botryotinia fuckeliana B05.10] gi|150855544|gb|EDN30736.1| BC1G_09770 [Botryotinia fuckeliana B05.10]
  misc_feature (1)..(66): NCBI GI: 116196478 Blast Desc: CHGG_04837 [Chaetomium globosum CBS 148.51] gi|88180750|gb|EAQ88218.1| CHGG_04837 [Chaetomium globosum CBS 148.51]
  misc_feature (1)..(66): NCBI GI: 156063538 Blast Desc: SS1G_01887 [Sclerotinia sclerotiorum 1980] gi|154697221|gb|EDN96959.1| SS1G_01887 [Sclerotinia sclerotiorum 1980]
  misc_feature (1)..(65): NCBI GI: 256720961 Blast Desc: [Nectria haematococca mpVI 77-13-4]
  misc_feature (1)..(65): NCBI GI: 115399962 Blast Desc: conserved [Aspergillus terreus NIH2624] gi|114191236|gb|EAU32936.1| conserved [Aspergillus terreus NIH2624]
  misc_feature (1)..(65): NCBI GI: 242810481 Blast Desc: nonsense-mediated mRNA decay factor (Upf2), [Talaromyces stipitatus ATCC 10500] gi|218716215|gb|EED15637.1| nonsense-mediated mRNA decay factor (Upf2), [Talaromyces ATCC
  misc_feature (1)..(65): NCBI GI: 212536999 Blast Desc: nonsense-mediated mRNA decay factor (Upf2), [Penicillium marneffei ATCC 18224] gi|210068397|gb|EEA22488.1| nonsense-mediated mRNA decay factor (Upf2), [Penicillium ATCC
MKNQQQAEREEQQRIKNLVLNYDLRENEESDGHDKPSYHSNRGEKPNRERGGQRVRRLQLSDVDWYAHTHEKNNENKENAQSDPEVMGTSDCDTRDGNKVLVNPSQDNMQDKRQKQQTDFRRRSQNQSRGKRK

SEQ ID NO: 39151 - DNA, 4415 bp, Muscodor strobelii
  misc_feature: SGI EST ID NO. CUFF.94240.0
  misc_feature: Variant of the nucleotide sequence at SEQ ID NO 39149
ttcggagcctcctcgcctcgctgctgccaccgcatcccactctcggcatcttcgcaacaacagtcgacaacaaccacgttcaacgccgccgccgtcgtcgaccgacctaccgatcgaccgtctgaacgccgaatctcttgtcgaacgatcgcattcaacacgtcacgttgctggatttattcctctgtcctgccttggacttcgtatcagggcagagtcctcgcactccccatgccgaccgaggctgatcctccatatcacttccactacctgggacgcttcatcccttagcagtggccgccaatagtcttgcgaatgtagcacttgcactgatcacccatcttctatctggagctgtccgccatggaccgcctacgaaaacgcgagctgctgtctctaaaccagcgcgcttgggacggcgaacaagatgtgttccccgtcggatctgccttggattcgtcgctcaagaagaacacggccttcatcaagcgactgcgcactgccgtcacctcggccacccagagcaccttcctgcaagagatccgaaccctcagcttgaccaaatatctctccgagatcatctccgcctgctacgagggcctgtgcaagctgaagacccccgcagagatcgacgccgccatcgagattgtcagcgccctgcaccagcgcttcggccccgccgacttcaccgaatacctcggatggctgctaggcaagggtatggccacgcccgacaagagcctcctgaaatccctggctgccgaagtacgcgagaaggaagagaaggaccgcatcgttcgacagcgggcgctcctgcgagtcattaccgacctctggcttgtgggtgtcttgcgcaccctcgacgatgtgaaacctgacgacgcaacccgtggcgtcaacgggaagaacgccgagctcaagatcaaggccgccgcctcagccaaaggcggcaacgcggagcccttccctctcgaagtcttgaaagacttgcttggccacgatagagaccacgtgaatctaccccttctagtcatctttgtcaaatccttcagctgggatatcctgggcgtcaaaccagccggatccgagggccgcaagtcgatcgaggctgatggtgtcgcaaaacccatcgatgatcacgcaggagcatccgactctttggaccatgaagatcctccatttgcagcgccggagatgcaggaacgcttcaacaatgttctcaaacgctactttgaggatgccaaggcgcatctcatacgggaccagaaacacatcattgcccaaaaaggacgcaattccgaggcttatgtcaagtccggtgaggtattcgaagaccgccaagccaatttcgagaagcagctgaaagctcaggagcgcctcgctgccaacatccaggttattgccgacgcgattggtgccgatatgcccgatttgaaagacgcggcagacggctttgcagctacgaatggttccattggtctggtcaagactggagaatacctgcgaggccagagcgaaggcgctggcatctgggaagacgaagacgagcgccgcttctatgaaaatctggtagacctaaaaggcaaagtgcccggcatccttctggaggatggcaagaagaagaagacagattcggaggaggcagttggcaagcgggttgacgctacggatgcttcagagcctgcgaaagcgacagaaactactgatgatcaatcgacggccattgcgaataaaacaatcggcgcacaagtggacgtcctcctgacacggctgccagaactcaccaataaagatgcggtagatcagacggccatcgacttctgttttctaaactcgaaggcgtcgcgcaataggctgatcaaagggttgaccgaggttccaaaggggcgaaccgatctcttgccattctggtcacgcctcgtggctacactagggcgatatatgcctgatgttcccaagggcgtagtcgagtatctagacgccgagtttcgcagcctccaacggcgaaaggagaaagacttcttaggccaagtccggttgagcaacatacgttaccttgctgagctaacaaaattcggcatcgtgccagaacatgttgtcttccactgcttgaaggtctccctcgatgacttctcgcggatgaacatcgagattatctgcaatctcttagaaaactgcggaagatatctgctacgtaataacgatacactgcctcgtatggctactttcctcgagacacttcaacgtaaaaaatcagtacagcatatcggccaaccagaacgtatgctcattgagaatgccatttactacgttgaccctccggagcgggcctccattcagcagaaagagcgtacccctacggagttgttcattcggaagctcatatacgtggatatgaccaagcggaactacaccaagattcttaagcagattcgtcgcctccattgggaagagcccgaagttgttgcaattctcgccaagattttctctcgacctgctaaagttaagtacagcagcattcatatcttggcgattctcctcggcgcgatctatcggtaccacccaattttcgctctgaatgttatcgacaaggtctccaatgcggtagctttcggcctcgagcagaatgattttactttcaaccaaagacgtatcgccgaagtcaagtatctagccgagctctacaattataggatgctcgagcacccggtgattttcgagaccatgtacaagatcctgacgtttggtcatggtggcccacctgtgcccggtcgtttgaatcctcttgacctaccggatgacttctttcgcattcgtcttattgctaccatgctcgaaacctgcggttcgtacttcgacagaggagctgcaggcaagaaactcgactacttcttgtcattcctccagtactacattcatacaaagaacccattgcctatggatatcgagttcatagttcaagacacgttcaccctcactcgcccgcaatggaaacttgccaccaatctggaagaagcctcgaaagctcttcagcttgcaatcgctcgggaccagaagaattcggggcttgatagagtcgccgatgccgaagatgtttccagcggtccctctacagacgacgagggaatagaggctgacggcgatgctgagagtgacaaagactctgaccttggtgacgacaacgatccagaattagaagatgagggcgaagagctcgatgacaatgacccgtcacaatccaataaagattcagagtcagaagaagaagcaattgtagttaccaagaaggccgaggaattcgatccagaagccgaggcagaattcgagcgcgagttcgcgaaaatgatggcggaaagtctagagtcacgaaagttcgatcggaagcaactcttcgatgtgcccctaccccttcgcactaagacacgcgaccctagtgctcttacagacaccgaggagcaacacggctacgaaccgccgaagacaatggcgttctctcttctcaccaagaaaggaaacagacaacagactcgaaacgtggagcttccctcagattctacctttgcagtcgcaatgaagaatcagcagcaagccgaacgtgaagagcagcaacgtatcaagaatctcgtactcaattacgaccttcgcgaaaatgaagaatcagatggccacgataaaccttcctatcattccaatcgcggcgagaagcccaacagagagcgtggcggacagcgggttcgccgactccaattgagcgatgttgactggacttgagatgccctataatcatcaactggaagacacagtatccattccatgaactctcgtggaggctacaggccctttttgggctgctcaagcactcacacatgcggccaatggagtgaatagaggcccacggctaacctacgttctgcagccggtgtaaccattggccccggacgccaggtcacaagaaccgcaggagctggtgtcactaatccgtgcaagtcaggaattggaccctgcgacgttcccttccctaatagcgatcatctaaaaagcaaggcttcagaagtctgcgtgacgagagacgacgtctacccagtgactgggctaagacgaatacaagttaagtcaccgatgatttacttattcactcaaacagtccagtggtgagagcggaacaagattggtgtctccgcagggagatgaggccgggagcgagattggagattgctgagtttgctcaagactgctgcagctatcgctcatatgaggatgttgccgggcgctgtctgactcgtggcttttgcgatgaatttgcacgccaatcacttacatcccgtatccgagggactctgtagtcctgcatgcagcgttgctttttgcccgtacaatagctcttagctacgaagccattcgtttgcaaaccccag

SEQ ID NO: 39152 - DNA, 201 bp, Muscodor strobelii
  misc_feature: SGI cDNA ID NO. 573616
  misc_feature: Encodes the peptide sequence at SEQ ID NO 39153
atgaagaatcagcagcaagccgaacgtgaagagcagcaacgtatcaagaatctcgtactcaattacgaccttcgcgaaaatgaagaatcagatggccacgataaaccttcctatcattccaatcgcggcgagaagcccaacagagagcgtggcggacagcgggttcgccgactccaattgagcgatgttgactggacttga

SEQ ID NO: 39153 - protein, 66 aa, Muscodor strobelii
  misc_feature: SGI Peptide ID NO. 573616
  misc_feature (1)..(66): NCBI GI: 164429230 Blast Desc: NCU05267 [Neurospora crassa OR74A] gi|157072990|gb|EAA32521.2| NCU05267 [Neurospora crassa OR74A]
  misc_feature (1)..(64): NCBI GI: 145603420 Blast Desc: MGG_06063 [Magnaporthe grisea 70-15] gi|145011654|gb|EDJ96310.1| MGG_06063 [Magnaporthe grisea 70-15]
  misc_feature (1)..(65): NCBI GI: 171688540 Blast Desc: protein product [Podospora anserina] gi|170944232|emb|CAP70342.1| protein product [Podospora anserina]
  misc_feature (1)..(65): NCBI GI: 154302179 Blast Desc: BC1G_09770 [Botryotinia fuckeliana B05.10] gi|150855544|gb|EDN30736.1| BC1G_09770 [Botryotinia fuckeliana B05.10]
  misc_feature (1)..(65): NCBI GI: 156063538 Blast Desc: SS1G_01887 [Sclerotinia sclerotiorum 1980] gi|154697221|gb|EDN96959.1| SS1G_01887 [Sclerotinia sclerotiorum 1980]
  misc_feature (1)..(65): NCBI GI: 116196478 Blast Desc: CHGG_04837 [Chaetomium globosum CBS 148.51] gi|88180750|gb|EAQ88218.1| CHGG_04837 [Chaetomium globosum CBS 148.51]
  misc_feature (1)..(66): NCBI GI: 212536999 Blast Desc: nonsense-mediated mRNA decay factor (Upf2), [Penicillium marneffei ATCC 18224] gi|210068397|gb|EEA22488.1| nonsense-mediated mRNA decay factor (Upf2), [Penicillium ATCC
  misc_feature (1)..(66): NCBI GI: 242810481 Blast Desc: nonsense-mediated mRNA decay factor (Upf2), [Talaromyces stipitatus ATCC 10500] gi|218716215|gb|EED15637.1| nonsense-mediated mRNA decay factor (Upf2), [Talaromyces ATCC
  misc_feature (1)..(65): NCBI GI: 256720961 Blast Desc: [Nectria haematococca mpVI 77-13-4]
  misc_feature (1)..(65): NCBI GI: 115399962 Blast Desc: conserved [Aspergillus terreus NIH2624] gi|114191236|gb|EAU32936.1| conserved [Aspergillus terreus NIH2624]
MKNQQQAEREEQQRIKNLVLNYDLRENEESDGHDKPSYHSNRGEKPNRERGGQRVRRLQLSDVDWT

SEQ ID NO: 39154 - DNA, 4475 bp, Muscodor strobelii; identical to SEQ ID NO: 39148
  misc_feature: SGI EST ID NO. CUFF.94240.2
  misc_feature: Variant of the nucleotide sequence at SEQ ID NO 39152

SEQ ID NO: 39155 - DNA, 2412 bp, Muscodor strobelii
  misc_feature: SGI cDNA ID NO. 573617
  misc_feature: Encodes the peptide sequence at SEQ ID NO 39156
atgcagatgtatcctgccgcccaatggccggctcacgagatcgtgtacaccgccatcgtcggcattgtcatgctggcggcggtactagagtggtttctatggatagctgcatttctgtactgcctaatcaaagtatttcgcaaagcggaacactggacaatcagagttctcgcagtcattgttggagttctatttactggctttcgattcatatttctccctatcatgattgtcacactcccgctccctaccgagatcacgaaatattggccagaacaaatggtctatattttgcaatggttcgcattctggagttttgccggactgttgaccgtcccatggttattctgcgtctatcaaattgtcacgaatcagcttggaagaacaaagcgtgtgaaacaggttctagacgaaatatcagcaccaaaagtcgtgattgtcatgccatgttacaaggaagagccggaagtcctgatcaccgctatcaactcggttgttgattgcgactaccctccctcgtgcattcacgtatttctctcctttgacggagaccaggaagatgagctatttctcaacaccatcgaaaatcttggcgtacccctaactcttgagtcttaccccaagagcattgatgttacctacagggctgctcgtatcaccgtgtctcggttcccacatggaggaaagcgacactgtcaaaagtctactttcaagctcattgacaaggtgtacaaagactatctgaaacgaaacgacaatctcttcatcctatttatcgattctgattgtatcctggatagagtgtgtttgcaaaattttgtctacgacatggagctcagtccaggtaatagccgagacatgttggcgatgacgggagtcatcacatcgacaacaaagaaacacagcgtgatcactcttctgcaagatatggaatacatccacgggcaactcttcgagcggacagtcgaatctggatgtggcgccgtcacctgtctgccaggcgctcttaccatgttgcgattttcagcattccgcagaatggccaagtactacttcgcagataaagctgaggactgcgaagatctattcgacttcgccaagagccatttgggtgaggacaggtggctgacccatctattcatgatcggcgcaaagaagcgttaccagatccaaatgtgcacgtcggcattctgtaaaacagaagccgtacaaactgtgaagtcgctgatcaagcaacgacggagatggttccttggattcatcaccaatgaagtgtgtatgttgacagattggcgcctgtggaagcgatatcctatcctcctgatcgtgcgctttatgcaaaacactatccggacgacagcattgctctttttcatcttagtactttcgcttatcacgacgactatgcgtgttgaccagctaccagtcggatttatcgccatctccctcggactgaattggttgctgatggtgtatttcggctggaagcttaagcgattcaagatttggctgtatccagtcatgttcatcttgaacccctttttcaactggtattacatggtctacggaatcttcacagcaggccagaggacctggggtggaccgcgtgcagacgctgccacagccgattcagatacgacgccacagcaagccatcgagcaagcagagcagacgggagatgatctgaacattgtaccagaaacatttaaaccagctgcggaaatacagagaggccacagtatcaaggagaaaggagagggagtggcaagaaggaaaagcaagcttctaccaccaggcaagatcgagggcagattcgcagctccggagaagaaggcgaatggcttctacgtacatgaagatgaatctcggtatagcttcaatacactagctgagtcatcatacgccgcgaggagccgcttggggcttcacccacgcgactcgtgggaaagtttcctgacgactgggaataactcggtgtatttccctcgacgtgtcgagagtatcatgggagacgaggatcgaaagaagtacgagctagcgcaggcgaaccaatataaccagttcgtcgagagctcgaaacagtacgcgatcccgcctcctggtcaagtttacgagattggcgatgttgacgggcagagcggatgggatgtgggtcgtgacggggagaagcttgaaaatcggcgaagacctcgaagcaacgatagtaacaccagctcacaatcttccggcacaccacaattcgttggtgcgtttgcgccggtcatgacaggagctgagtcctctcgatcagggagacagagtggaggaaacggccagcggaggtcgggaagaagtccgcttggacttggggattggacgcgtgatggggttgatactgcgcatgatgatacagaccatagtcacaaggagtaa

SEQ ID NO: 39156 - protein, 803 aa, Muscodor strobelii
  misc_feature: SGI Peptide ID NO. 573617
  misc_feature (114)..(584): Pfam Id: PF03142 Pfam Desc: Chitin synthase
  misc_feature (5)..(787): NCBI GI: 197295663 Blast Desc: class VII chitin synthase [Magnaporthe grisea]
  misc_feature (5)..(787): NCBI GI: 39976019 Blast Desc: MGG_06064 [Magnaporthe grisea 70-15] gi|145011653|gb|EDJ96309.1| MGG_06064 [Magnaporthe grisea 70-15]
  misc_feature (1)..(769): NCBI GI: 156063542 Blast Desc: SS1G_01889 [Sclerotinia sclerotiorum 1980] gi|154697223|gb|EDN96961.1| SS1G_01889 [Sclerotinia sclerotiorum 1980]
  misc_feature (69)..(797): NCBI GI: 171688586 Blast Desc: protein product [Podospora anserina] gi|170944255|emb|CAP70365.1| protein product [Podospora anserina]
  misc_feature (9)..(787): NCBI GI: 189198009 Blast Desc: chitin synthase D [Pyrenophora tritici-repentis Pt-1C-BFP] gi|187981290|gb|EDU47916.1| chitin synthase D [Pyrenophora tritici-repentis Pt-1C-BFP]
  misc_feature (76)..(683): NCBI GI: 164429232 Blast Desc: chitin synthase D [Neurospora crassa OR74A] gi|157072991|gb|EAA32522.2| chitin synthase D [Neurospora crassa OR74A]
  misc_feature (8)..(791): NCBI GI: 239611857 Blast Desc: chitin synthase class VI [Ajellomyces dermatitidis ER-3]
  misc_feature (8)..(791): NCBI GI: 261201666 Blast Desc: chitin synthase class VI [Ajellomyces dermatitidis SLH14081] gi|239590144|gb|EEQ72725.1| chitin synthase class VI [Ajellomyces dermatitidis SLH14081]
  misc_feature (9)..(746): NCBI GI: 256720960 Blast Desc: glycosyltransferase family 2 [Nectria haematococca mpVI 77-13-4]
  misc_feature (94)..(799): NCBI GI: 154302175 Blast Desc: BC1G_09768 [Botryotinia fuckeliana B05.10] gi|150855542|gb|EDN30734.1| BC1G_09768 [Botryotinia fuckeliana B05.10]
  misc_feature (67)..(676): SWISSPROT Homolog: EC 2.4.1.16 Chitin synthase
MQMYPAAQWPAHEIVYTAIVGIVMLAAVLEWFLWIAAFLYCLIKVFRKAEHWTIRVLAVIVGVLFTGFRFIFLPIMIVTLPLPTEITKYWPEQMVYILQWFAFWSFAGLLTVPWLFCVYQIVTNQLGRTKRVKQVLDEISAPKVVIVMPCYKEEPEVLITAINSVVDCDYPPSCIHVFLSFDGDQEDELFLNTIENLGVPLTLESYPKSIDVTYRAARITVSRFPHGGKRHCQKSTFKLIDKVYKDYLKRNDNLFILFIDSDCILDRVCLQNFVYDMELSPGNSRDMLAMTGVITSTTKKHSVITLLQDMEYIHGQLFERTVESGCGAVTCLPGALTMLRFSAFRRMAKYYFADKAEDCEDLFDFAKSHLGEDRWLTHLFMIGAKKRYQIQMCTSAFCKTEAVQTVKSLIKQRRRWFLGFITNEVCMLTDWRLWKRYPILLIVRFMQNTIRTTALLFFILVLSLITTTMRVDQLPVGFIAISLGLNWLLMVYFGWKLKRFKIWLYPVMFILNPFFNWYYMVYGIFTAGQRTWGGPRADAATADSDTTPQQAIEQAEQTGDDLNIVPETFKPAAEIQRGHSIKEKGEGVARRKSKLLPPGKIEGRFAAPEKKANGFYVHEDESRYSFNTLAESSYAARSRLGLHPRDSWESFLTTGNNSVYFPRRVESIMGDEDRKKYELAQANQYNQFVESSKQYAIPPPGQVYEIGDVDGQSGWDVGRDGEKLENRRRPRSNDSNTSSQSSGTPQFVGAFAPVMTGAESSRSGRQSGGNGQRRSGRSPLGLGDWTRDGVDTAHDDTDHSHKE

SEQ ID NO: 39157 - DNA, 1515 bp, Muscodor strobelii
  misc_feature: SGI cDNA ID NO. 573618
  misc_feature: Encodes the peptide sequence at SEQ ID NO 39158
atgccgtcctcgcccaaacacagtccgccggccgacaaggcatctctagaagaccccgacacggccgccgcacgcaaggagctcaagcagacagccatctccgagaagccggatctgtctgccatgcctgcgtcgtctacatccgccagcaaggcggtacccctcacgtccaccagcagagacacaactcccgacgccgagaggggcgcgagcacggccagggcacaggtgcagtcccctaagaagaagcgcctgcacgatgacttcgacgagagcaaggacaaaaccgccgacaaggacgctgacagagatgtctctcccattggctccaacggcagcacctctctgagccgcgctgaacgctccgagcccgagaagaagcggccccgcgacgtctccagcgagtctaaacccgactcggacaacgacaaagctgccgaatccacgggatcagacaagtccccaaagacgacagacggcgttgaacagccggcgtccaagaagggcgagactctagaacccaaagaagcgagtaagagcaacggtgggacatccacttcggcgttccagagctcaagcttcgccagttttgctgcctctactgcctcgcccttcgcttccgccgccggcagcaaaccgctcacatccttcgcaagtctttcttctccctccaagacgccggctctggcaagctcgtcgaagccctcagttttcggcagcacgaatgctgcctctaacggctctggttttggttcagtggctgcagcctcgtctccattcgctgttaaagggggcgcttctccgttcggcacccttggttcaaatagcacatttggcagcagctcagggtctaagttgaaggtatttggtcaaactggcaaatcattcaagagcggtaagccggccaaggctttcggcgcccctgccagtgaggatgaggatgatgagaatgccgaggaagacgacgaaagctcctccgagaacgataaggacgtacccgagagtgaagaaataggggccaagaagaccgccgaagccgatgagaagaagaagactagacttcagcgagtagctgttgacgacggcgaggctggcgaggctactctgcttcaggtccgggccaagatctttcacctcgacaaggccaccaattcgtggaaagagcgtggtgctggcaacctaaagttgaatgtccccatcccttgtgttgacatcgacgaggacacgggtggtgctcttcctgggtcatttgacgcatctatgctggacagctcggacggcaaggttgtgcgcttgatcatgcgacaagactccacccacagaatactcctcaatactgccattatccccgccatggatttccaagagaagtcgagcttgaaagctacatttgtacttttcaccgctcttgaagatggcggtccgataaacatccacttaaagatgagctcggccaatgcgcagacattcatccaagaggttaagaaggttcagcatgagcttcagatggcctag

SEQ ID NO: 39158 - protein, 504 aa, Muscodor strobelii
  misc_feature: SGI Peptide ID NO. 573618
  misc_feature (358)..(500): Pfam Id: PF00638 Pfam Desc: RanBP1 domain
  misc_feature (358)..(397): Pfam Id: PF00638 Pfam Desc: RanBP1 domain
  misc_feature (17)..(502): NCBI GI: 145603410 Blast Desc: MGG_13222 [Magnaporthe grisea 70-15] gi|145011648|gb|EDJ96304.1| MGG_13222 [Magnaporthe grisea 70-15]
  misc_feature (4)..(501): NCBI GI: 261352232 Blast Desc: conserved [Verticillium albo-atrum VaMs.102]
  misc_feature (3)..(491): NCBI GI: 256720963 Blast Desc: [Nectria haematococca mpVI 77-13-4]
  misc_feature (3)..(491): NCBI GI: 46110126 Blast Desc: FG01945.1 [Gibberella zeae PH-1]
  misc_feature (17)..(501): NCBI GI: 154311220 Blast Desc: BC1G_06728 [Botryotinia fuckeliana B05.10] gi|150851132|gb|EDN26325.1| BC1G_06728 [Botryotinia fuckeliana B05.10]
  misc_feature (14)..(501): NCBI GI: 171688478 Blast Desc: protein product [Podospora anserina] gi|170944201|emb|CAP70311.1| protein product [Podospora anserina]
  misc_feature (17)..(501): NCBI GI: 156034735 Blast Desc: SS1G_13303 [Sclerotinia sclerotiorum 1980] gi|154698706|gb|EDN98444.1| SS1G_13303 [Sclerotinia sclerotiorum 1980]
  misc_feature (7)..(501): NCBI GI: 116196496 Blast Desc: CHGG_04846 [Chaetomium globosum CBS 148.51] gi|88180759|gb|EAQ88227.1| CHGG_04846 [Chaetomium globosum CBS 148.51]
  misc_feature (75)..(502): NCBI GI: 258577965 Blast Desc: [Uncinocarpus reesii 1704] gi|237903430|gb|EEP77831.1| [Uncinocarpus reesii 1704]
  misc_feature (38)..(501): NCBI GI: 239615216 Blast Desc: conserved [Ajellomyces dermatitidis ER-3]
MPSSPKHSPPADKASLEDPDTAAARKELKQTAISEKPDLSAMPASSTSASKAVPLTSTSRDTTPDAERGASTARAQVQSPKKKRLHDDFDESKDKTADKDADRDVSPIGSNGSTSLSRAERSEPEKKRPRDVSSESKPDSDNDKAAESTGSDKSPKTTDGVEQPASKKGETLEPKEASKSNGGTSTSAFQSSSFASFAASTASPFASAAGSKPLTSFASLSSPSKTPALASSSKPSVFGSTNAASNGSGFGSVAAASSPFAVKGGASPFGTLGSNSTFGSSSGSKLKVFGQTGKSFKSGKPAKAFGAPASEDEDDENAEEDDESSSENDKDVPESEEIGAKKTAEADEKKKTRLQRVAVDDGEAGEATLLQVRAKIFHLDKATNSWKERGAGNLKLNVPIPCVDIDEDTGGALPGSFDASMLDSSDGKVVRLIMRQDSTHRILLNTAIIPAMDFQEKSSLKATFVLFTALEDGGPINIHLKMSSANAQTFIQEVKKVQHELQMA

SEQ ID NO: 39159 - DNA, 2862 bp, Muscodor strobelii
  misc_feature: SGI EST ID NO. CUFF.94312.0
  misc_feature: Variant of the nucleotide sequence at SEQ ID NO 39157
attgaccccacctcgatcccccacagcgtgattggccgtggtggacaggcaacgtcaagcaccggatgtgtcccagcacactttcggccctctgaagtcaacgaagcgttagtggcagtcggcgcccagaggcccacgttgggctacctactttctatctccgtcaacagcttaggtagcgcagcctccagtagacagtccacaagtgtatggaccgacaactgcagcatttgccattgaatccaccaccaacacgttcgcattgtgcaaataaccgccccaaaacacccaccttcggtacacttgatggtcagacctgcactcagacggcatcgcaacacgttcttcttccacccatccaaacggcgatcaaagccactaggcagtctgacacaaccctctccaaaacgccgcccttatctgcacgccaactcggtcgccaaaccttaacctcgacactctttttcgccatgccgtcctcgcccaaacacagtccgccggccgacaaggcatctctagaagaccccgacacggccgccgcacgcaaggagctcaagcagacagccatctccgagaagccggatctgtctgccatgcctgcgtcgtctacatccgccagcaaggcggtacccctcacgtccaccagcagagacacaactcccgacgccgagaggggcgcgagcacggccagggcacaggtgcagtcccctaagaagaagcgcctgcacgatgacttcgacgagagcaaggacaaaaccgccgacaaggacgctgacagagatgtctctcccattggctccaacggcagcacctctctgagccgcgctgaacgctccgagcccgagaagaagcggccccgcgacgtctccagcgagtctaaacccgactcggacaacgacaaagctgccgaatccacgggatcagacaagtccccaaagacgacagacggcgttgaacagccggcgtccaagaagggcgagactctagaacccaaagaagcgagtaagagcaacggtgggacatccacttcggcgttccagagctcaagcttcgccagttttgctgcctctactgcctcgcccttcgcttccgccgccggcagcaaaccgctcacatccttcgcaagtctttcttctccctccaagacgccggctctggcaagctcgtcgaagccctcagttttcggcagcacgaatgctgcctctaacggctctggttttggttcagtggctgcagcctcgtctccattcgctgttaaagggggcgcttctccgttcggcacccttggttcaaatagcacatttggcagcagctcagggtctaagttgaaggtatttggtcaaactggcaaatcattcaagagcggtaagccggccaaggctttcggcgcccctgccagtgaggatgaggatgatgagaatgccgaggaagacgacgaaagctcctccgagaacgataaggacgtacccgagagtgaagaaataggggccaagaagaccgccgaagccgatgagaagaagaagactagacttcagcgagtagctgttgacgacggcgaggctggcgaggctactctgcttcaggtccgggccaagatctttcacctcgacaaggccaccaattcgtggaaagagcgtggtgctggcaacctaaagttgaatgtccccatcccttgtgttgacatcgacgaggacacgggtggtgctcttcctgggtcatttgacgcatctatgctggacagctcggacggcaaggttgtgcgcttgatcatgcgacaagactccacccacagaatactcctcaatactgccattatccccgccatggatttccaagagaagtcgagcttgaaagctacatttgtacttttcaccgctcttgaagatggcggtccgataaacatccacttaaagatgagctcggccaatgcgcagacattcatccaagaggttaagaaggttcagcatgagcttcagatggcctagggagcctctggaaatcacgctactgccaaccgctcgaccaacgcggagagaccatacatgtctaaactaatttccccagaggaacctaacgaggatctatatacccaggaagattctggatacctctcaaatgtctctacttctagaaccgacggccgacagacttgttactcgaagtcccactcgcgacgtgcttcgaaagaggtcaattcagtcaataggcccagccgcgtagagcctcgggccttaagtgaaacggcaaaatcaccaaaacgcaaggctgacgataggccggagaacgagcagggcgtgacgagacatcgcaagaagcgaggcttgtctgtatcctaatcgcggatcattgccatcatcgcatggacgcagtctggccctgtgtttgataaaatgtcgtcacttctgcaattgtctacgagaaaggtgtccgggcggtgacctgcacagatgcagtggtatttgaaggggagcttacgaactgccgacgcagttgctttgcgacttgctttgcgtccaagggcgatatgatatactaccccagggcccggcgacggaaggcaaaggagagagtggcgcgtatgaataaaaatggatattggtatgaaaaaacgatacggatatgattatgaaggaggctatcgttgtgttgtgtaaaatggttttgttctctcccggagttggggttggctggggcttcatatatctacatacccgatagaggatagcattgcgaggactttcttcttttgcctcagtttttatgcttcgtgcgtgtgttacttagtgacggtatgacagagatggtcggaatgcccatgtgagaaaagtgctcggtctcatagaggtgagaatggtaatcgtg

SEQ ID NO: 39160 - DNA, 2124 bp, Muscodor strobelii
  misc_feature: SGI cDNA ID NO. 573619
  misc_feature: Elevated expression when VOC is produced
  misc_feature: Encodes the peptide sequence at SEQ ID NO 39161
atgacactgcaaaagaaagccgatgcaacagtcgggggtgatgggtgtgagcgcccgaccgggaaacacgcctccgggaaacggcgccccgccgatgagacgcccggtatagatacggcacaaaaacggcgtagaagggcattctcctgtctatcatgccagaaactcaagtgcagatgcgagtacgaccagggagccgtaggatgtcatcgctgtcagactttgaggatagcctgctcgttacgtgggcaggatgccatatcaccaaggtctgccaaagcagatactcctgtgtctagtgtagaagaaagactgcaacgccacgaggaagccttaggggagatcaagtccatgctcagcagttttaaagaagatgcgcttggtttcaatcgtacacctcgaacgccaccacgctctgataagcagaaggtcgaggagacagcatcagcctcaggcgacggtgaggtcgacgctccagatcatgaatacttcgccagtccagtagacaagggaacgacttcagcgccagtagcagtattaagggagataagtcgttgcgtcactcttgggtacagacgagcacttagcgaatgcgctcttgactttgtccagttgcaagtacttgatgagcaaactgcagcagacttgattgagttatttatcaaacatcagggtcacaacttgctcgttcgtcctcttgatgatttacgaggaagcggtgagatgagacgagtgtcgtcattcttgcataccgtctgctccttcatgggcatcgtttatcgccaagatcttgtcgggacacccctacatcgtcagatatatgagcaagtgagaataacgcttgggcaagcggttttagcgagtcccttagaaatggaagacattaatgctatgttcatcatgagcaacaacgcgaacactccgaacagtggagggagcgaatacatcgatagttggctcttgacgggctactgcgctaagcaagccatgctgagcatcagcttctcgaaaattgttaataatatcaagaaaggcatatctacagttgaagatcacagggctatgcatctatggtctaccatatgtcttcaccacctccaatgggcggcaaccacgggtagaccgtccgtgattccaaaatcgtatataaaccaatgtcaaatcttactcagcttttaccaagctacaatgaaagatggaatgcttgttgcagagattcttctatattcaatattgcaccagaaactctcacgtcagtcttatcctcatgatggaagcgagtgcgaggaatttctgacatggaaacaacgatggaatcacttattatctctatcaacatcttccattttaaaaatagggtataacgctgcctgtttgataatggtcgttcgtatgttagaagacacaggccatgctctggaacctacctccctcttatcaacagaaacgagccctattatccagccaactcctgttgcctatgattcgacatccccatacagtctccgggactcaagctcaaggctggacaaggacgatgctggtatcacgcagatgagcaacagtagcgctaatcccaatcctggcgatactttgcgcgcgaacggatgcaagtacgctaaagaagtgctcgagacatttctcaatatgccacgctttgtcatggacggtgtctccacgccaacgaacctctgcattgggtactgcacaatacttgtcgcacactacgactcatcacagtctaaaattccagacacagtcgcactagagcttgtgaggggcatcgataattgggttcgcacatcacctggtaaatcatgggcttacaagtatgggagtctcgcgctccgcaaaatcgaagtacgcatgggacaagcaactgaaaactccgagacgtcggctcatggaactcacgatgctgggaaggataagtcgcaattatcttcctctgacctagcatctgtaccatccaatgagcatttgtctggcttcccaacggatgatttatttgcgcctcatgcattcaatcacgatggtggtctgtcatttgacctgaacgaacaagagctgttccctagtatggaagacttttttggcggccgatttttcgatttcatgaaatag

SEQ ID NO: 39161 - protein, 707 aa, Muscodor strobelii
  misc_feature: SGI Peptide ID NO. 573619
  misc_feature (23)..(442): NCBI GI: 154425466 Blast Desc: Zn(II)2Cys6 transcription factor of proteolytic enzymes [Aspergillus oryzae]
  misc_feature (8)..(467): NCBI GI: 254572567 Blast Desc: [Pichia pastoris GS115] gi|238033191|emb|CAY71214.1| [Pichia pastoris GS115]
  misc_feature (44)..(477): NCBI GI: 255948820 Blast Desc: Pc22g12330 [Penicillium chrysogenum Wisconsin 54-1255] gi|211592194|emb|CAP98521.1| Pc22g12330 [Penicillium chrysogenum Wisconsin 54-1255]
  misc_feature (44)..(464): NCBI GI: 121707609 Blast Desc: C6 zinc finger domain protein [Aspergillus clavatus NRRL 1] gi|119400036|gb|EAW10462.1| C6 zinc finger domain protein [Aspergillus clavatus NRRL 1]
  misc_feature (24)..(445): NCBI GI: 159125269 Blast Desc: C6 finger domain protein, [Aspergillus fumigatus A1163]
  misc_feature (24)..(445): NCBI GI: 70993934 Blast Desc: C6 finger domain protein [Aspergillus fumigatus Af293] gi|66849448|gb|EAL89776.1| C6 finger domain protein, [Aspergillus fumigatus Af293]
  misc_feature (35)..(477): NCBI GI: 145258458 Blast Desc: C6 finger domain protein [Aspergillus fumigatus Af293] gi|66849448|gb|EAL89776.1| C6 finger domain protein, [Aspergillus fumigatus Af293]
  misc_feature (43)..(406): NCBI GI: 238507031 Blast Desc: conserved [Aspergillus flavus NRRL3357] gi|220689430|gb|EED45781.1| conserved [Aspergillus flavus NRRL3357]
  misc_feature (44)..(416): NCBI GI: 255936769 Blast Desc: Pc13g09890 [Penicillium chrysogenum Wisconsin 54-1255] gi|211584031|emb|CAP92058.1| Pc13g09890 [Penicillium chrysogenum Wisconsin 54-1255]
  misc_feature (152)..(461): NCBI GI: 255945945 Blast Desc: Pc20g12550 [Penicillium chrysogenum Wisconsin 54-1255] gi|211588475|emb|CAP86584.1| Pc20g12550 [Penicillium chrysogenum Wisconsin 54-1255]
  misc_feature: Useful for introducing or modulating the production of volatile compounds
MTLQKKADATVGGDGCERPTGKHASGKRRPADETPGIDTAQKRRRRAFSCLSCQKLKCRCEYDQGAVGCHRCQTLRIACSLRGQDAISPRSAKADTPVSSVEERLQRHEEALGEIKSMLSSFKEDALGFNRTPRTPPRSDKQKVEETASASGDGEVDAPDHEYFASPVDKGTTSAPVAVLREISRCVTLGYRRALSECALDFVQLQVLDEQTAADLIELFIKHQGHNLLVRPLDDLRGSGEMRRVSSFLHTVCSFMGIVYRQDLVGTPLHRQIYEQVRITLGQAVLASPLEMEDINAMFIMSNNANTPNSGGSEYIDSWLLTGYCAKQAMLSISFSKIVNNIKKGISTVEDHRAMHLWSTICLHHLQWAATTGRPSVIPKSYINQCQILLSFYQATMKDGMLVAEILLYSILHQKLSRQSYPHDGSECEEFLTWKQRWNHLLSLSTSSILKIGYNAACLIMVVRMLEDTGHALEPTSLLSTETSPIIQPTPVAYDSTSPYSLRDSSSRLDKDDAGITQMSNSSANPNPGDTLRANGCKYAKEVLETFLNMPRFVMDGVSTPTNLCIGYCTILVAHYDSSQSKIPDTVALELVRGIDNWVRTSPGKSWAYKYGSLALRKIEVRMGQATENSETSAHGTHDAGKDKSQLSSSDLASVPSNEHLSGFPTDDLFAPHAFNHDGGLSFDLNEQELFPSMEDFFGGRFFDFMK

SEQ ID NO: 39162 - DNA, 2937 bp, Muscodor strobelii
  misc_feature: SGI EST ID NO. CUFF.94228.0
  misc_feature: Variant of the nucleotide sequence at SEQ ID NO 39160
caagcatgtaagcgccaagatccggcgataaccggcggggaaggaaacgagctagaccatagggcgtcgaagaatctctgcggtggaaggagccagcgatttccgccggccgcgtttcgtgttcattattgattgacaattaaacgcaaagcgactgcttgccgagtcctcggagcaatgacactgcaaaagaaagccgatgcaacagtcgggggtgatgggtgtgagcgcccgaccgggaaacacgcctccgggaaacggcgccccgccgatgagacgcccggtatagatacggcacaaaaacggcgtagaagggcattctcctgtctatcatgccagaaactcaagtgcagatgcgagtacgaccagggagccgtaggatgtcatcgctgtcagactttgaggatagcctgctcgttacgtgggcaggatgccatatcaccaaggtctgccaaagcagatactcctgtgtctagtgtagaagaaagactgcaacgccacgaggaagccttaggggagatcaagtccatgctcagcagttttaaagaagatgcgcttggtttcaatcgtacacctcgaacgccaccacgctctgataagcagaaggtcgaggagacagcatcagcctcaggcgacggtgaggtcgacgctccagatcatgaatacttcgccagtccagtagacaagggaacgacttcagcgccagtagcagtattaagggagataagtcgttgcgtcactcttgggtacagacgagcacttagcgaatgcgctcttgactttgtccagttgcaagtacttgatgagcaaactgcagcagacttgattgagttatttatcaaacatcagggtcacaacttgctcgttcgtcctcttgatgatttacgaggaagcggtgagatgagacgagtgtcgtcattcttgcataccgtctgctccttcatgggcatcgtttatcgccaagatcttgtcgggacacccctacatcgtcagatatatgagcaagtgagaataacgcttgggcaagcggttttagcgagtcccttagaaatggaagacattaatgctatgttcatcatgagcaacaacgcgaacactccgaacagtggagggagcgaatacatcgatagttggctcttgacgggctactgcgctaagcaagccatgctgagcatcagcttctcgaaaattgttaataatatcaagaaaggcatatctacagttgaagatcacagggctatgcatctatggtctaccatatgtcttcaccacctccaatgggcggcaaccacgggtagaccgtccgtgattccaaaatcgtatataaaccaatgtcaaatcttactcagcttttaccaagctacaatgaaagatggaatgcttgttgcagagattcttctatattcaatattgcaccagaaactctcacgtcagtcttatcctcatgatggaagcgagtgcgaggaatttctgacatggaaacaacgatggaatcacttattatctctatcaacatcttccattttaaaaatagggtataacgctgcctgtttgataatggtcgttcgtatgttagaagacacaggccatgctctggaacctacctccctcttatcaacagaaacgagccctattatccagccaactcctgttgcctatgattcgacatccccatacagtctccgggactcaagctcaaggctggacaaggacgatgctggtatcacgcagatgagcaacagtagcgctaatcccaatcctggcgatactttgcgcgcgaacggatgcaagtacgctaaagaagtgctcgagacatttctcaatatgccacgctttgtcatggacggtgtctccacgccaacgaacctctgcattgggtactgcacaatacttgtcgcacactacgactcatcacagtctaaaattccagacacagtcgcactagagcttgtgaggggcatcgataattgggttcgcacatcacctggtaaatcatgggcttacaagtatgggagtctcgcgctccgcaaaatcgaagtacgcatgggacaagcaactgaaaactccgagacgtcggctcatggaactcacgatgctgggaaggataagtcgcaattatcttcctctgacctagcatctgtaccatccaatgagcatttgtctggcttcccaacggatgatttatttgcgcctcatgcattcaatcacgatggtggtctgtcatttgacctgaacgaacaagagctgttccctagtatggaagacttttttggcggccgatttttcgatttcatgaaatagtcggaatatgaattagatttcttttccacttcaacacagtagaagcacgaaatccgcatttaggcgagctggtaaagctgttctagtatatggacatcaaggaacacatacacggggtagattttcagccgttccatacacgatctcgacggcattcatgtttcgttgatcagggcatgaatcaaaaacaacgcagttgttcggtgcgtctagagacggctctagagatactgagacttgacgaagaatatttgaaacactggcttcaagctttggtgactccaacgatatcattagctcaccgctggatgcataatgatgtggaatgcatgccattcttttatcgatgtattcgctggaacctgcaatgcattgcatgttggttgatctgtgggaacaaatcaacatcataagcgagaccttgagaatgtggaggacaaagaggttgagtatcacaaatagctgcgccctggaatgcaaaaattcataatcgatccactcacatacgacactccagtattgatactatggaaattgagatcatggaatacttgttgtttccttgtttctttgtctcgtcgtaaatattgcgatgccatcacaccctagggtgtggtggtttgggcaaagattcgc

SEQ ID NO: 39163 - DNA, 879 bp, Muscodor strobelii
  misc_feature: SGI cDNA ID NO. 573620
  misc_feature: Elevated expression when VOC is produced
  misc_feature: Encodes the peptide sequence at SEQ ID NO 39164
atgcctgctgaagttctaatagaaattttcgatcttgccacaggacctagttttgaccctaaccgaccaatcgtaatggaatgggagctggtagatgacaaggaaacagaggcctatgcaaaagcccagatccccgatctgttgccacacgaaaaaatagccaaagtggactccaaaatcaggagtcatgtgaaagcatatcttatgcatcgcgaagctgtgcgaagagctctagaaaacaccgaagatagtgaaaccccaatgaaattcgacgtggagaatcgcgataacgatttttatactcatcccataatcatgcttaaaatgatggaaactttttacgaaaagctcaaatgggactacaaaacagttgaaaagacatatgaatactatgttccacgatttgaacagatcctttattgccgccgtcctgtcataccggtggaagaagcatgtcatattgcagacaaaatcgacaatgaaactttcggcattatgcacccatttttctcaacgcaacggaaagctgctatgttcttcgctccatttatccataaagattgctgggcagagcggctttacgtattgctaggcgactactcggggcacgttggagaatccgtcaaagtgatcccggatcaacgcgccctagatacattggcaagggatgacgcttggtggaacaaagaactaaaaaatgatcggcgcattaaagaccagaaggaacaatatgcaaaattgagaggaatactaaggagatggggggagatactagatcctatcggtattaatgagtcttgggagggaaactgggagaagctttcgcaatatcacaacaagacacttgaagagggcgtaggagttatgattttcaggtag

SEQ ID NO: 39164 - protein, 292 aa, Muscodor strobelii
  misc_feature: SGI Peptide ID NO. 573620
  misc_feature: Useful for introducing or modulating the production of volatile compounds
MPAEVLIEIFDLATGPSFDPNRPIVMEWELVDDKETEAYAKAQIPDLLPHEKIAKVDSKIRSHVKAYLMHREAVRRALENTEDSETPMKFDVENRDNDFYTHPIIMLKMMETFYEKLKWDYKTVEKTYEYYVPRFEQILYCRRPVIPVEEACHIADKIDNETFGIMHPFFSTQRKAAMFFAPFIHKDCWAERLYVLLGDYSGHVGESVKVIPDQRALDTLARDDAWWNKELKNDRRIKDQKEQYAKLRGILRRWGEILDPIGINESWEGNWEKLSQYHNKTLEEGVGVMIFR

SEQ ID NO: 39165 - DNA, 1291 bp, Muscodor strobelii
  misc_feature: SGI EST ID NO. CUFF.94231.0
  misc_feature: Variant of the nucleotide sequence at SEQ ID NO 39163
cacatataacatgggcccggaggacaagatgagcttcatttcattgcggctcactccctttcttggatagtccaagtttgaatttctactagtttgcctttcaagtgctggaacagatattttctacgatgtcctcatctgcggccggcgcaagggccgaggggcattcactttcaattctacaccgtatgcctgctgaagttctaatagaaattttcgatcttgccacaggacctagttttgaccctaaccgaccaatcgtaatggaatgggagctggtagatgacaaggaaacagaggcctatgcaaaagcccagatccccgatctgttgccacacgaaaaaatagccaaagtggactccaaaatcaggagtcatgtgaaagcatatcttatgcatcgcgaagctgtgcgaagagctctagaaaacaccgaagatagtgaaaccccaatgaaattcgacgtggagaatcgcgataacgatttttatactcatcccataatcatgcttaaaatgatggaaactttttacgaaaagctcaaatgggactacaaaacagttgaaaagacatatgaatactatgttccacgatttgaacagatcctttattgccgccgtcctgtcataccggtggaagaagcatgtcatattgcagacaaaatcgacaatgaaactttcggcattatgcacccatttttctcaacgcaacggaaagctgctatgttcttcgctccatttatccataaagattgctgggcagagcggctttacgtattgctaggcgactactcggggcacgttggagaatccgtcaaagtgatcccggatcaacgcgccctagatacattggcaagggatgacgcttggtggaacaaagaactaaaaaatgatcggcgcattaaagaccagaaggaacaatatgcaaaattgagaggaatactaaggagatggggggagatactagatcctatcggtattaatgagtcttgggagggaaactgggagaagctttcgcaatatcacaacaagacacttgaagagggcgtaggagttatgattttcaggtagcaggaccagttttgagttttcatttctttgatctcttttgattccattcattttctccccctacgttcgtttgccccattgccttcctgattaacacaatattcaagatagatcatcgtcatgcttatcatgacgtaggcagatttcatttaatgcatgttaaagatagaagtgtgttggttttagtcagtttttcgaatatacagtcgttccgattcaccaag

SEQ ID NO: 39166 - DNA, 636 bp, Muscodor strobelii
  misc_feature: SGI cDNA ID NO. 573621
  misc_feature: Encodes the peptide sequence at SEQ ID NO 39167
atgccactcgagctcctcctagcagatgaatccgacgcacgccgcgtcgcggagatagaacatgcagcatacgtcgacaagccaatggacaaagtgctatttccaggtgtagcacccggtgatgccatcgcatcacgcaccgaaggcttggcgaaagaacttcgcgaggataaaactgtgaactgggtcaaagtcatcgacaattctattccgaaagatgagaacaacgagcagctcatcggctttgcgcagtggaatattcgacttaatagtgagccgctgccccctccgagggattacactgctccgggtttcaatactgaggcttgtaatgcggtttttaatggggcttatgctatgcgggccagagtccttggagatgggaaacatgttcatctgagactatgcttcgtccaccccaaagctcaaagacgtggagctggaaagctgcttgttgaatgggggctggaaaaggcgacggaactcgggctgcctgcgtacaccatggcgtcggtagaaggtcactcgctctacgagaaatgcggcttccgtgatattgagagagacgtcgtggattgctcgaaatggggtgtcgatgagccttttgtcactatcgctatgaagaaggagccttga

SEQ ID NO: 39167 - protein, 211 aa, Muscodor strobelii
  misc_feature: SGI Peptide ID NO. 573621
  misc_feature (71)..(184): Pfam Id: PF00583 Pfam Desc: Acetyltransferase (GNAT) family
  misc_feature (10)..(211): NCBI GI: 169611903 Blast Desc: SNOG_09066 [Phaeosphaeria nodorum SN15] gi|111062138|gb|EAT83258.1| SNOG_09066 [Phaeosphaeria nodorum SN15]
  misc_feature (1)..(197): NCBI GI: 256727759 Blast Desc: NECHADRAFT_76908 [Nectria haematococca mpVI 77-13-4]
  misc_feature (1)..(197): NCBI GI: 189189284 Blast Desc: conserved [Pyrenophora tritici-repentis Pt-1C-BFP] gi|187972587|gb|EDU40086.1| conserved [Pyrenophora tritici-repentis Pt-1C-BFP]
  misc_feature (1)..(209): NCBI GI: 261352647 Blast Desc: conserved [Verticillium albo-atrum VaMs.102]
  misc_feature (9)..(207): NCBI GI: 261357792 Blast Desc: [Verticillium albo-atrum VaMs.102]
  misc_feature (4)..(207): NCBI GI: 240111563 Blast Desc: GNAT family acetyltransferase, [Coccidioides posadasii C735 delta SOWgp]
  misc_feature (4)..(207): NCBI GI: 119188563 Blast Desc: [Coccidioides immitis RS]
  misc_feature (1)..(183): NCBI GI: 225556216 Blast Desc: conserved [Ajellomyces capsulatus G186AR]
  misc_feature (4)..(211): NCBI GI: 258575767 Blast Desc: [Uncinocarpus reesii 1704] gi|237902331|gb|EEP76732.1| [Uncinocarpus reesii 1704]
  misc_feature (2)..(185): NCBI GI: 255941430 Blast Desc: Pc16g11840 [Penicillium chrysogenum Wisconsin 54-1255] gi|211586107|emb|CAP93854.1| Pc16g11840 [Penicillium chrysogenum Wisconsin 54-1255]
MPLELLLADESDARRVAEIEHAAYVDKPMDKVLFPGVAPGDAIASRTEGLAKELREDKTVNWVKVIDNSIPKDENNEQLIGFAQWNIRLNSEPLPPPRDYTAPGFNTEACNAVFNGAYAMRARVLGDGKHVHLRLCFVHPKAQRRGAGKLLVEWGLEKATELGLPAYTMASVEGHSLYEKCGFRDIERDVVDCSKWGVDEPFVTIAMKKEP

SEQ ID NO: 39168 - DNA, 2282 bp, Muscodor strobelii
  misc_feature: SGI EST ID NO. CUFF.94234.0
  misc_feature: Variant of the nucleotide sequence at SEQ ID NO 39166
ttgagatttgcgtcattactattgaatgtcgtgttgagtaggcacccttcagtaactcatgcgccaaagatgcgctacaagctatcgtattggatcactaaacgtcatcgagggtgagacctacgatgtaatctacatctgatgaagatcaatggcttcctaaagtacaatgtcacagtacaatcgcgttccctgcgctgtttagagactcaaggcccaatatattaatgttaagaaacaataatgaggctctctcggctctctctttgctttagtgggtccagggagccaacagcaccggcagaacccttcgaaaatcatgcaacgtcaagggcaaaaagatgaataatacaccgctcatctacttacagctctatcttaaaatcaagatgtaccgaacgataattgtacaaagtactggtcattacatgatgttgctgaaagaatccggcattccgacatgatccacatcaactctcatccctcaagcaatcaagcactcaaacgggcaacactccgaatgagtcatcaccggtgcatctcaacgacacagctgctaactccgtacaagcgcggccttagcatttctctcatcgacaaaaggtgtttctagaacgaaggaagaaatgcggggaatatgctcatgaaaaagatgatcatatcattttatgtggtgtgcctaatgagtgccaaggaggcattggaaatatgcatttctttacatcacgtgtgcccctgttgagatgatgtttccctatgggagcaagtcatcattataaatcgtcgtgttcgcaactcctttcagaccttaggaacactcccaacggtgcaattccataagtctacacatctcagtcacttcaataacctcccaaaatgccactcgagctcctcctagcagatgaatccgacgcacgccgcgtcgcggagatagaacatgcagcatacgtcgacaagccaatggacaaagtgctatttccaggtgtagcacccggtgatgccatcgcatcacgcaccgaaggcttggcgaaagaacttcgcgaggataaaactgtgaactgggtcaaagtcatcgacaattctattccgaaagatgagaacaacgagcagctcatcggctttgcgcagtggaatattcgacttaatagtgagccgctgccccctccgagggattacactgctccgggtttcaatactgaggcttgtaatgcggtttttaatggggcttatgctatgcgggccagagtccttggagatgggaaacatgttcatctgagactatgcttcgtccaccccaaagctcaaagacgtggagctggaaagctgcttgttgaatgggggctggaaaaggcgacggaactcgggctgcctgcgtacaccatggcgtcggtagaaggtcactcgctctacgagaaatgcggcttccgtgatattgagagagacgtcgtggattgctcgaaatggggtgtcgatgagccttttgtcactatcgctatgaagaaggagccttgattcatcattcttggggtaggaaaagaggacgctgcgcggtcgatgagttgtgctgataatggagatactgcgatgcctcatagattctcgaagagcaataagcttagagaaggagcattaggatggctaagcatatatcgaagaggtagagagagtatcttgatatgcctggacgacaaggcacaccattagatatcttctagattctcttgaagtaaatgttagacagagctgatttcggaaatacaagccgaatgagattctacttatatatgatcattaatatcgagccaatgcgaacgcgaagagggaggttgggaacagatacaaaatcatcatcattgtaaacctcaagatgtcgaagcacaacaccatcgcgttgtgacagtgacagtgacaactcctgtctcctgttcatatagctccgttgggttggattgatcaagtgattctggccgtttgctaaagctgtcaaccagtggctctgttgcttcgacaaagagcgcccctcgcactttgggttaccaggcacgggaggaaggtgcgtacttacacaggagttgccgtcgcgacttccgaataacaaagagcggggtagctatgtatttgtaccagtttaattgagcagtcgttcggggctcagagagacgcgcagattggcctacgggatagtttgggacgccttactatgaacggtccggcagaattggggacgcccaatgacgccgagggtcgctgttcgatactctgagagggtgagaagggtggca

SEQ ID NO: 39169 - DNA, 648 bp, Muscodor strobelii
  misc_feature: SGI cDNA ID NO. 573622
  misc_feature: Encodes the peptide sequence at SEQ ID NO 39170
atggtggagaaagtttacgtcacttacaacgatgttcacaagctgtgccaagaggccgctccggcgatgctggcctcgttccagccgcagctcatgatcgccatcggcggcggcggctacgtccctgcgcgcatcctgcgatcattcctcaagcagcccggccaccccaacatccccatccaggccatcggcctctcgctctacgaggagctgcccaccacccactccgacaatgccactcccggtgtcgtggaccagatcggcaccaaggtcacgcggacgcagtggctggacttcagcagtctcggtggcatggagaacctggttggcaagcgcatcctcatcgttgacgaggtcgatgacacccgcacgacgctagagtacgccgtccgggagctgcagaaggacgtcgaggccgtgagccagaagctcggccgcgagggcgagaagaccgagttcagcatctttgtcctacacaacaaggacaagacgaagaagggcacgcttccctccgacatgatggacaacaagcaatactacgccgcacgcaccgttggcgacgtctggatctgctacccttgggaggcgatcgacattgacgagcacgatgccatggccgccaagcagacgaattcctcagctgcttaa

SEQ ID NO: 39170 - protein, 215 aa, Muscodor strobelii
  misc_feature: SGI Peptide ID NO. 573622
  misc_feature (1)..(209): NCBI GI: 154323452 Blast Desc: BC1G_00125 [Botryotinia fuckeliana B05.10] gi|150842354|gb|EDN17547.1| BC1G_00125 [Botryotinia fuckeliana B05.10]
  misc_feature (1)..(210): NCBI GI: 156057835 Blast Desc: SS1G_04649 [Sclerotinia sclerotiorum 1980] gi|154702434|gb|EDO02173.1| SS1G_04649 [Sclerotinia sclerotiorum 1980]
  misc_feature (2)..(214): NCBI GI: 261361016 Blast Desc: hypoxanthine guanine phosphoribosyltransferase [Verticillium albo-atrum VaMs.102]
  misc_feature (1)..(210): NCBI GI: 39968883 Blast Desc: conserved [Magnaporthe grisea 70-15] gi|145015315|gb|EDJ99851.1| conserved [Magnaporthe grisea 70-15]
  misc_feature (1)..(203): NCBI GI: 171681814 Blast Desc: protein product [Podospora anserina] gi|170940866|emb|CAP66516.1| protein product [Podospora anserina]
  misc_feature (1)..(211): NCBI GI: 116201853 Blast Desc: conserved [Chaetomium globosum CBS 148.51] gi|88177329|gb|EAQ84797.1| conserved [Chaetomium globosum CBS 148.51]
  misc_feature (1)..(213): NCBI GI: 256733842 Blast Desc: NECHADRAFT_58783 [Nectria haematococca mpVI 77-13-4]
  misc_feature (1)..(209): NCBI GI: 225555054 Blast Desc: xanthine phosphoribosyltransferase [Ajellomyces capsulatus G186AR]
  misc_feature (1)..(213): NCBI GI: 189204846 Blast Desc: hypoxanthine guanine phosphoribosyltransferase [Pyrenophora tritici-repentis Pt-1C-BFP] gi|187985857|gb|EDU51345.1| hypoxanthine guanine [Pyrenophora
  misc_feature (1)..(203): NCBI GI: 85097790 Blast Desc: xanthine phosphoribosyltransferase 1 [Neurospora crassa OR74A] gi|28921997|gb|EAA31268.1| xanthine phosphoribosyltransferase 1 [Neurospora crassa OR74A]
  misc_feature (3)..(211): SWISSPROT Homolog: EC 2.4.2.8 Hypoxanthine phosphoribosyltransferase
MVEKVYVTYNDVHKLCQEAAPAMLASFQPQLMIAIGGGGYVPARILRSFLKQPGHPNIPIQAIGLSLYEELPTTHSDNATPGVVDQIGTKVTRTQWLDFSSLGGMENLVGKRILIVDEVDDTRTTLEYAVRELQKDVEAVSQKLGREGEKTEFSIFVLHNKDKTKKGTLPSDMMDNKQYYAARTVGDVWICYPWEAIDIDEHDAMAAKQTNSSAA

SEQ ID NO: 39171 - DNA, 2526 bp, Muscodor strobelii
  misc_feature: SGI EST ID NO. CUFF.94730.0
  misc_feature: Variant of the nucleotide sequence at SEQ ID NO 39169
gttttttttctctcacttgctcacacctttgatattgaacctctgcctatttctgagactttatcctatatttgccgataattctagacggcgatcaagtcgtgattgacgtttcttgaccacttcgctcttgaatccctagctcacctacccttgcttccacattgcacagaaacaccagccgtcaagatggtggagaaagtttacgtcacttacaacgatgttcacaagctgtgccaagaggccgctccggcgatgctggcctcgttccagccgcagctcatgatcgccatcggcggcggcggctacgtccctgcgcgcatcctgcgatcattcctcaagcagcccggccaccccaacatccccatccaggccatcggcctctcgctctacgaggagctgcccaccacccactccgacaatgccactcccggtgtcgtggaccagatcggcaccaaggtcacgcggacgcagtggctggacttcagcagtctcggtggcatggagaacctggttggcaagcgcatcctcatcgttgacgaggtcgatgacacccgcacgacgctagagtacgccgtccgggagctgcagaaggacgtcgaggccgtgagccagaagctcggccgcgagggcgagaagaccgagttcagcatctttgtcctacacaacaaggacaagacgaagaagggcacgcttccctccgacatgatggacaacaagcaatactacgccgcacgcaccgttggcgacgtctggatctgctacccttgggaggcgatcgacattgacgagcacgatgccatggccgccaagcagacgaattcctcagctgcttaagcttatcgagccccacagagatcattgaacttgacagagtgatgcacgacgaaaagtgctcgaaacaccagcaccatggatgaacaatggcgctgacacacgatgcccttgacgatggtagcgaggttattgaggaaataagtgatatacttgccctgatcttgactgtgaagtatctcgcttcatccctcgatagtctcggttggataacggaacaaacaggcacaagccttaggatggatggagggttcgtgtcttctgggtggcgcacaatgcttgaattagcgaacatagagagaattttagacggtggtggataactgctactcccttttagatgccaagaaatctggataaaaaatcggaaacaagtcaaacgttgctaacggtgataatgctgaatccgtgatcccgtttttagtggacagagttgcggatgttacatttccgccaagttatcacccaaggtttggaagacacaacccacggaatcaacatgtcctaacagaaggtagagagcgatgctggattcatctacagttgagtacatattcaacatgttatgcttactcggcatcttttctaactcttctctcatttctcctgtagagtattcgtctaggctcgacaagaagtaattgaaacaccggccgaatcaatgaattacgcagcatgctctttcgcatgtttctccttgagcctcttctcatgcttcataaactccctaatgcccacatccacatttttatacaactgatcatcccagaaatccttagcaagtctgggaagtccgggttgttcatttttctttttcatatcctgcaaactccaattcgtctcactcccaccacctccatcctccccacttataggcaatcccttaaccgcacttgtaccccctaagacctcaacaggtccttgtgcgcgctcccgctgtaaggcagcctcggcgagcgccgtcttagaagcccagtcttccatctcgtcgcggtaccgctcccagacgcagtctacgcagccgctcatgcagcagttgtcgggctcgtcgggttttgggggcacgcggatgccggctatgagggtgctacgatcgcggagtgcctgtatgcggtcagctcgctccaaggggcccgcgagccgcgagctgacactgaaggtcggttcgctgccggtcgtggatgcggatgggggtgatggttcttttgaggagtgtgaggattgtgttgatggtggtgaggatggagtagtacctgattccttggcgggagatgctgctgcggccttcttcttggcggctgggttcttgggggatttgggggaggaggcgggaggttcctcgggtttcacttcggggatgggttgaggggtgatgaggatggcttcgtagtaaggtccgatcggagaggcttgttcagaggctgtggcttcgcctggggtgccgccggggaggttgctgccgcttgcgacggcgtaggaacgctggaattgggcacatcgcgagacgggcgtcgagaggcgggcggcgcggaggaagggccgcattgatggtggcattgtggatgatcggcctcgttaggcttcgaaaatggtgcagaagtggtgtggatagtaagaggtagaggtgtgagaggcgatgatgcaaatgaagcttttggaggcttttttcgcgataccgaaggatgggaaatg

SEQ ID NO: 39172 - DNA, 891 bp, Muscodor strobelii
  misc_feature: SGI cDNA ID NO. 573623
  misc_feature: Reduced expression when VOC is produced
  misc_feature: Encodes the peptide sequence at SEQ ID NO 39173
atgccaccatcaatgcggcccttcctccgcgccgcccgcctctcgacgcccgtctcgcgatgtgcccaattccagcgttcctacgccgtcgcaagcggcagcaacctccccggcggcaccccaggcgaagccacagcctctgaacaagcctctccgatcggaccttactacgaagccatcctcatcacccctcaacccatccccgaagtgaaacccgaggaacctcccgcctcctcccccaaatcccccaagaacccagccgccaagaagaaggccgcagcagcatctcccgccaaggaatcaggtactactccatcctcaccaccatcaacacaatcctcacactcctcaaaagaaccatcacccccatccgcatccacgaccggcagcgaaccgaccttcagtgtcagctcgcggctcgcgggccccttggagcgagctgaccgcatacaggcactccgcgatcgtagcaccctcatagccggcatccgcgtgcccccaaaacccgacgagcccgacaactgctgcatgagcggctgcgtagactgcgtctgggagcggtaccgcgacgagatggaagactgggcttctaagacggcgctcgccgaggctgccttacagcgggagcgcgcacaaggacctgttgaggtcttagggggtacaagtgcggttaagggattgcctataagtggggaggatggaggtggtgggagtgagacgaattggagtttgcaggatatgaaaaagaaaaatgaacaacccggacttcccagacttgctaaggatttctgggatgatcagttgtataaaaatgtggatgtgggcattagggagtttatgaagcatgagaagaggctcaaggagaaacatgcgaaagagcatgctgcgtaa

SEQ ID NO: 39173 - protein, 296 aa, Muscodor strobelii
  misc_feature: SGI Peptide ID NO. 573623
  misc_feature (46)..(293): NCBI GI: 171681812 Blast Desc: protein product [Podospora anserina] gi|170940865|emb|CAP66515.1| protein product [Podospora anserina]
  misc_feature (49)..(293): NCBI GI: 256733377 Blast Desc: NECHADRAFT_77393 [Nectria haematococca mpVI 77-13-4]
  misc_feature (46)..(293): NCBI GI: 116201851 Blast Desc: [Chaetomium globosum CBS 148.51] gi|88177328|gb|EAQ84796.1| [Chaetomium globosum CBS 148.51]
  misc_feature (40)..(293): NCBI GI: 39968885 Blast Desc: MGG_10053 [Magnaporthe grisea 70-15] gi|145015314|gb|EDJ99850.1| MGG_10053 [Magnaporthe grisea 70-15]
  misc_feature (49)..(293): NCBI GI: 46127791 Blast Desc: FG08273.1 [Gibberella zeae PH-1]
  misc_feature (5)..(293): NCBI GI: 85097786 Blast Desc: NCU05541 [Neurospora crassa OR74A] gi|28921996|gb|EAA31267.1| NCU05541 [Neurospora crassa OR74A]
  misc_feature (104)..(293): NCBI GI: 154323538 Blast Desc: BC1G_00168 [Botryotinia fuckeliana B05.10] gi|150842397|gb|EDN17590.1| BC1G_00168 [Botryotinia fuckeliana B05.10]
  misc_feature (32)..(296): NCBI GI: 156058023 Blast Desc: SS1G_04743 [Sclerotinia sclerotiorum 1980] gi|154702528|gb|EDO02267.1| SS1G_04743 [Sclerotinia sclerotiorum 1980]
  misc_feature (48)..(287): NCBI GI: 189204768 Blast Desc: conserved [Pyrenophora tritici-repentis Pt-1C-BFP] gi|187985818|gb|EDU51306.1| conserved [Pyrenophora tritici-repentis Pt-1C-BFP]
  misc_feature (18)..(293): NCBI GI: 238508762 Blast Desc: conserved [Aspergillus flavus NRRL3357] gi|220688457|gb|EED44810.1| conserved [Aspergillus flavus NRRL3357]
  misc_feature: Useful for introducing or modulating the production of volatile compounds
MPPSMRPFLRAARLSTPVSRCAQFQRSYAVASGSNLPGGTPGEATASEQASPIGPYYEAILITPQPIPEVKPEEPPASSPKSPKNPAAKKKAAAASPAKESGTTPSSPPSTQSSHSSKEPSPPSASTTGSEPTFSVSSRLAGPLERADRIQALRDRSTLIAGIRVPPKPDEPDNCCMSGCVDCVWERYRDEMEDWASKTALAEAALQRERAQGPVEVLGGTSAVKGLPISGEDGGGGSETNWSLQDMKKKNEQPGLPRLAKDFWDDQLYKNVDVGIREFMKHEKRLKEKHAKEHAA

SEQ ID NO: 39174 - DNA, 2777 bp, Muscodor strobelii
  misc_feature: SGI EST ID NO. CUFF.94731.1
  misc_feature: Variant of the nucleotide sequence at SEQ ID NO 39172
catttcccatccttcggtatcgcgaaaaaagcctccaaaagcttcatttgcatcatcgcctctcacacctctacctcttactatccacaccacttctgcaccattttcgaagcctaacgaggccgatcatccacaatgccaccatcaatgcggcccttcctccgcgccgcccgcctctcgacgcccgtctcgcgatgtgcccaattccagcgttcctacgccgtcgcaagcggcagcaacctccccggcggcaccccaggcgaagccacagcctctgaacaagcctctccgatcggaccttactacgaagccatcctcatcacccctcaacccatccccgaagtgaaacccgaggaacctcccgcctcctcccccaaatcccccaagaacccagccgccaagaagaaggccgcagcagcatctcccgccaaggaatcaggcactccgcgatcgtagcaccctcatagccggcatccgcgtgcccccaaaacccgacgagcccgacaactgctgcatgagcggctgcgtagactgcgtctgggagcggtaccgcgacgagatggaagactgggcttctaagacggcgctcgccgaggctgccttacagcgggagcgcgcacaaggacctgttgaggtcttagggggtacaagtgcggttaagggattgcctataagtggggaggatggaggtggtgggagtgagacgaattggagtttgcaggatatgaaaaagaaaaatgaacaacccggacttcccagacttgctaaggatttctgggatgatcagttgtataaaaatgtggatgtgggcattagggagtttatgaagcatgagaagaggctcaaggagaaacatgcgaaagagcatgctgcgtaattcattgattcggccggtgtttcaattacttcttgtcgagcctagacgaatactctacaggagaaatgagagaagagttagaaaagatgccgagtaagcataacatgttgaatatgtactcaactgtagatgaatccagcatcgctctctaccttctgttaggacatgttgattccgtgggttgtgtcttccaaaccttgggtgataacttggcggaaatgtaacatccgcaactctgtccactaaaaacgggatcacggattcagcattatcaccgttagcaacgtttgacttgtttccgattttttatccagatttcttggcatctaaaagggagtagcagttatccaccaccgtctaaaattctctctatgttcgctaattcaagcattgtgcgccacccagaagacacgaaccctccatccatcctaaggcttgtgcctgtttgttccgttatccaaccgagactatcgagggatgaagcgagatacttcacagtcaagatcagggcaagtatatcacttatttcctcaataacctcgctaccatcgtcaagggcatcgtgtgtcagcgccattgttcatccatggtgctggtgtttcgagcacttttcgtcgtgcatcactctgtcaagttcaatgatctctgtggggctcgataagcttaagcagctgaggaattcgtctgcttggcggccatggcatcgtgctcgtcaatgtcgatcgcctcccaagggtagcagatccagacgtcgccaacggtgcgtgcggcgtagtattgcttgttgtccatcatgtcggagggaagcgtgcccttcttcgtcttgtccttgttctgtttcgaggagtggtcagttgtctgtctctgaacccaaatcccaaatgcgcatgcagattcataatatttggtagaagagatggcggaaaggactcacgtgtaggacaaagatgctgaactcggtcttctcgccctcgcggccgagcttctggctcacggcctcgacgtccttctgcagctcccggacggcgtactctagcgtcgtgcgggtgtcatcgacctcgtcaacgatgaggatgcgcttgccaaccaggttctccatgccaccgagactgctgaagtccagccactgcgtccgcgtgaccttggtgccgatctggtccacgacaccgggagtggcattgtcggagtgggtggtgggcagctcctcgtagagcgagaggccgatggcctggatggggatgttggggtggccgggctgcttgaggaatgatcgcaggatgcgcgcagggacgtagccgccgccgccgatggcgatcatgagctgcggctggaacgaggccagcatcgccggagcggcctcttggcacagcttgtgaacctgttgacgtcgcacatggctatgtcagcttgtctctaatttttcatcatttcctcttcggcctagaccgtctgtctgggtgcttcttccgacgaccctccacgcatatcttggcccccaaatacagcattgagtttgaagcgtataacgtgcgtagtggatatgctatatgcatatcggctgtacgcttctattcgtggtatggcaagaatatgcatgttgagcaggaatcgcggggagggactgtgcttgatggatagggatcgcggggcaggcaaaattgcgctgaatcacacttacatcgttgtaagtgacgtaaactttctccaccatcttgacggctggtgtttctgtgcaatgtggaagcaagggtaggtgagctagggattcaagagcgaagtggtcaagaaacgtcaatcacgacttgatcgccgtctagaattatcggcaaatataggataaagtctcagaaataggcagaggttcaatatcaaaggtgtgagcaagtgagagaaaaaaaac

SEQ ID NO: 39175 - DNA, 2100 bp, Muscodor strobelii
  misc_feature: SGI cDNA ID NO. 573624
  misc_feature: Encodes the peptide sequence at SEQ ID NO 39176
atggaggaaccagcgcccaaacggcgcaagacatcgccaacaagcagcctcaatctgcctgccggcacctcccagcccgactccgacgcaccggcttcttctgacagcggcggcacacggcgatcatcccgactgaaccgcccttccttcctatcacctaccaaagccagtcttgcgcgatccaatcccgatgtcttggcccggcgcaactcaagacgaagcagcagcccctccaaacagcaactcccagctgcttccgacccgggcagtcctggaagcgaccatggaagtgaaagcgggcttgtcacggcccagttggaggctgaatcggagaccggaagacttcaggatgaagctgcgagcgaaagccagaatgcaccggctgaacgagcgggcagcccggtcaggcgggcgggtggaggattggccatgaaacctaagaggactccgagcaagaacatgccttcacccagaccactcccgccaccgtccgccgaagaagaggagctcatcgacccattcaagaggcgaggcaggttacgacgttcacccccaccaggtgtccttcccgtcatcgagccagaagagcccgagctcccacccacgcccacacaacagggcctctccgaccccacgtccatcatctcgtcgccgttggggatgaacacaccgtccaagcgccctaggaggagcaaggtgttggcagagaggatgaagagttcgcccctgaagcagtcgcccatgcggccgcctgtggtagaagaaagtgctgataatgagaatcagaatgagaatgaagcaggagatgatgtcttcgccccgataccactcaatattgatcctctgagaatcgagccgaagcgcaagaagaagaagcgcaaatctcaccctggacgcaagatagaggaggagcctgacccgctggcagataagaaagccttgcgggactctcttctagctgatgtcgaaaggctgcaagctgaacgtgaggtagctgagcgccagaacgagcgagtctacagatcacagtacccaggacgctctactttaacccccccagaaaccgagcaacagcaaagtttggtggaagtgctaggtcagtatgtgcttccggcggaggaagagacacctcctgatccggcacaagtctggctggacgcagccatggatccaatgaacgtccttccattcggaagagggaacgctatctctcttccaccgttcccgatgtcatcacatgagccctccgaaaaagtaccgcctcccgtctctcaccaccccatccctatgacggcagaagaagaactgcctcatctgcaaatcttctctccattcgtatatcaaacagccattgccaacgttccccgagagtccatggacgactcggaaccaattcaccagaggcacactatctcggcctcgtcttctccccccgggctattctctgccagtattgagatggtcgtcaacacaaagacgctcatcatcaaagatctctctgtactgcgtcttgacccgaacgccgctagcgaactcaacccgtttatagacctggttatccaggacaacgtgaacagcagcttgaagagaaacatcagtgttctgacctgggccatgggcgagtggctccgcattgcgacgaagcgagctaagttctggcatctcgtgcagtccgagttgggcagtgaagagggcttgagagaatgcgcgaggaatatgagacgacatagtaggaggagacggaagaaagatgatgacgaggacgaagaggttggcgacgagaggaagaagatgtccaaggctgatatgatagagttgatgggtcgtacgagctttgatctggatctttctgggtttggcgttgatggggatgagagccttacagctagagtacgatggcgtgtcaagtttgattggacaggagaggcgaggagtgagattgggcttttgatgggggtccctgctaagtggcatgctggcgatgagaaaggaagcctgaatgggataccgggtatgtttgataagctgctgagagagagcggtgacccgatggaggctctgaggacggttgttgctcttgttgtgggtgaagagtcttga

SEQ ID NO: 39176 - protein, 699 aa, Muscodor strobelii
  misc_feature: SGI Peptide ID NO. 573624
  misc_feature (1)..(697): NCBI GI: 39968887 Blast Desc: MGG_10054 [Magnaporthe grisea 70-15] gi|145015313|gb|EDJ99849.1| MGG_10054 [Magnaporthe grisea 70-15]
  misc_feature (1)..(697): NCBI GI: 85097795 Blast Desc: NCU05543 [Neurospora crassa OR74A] gi|28921998|gb|EAA31269.1| [Neurospora crassa OR74A]
  misc_feature (306)..(699): NCBI GI: 256733841 Blast Desc: NECHADRAFT_36703 [Nectria haematococca mpVI 77-13-4]
  misc_feature (342)..(697): NCBI GI: 261361009 Blast Desc: conserved [Verticillium albo-atrum VaMs.102]
  misc_feature (306)..(676): NCBI GI: 46127797 Blast Desc: FG08276.1 [Gibberella zeae PH-1]
  misc_feature (194)..(699): NCBI GI: 154323536 Blast Desc: BC1G_00167 [Botryotinia fuckeliana B05.10] gi|150842396|gb|EDN17589.1| BC1G_00167 [Botryotinia fuckeliana B05.10]
  misc_feature (195)..(699): NCBI GI: 156058021 Blast Desc: SS1G_04742 [Sclerotinia sclerotiorum 1980] gi|154702527|gb|EDO02266.1| SS1G_04742 [Sclerotinia sclerotiorum 1980]
  misc_feature (199)..(697): NCBI GI: 169610087 Blast Desc: SNOG_08137 [Phaeosphaeria nodorum SN15] gi|160701980|gb|EAT84413.2| SNOG_08137 [Phaeosphaeria nodorum SN15]
  misc_feature (193)..(697): NCBI GI: 189204766 Blast Desc: [Pyrenophora tritici-repentis Pt-1C-BFP] gi|187985817|gb|EDU51305.1| [Pyrenophora tritici-repentis Pt-1C-BFP]
  misc_feature (8)..(409): NCBI GI: 116201849 Blast Desc: CHGG_08809 [Chaetomium globosum CBS 148.51] gi|88177327|gb|EAQ84795.1| CHGG_08809 [Chaetomium globosum CBS 148.51]
MEEPAPKRRKTSPTSSLNLPAGTSQPDSDAPASSDSGGTRRSSRLNRPSFLSPTKASLARSNPDVLARRNSRRSSSPSKQQLPAASDPGSPGSDHGSESGLVTAQLEAESETGRLQDEAASESQNAPAERAGSPVRRAGGGLAMKPKRTPSKNMPSPRPLPPPSAEEEELIDPFKRRGRLRRSPPPGVLPVIEPEEPELPPTPTQQGLSDPTSIISSPLGMNTPSKRPRRSKVLAERMKSSPLKQSPMRPPVVEESADNENQNENEAGDDVFAPIPLNIDPLRIEPKRKKKKRKSHPGRKIEEEPDPLADKKALRDSLLADVERLQAEREVAERQNERVYRSQYPGRSTLTPPETEQQQSLVEVLGQYVLPAEEETPPDPAQVWLDAAMDPMNVLPFGRGNAISLPPFPMSSHEPSEKVPPPVSHHPIPMTAEEELPHLQIFSPFVYQTAIANVPRESMDDSEPIHQRHTISASSSPPGLFSASIEMVVNTKTLIIKDLSVLRLDPNAASELNPFIDLVIQDNVNSSLKRNISVLTWAMGEWLRIATKRAKFWHLVQSELGSEEGLRECARNMRRHSRRRRKKDDDEDEEVGDERKKMSKADMIELMGRTSFDLDLSGFGVDGDESLTARVRWRVKFDWTGEARSEIGLLMGVPAKWHAGDEKGSLNGIPGMFDKLLRESGDPMEALRTVVALVVGEES

SEQ ID NO: 39177 - DNA, 2725 bp, Muscodor strobelii
  misc_feature: SGI EST ID NO. CUFF.94247.0
  misc_feature: Variant of the nucleotide sequence at SEQ ID NO 39175
ggcgcgtgtacagctgcagcaacaccgacgcgtctcttggtgaagaagacactgaaagcagttcggcagcacatataaaatcagcaattgtcacgatataacgaattgatgatcagagaagtgttttgtatattccgattgtcacttgaactgtcgtactaccagtttgatgatgtttattacaacgactgatcgaatgcgacactgagacctgtcgcaaagtcaacaaacgataaacgatagcggatacctacccgaccctgttgcgaccagagcactcggtcactcctcaacactaagagctgactgaactacactcctggaacatcgcaatggacaattgagtgaccagctaatcattgtattccatggaggaaccagcgcccaaacggcgcaagacatcgccaacaagcagcctcaatctgcctgccggcacctcccagcccgactccgacgcaccggcttcttctgacagcggcggcacacggcgatcatcccgactgaaccgcccttccttcctatcacctaccaaagccagtcttgcgcgatccaatcccgatgtcttggcccggcgcaactcaagacgaagcagcagcccctccaaacagcaactcccagctgcttccgacccgggcagtcctggaagcgaccatggaagtgaaagcgggcttgtcacggcccagttggaggctgaatcggagaccggaagacttcaggatgaagctgcgagcgaaagccagaatgcaccggctgaacgagcgggcagcccggtcaggcgggcgggtggaggattggccatgaaacctaagaggactccgagcaagaacatgccttcacccagaccactcccgccaccgtccgccgaagaagaggagctcatcgacccattcaagaggcgaggcaggttacgacgttcacccccaccaggtgtccttcccgtcatcgagccagaagagcccgagctcccacccacgcccacacaacagggcctctccgaccccacgtccatcatctcgtcgccgttggggatgaacacaccgtccaagcgccctaggaggagcaaggtgttggcagagaggatgaagagttcgcccctgaagcagtcgcccatgcggccgcctgtggtagaagaaagtgctgataatgagaatcagaatgagaatgaagcaggagatgatgtcttcgccccgataccactcaatattgatcctctgagaatcgagccgaagcgcaagaagaagaagcgcaaatctcaccctggacgcaagatagaggaggagcctgacccgctggcagataagaaagccttgcgggactctcttctagctgatgtcgaaaggctgcaagctgaacgtgaggtagctgagcgccagaacgagcgagtctacagatcacagtacccaggacgctctactttaacccccccagaaaccgagcaacagcaaagtttggtggaagtgctaggtcagtatgtgcttccggcggaggaagagacacctcctgatccggcacaagtctggctggacgcagccatggatccaatgaacgtccttccattcggaagagggaacgctatctctcttccaccgttcccgatgtcatcacatgagccctccgaaaaagtaccgcctcccgtctctcaccaccccatccctatgacggcagaagaagaactgcctcatctgcaaatcttctctccattcgtatatcaaacagccattgccaacgttccccgagagtccatggacgactcggaaccaattcaccagaggcacactatctcggcctcgtcttctccccccgggctattctctgccagtattgagatggtcgtcaacacaaagacgctcatcatcaaagatctctctgtactgcgtcttgacccgaacgccgctagcgaactcaacccgtttatagacctggttatccaggacaacgtgaacagcagcttgaagagaaacatcagtgttctgacctgggccatgggcgagtggctccgcattgcgacgaagcgagctaagttctggcatctcgtgcagtccgagttgggcagtgaagagggcttgagagaatgcgcgaggaatatgagacgacatagtaggaggagacggaagaaagatgatgacgaggacgaagaggttggcgacgagaggaagaagatgtccaaggctgatatgatagagttgatgggtcgtacgagctttgatctggatctttctgggtttggcgttgatggggatgagagccttacagctagagtacgatggcgtgtcaagtttgattggacaggagaggcgaggagtgagattgggcttttgatgggggtccctgctaagtggcatgctggcgatgagaaaggaagcctgaatgggataccgggtatgtttgataagctgctgagagagagcggtgacccgatggaggctctgaggacggttgttgctcttgttgtgggtgaagagtcttgagagatcttggtacatggcgtgcttggggttgtgtatggggtattgtattgttacggagaccttgggctggacagatgggtcactggttgcatggcattgcatggcatggcgtggtggtgttgattgggagttgttggaattatgttgagcatacccatacccttattactgctctagaacgagggtaaagccttgcatgcacaataatgctatgactgatatgtataagaacaaaagagaaagaaattgaacataca

SEQ ID NO: 39178 - DNA, 279 bp, Muscodor strobelii
  misc_feature: SGI cDNA ID NO. 573625
  misc_feature: Encodes the peptide sequence at SEQ ID NO 39179
atgacgcgcgcagtgcagaccatttccatcgggctcctcctcacttctctctacctcgccctcttccttggcttcgttcccctgcccgagatcgttcagactgagatcatccccgtcctccccttctgggctcttgtctccttcggcgcatacctcctctctgtcctcggctacaatgtcatgaccttccacgacgtccccgaggctcacaaggagctcatggccgagatcgagctcgccaagaccgacttgcggaaactcggtgtcgacgtcgattaa

SEQ ID NO: 39179 - protein, 92 aa, Muscodor strobelii
  misc_feature: SGI Peptide ID NO. 573625
  misc_feature (1)..(91): Pfam Id: PF08285 Pfam Desc: Dolichol-phosphate mannosyltransferase subunit 3 (DPM3)
  misc_feature (1)..(92): NCBI GI: 261361008 Blast Desc: dolichyl-phosphate mannosyltransferase polypeptide 3 [Verticillium albo-atrum VaMs.102]
  misc_feature (1)..(92): NCBI GI: 241995067 Blast Desc: dolichol phosphate mannosyltransferase subunit 3 [Hypocrea jecorina]
  misc_feature (1)..(92): NCBI GI: 154323540 Blast Desc: dolichyl-phosphate mannosyltransferase polypeptide 3 [Botryotinia fuckeliana B05.10] gi|150842398|gb|EDN17591.1| dolichyl-phosphate mannosyltransferase polypeptide 3 [Botryotinia
  misc_feature (1)..(92): NCBI GI: 46127799 Blast Desc: FG08277.1 [Gibberella zeae PH-1]
  misc_feature (1)..(92): NCBI GI: 39968889 Blast Desc: conserved [Magnaporthe grisea 70-15] gi|59803050|gb|AAX07698.1| dolichol-phosphate mannosyltransferase subunit 3-like protein [Magnaporthe grisea] conserved grisea
  misc_feature (1)..(92): NCBI GI: 156058025 Blast Desc: SS1G_04744 [Sclerotinia sclerotiorum 1980] gi|154702529|gb|EDO02268.1| SS1G_04744 [Sclerotinia sclerotiorum 1980]
  misc_feature (1)..(92): NCBI GI: 67541657 Blast Desc: AN6992.2 [Aspergillus nidulans FGSC A4] gi|40742448|gb|EAA61638.1| AN6992.2 [Aspergillus nidulans FGSC A4] gi|259483697|tpe|CBF79299.1| TPA: conserved [Aspergillus FGSC
  misc_feature (1)..(91): NCBI GI: 189204770 Blast Desc: conserved [Pyrenophora tritici-repentis Pt-1C-BFP] gi|187985819|gb|EDU51307.1| conserved [Pyrenophora tritici-repentis Pt-1C-BFP]
  misc_feature (1)..(91): NCBI GI: 169610083 Blast Desc: SNOG_08135 [Phaeosphaeria nodorum SN15] gi|160701978|gb|EAT84411.2| SNOG_08135 [Phaeosphaeria nodorum SN15]
  misc_feature (1)..(92): NCBI GI: 171681808 Blast Desc: protein product [Podospora anserina] gi|170940863|emb|CAP66513.1| protein product [Podospora anserina]
MTRAVQTISIGLLLTSLYLALFLGFVPLPEIVQTEIIPVLPFWALVSFGAYLLSVLGYNVMTFHDVPEAHKELMAEIELAKTDLRKLGVDVD

SEQ ID NO: 39180 - DNA, 1113 bp, Muscodor strobelii
  misc_feature: SGI EST ID NO. CUFF.94266.0
  misc_feature: Variant of the nucleotide sequence at SEQ ID NO 39178
aattcagaaagcatagaagctgcactctgaagtagggcctgcgttcaaggctatttccaattcaacttcgaagtggctgaaatgtggctagtccagcgtctcgacgggaccttcactagtgggactagagctaatggcggggctcaggtcccagcactcaattgcccctgttctaatccctgtcagcccccctgagactgccaacatccatcaacgcgagtgacacctgaaagagttgaaagttgtcctcagacgcgaaacgaagctcttgccatccaacatcgtcactcctttacatattgcgcctctatccaattgataccgcgtcatctacgaacaacatcctcatcagttctacaacttttcgccaaactaaacaggacccaatccctagtttcgacaccatgacgcgcgcagtgcagaccatttccatcgggctcctcctcacttctctctacctcgccctcttccttggcttcgttcccctgcccgagatcgttcagactgagatcatccccgtcctccccttctgggctcttgtctccttcggcgcatacctcctctctgtcctcggctacaatgtcatgaccttccacgacgtccccgaggctcacaaggagctcatggccgagatcgagctcgccaagaccgacttgcggaaactcggtgtcgacgtcgattaactgattctctgacaaccaaaaccaattgatgcgtgccttcgtagacccatggaaggtgatgcttaggtgtttcggggtcggtggcgggggaaaaagagacgaggagaagttcataataataagcgttgcactctataatcggactagggtgttaagttgtctggctcaagcatgtcaggagcaagaacaacaaagacctccttgcgcgtctagcttgcgtagcgggcaagatgacggcattataaaacacagtgtcgagtgcttgatgatcaccaagtatacagaccccgataataatcaaaagcaccatatcaagcaaagaaaggcagatcattgccagaaacgtaacttgcggcatcttggtttctgctcatgattgaagatttttgaggcctcgagtagtgaatgaaagacgcaataatgagtacaa

SEQ ID NO: 39181 - DNA, 1806 bp, Muscodor strobelii
  misc_feature: SGI cDNA ID NO. 573626
  misc_feature: Encodes the peptide sequence at SEQ ID NO 39182
atgctgcagagtcttatgctaagcaaaggaactccggcatctttgaccgtgaacagcgagaagtcgcagtacacaacagctttgactccgcagtcggtgcaatcgatgatcgatgagcaagtccctaacctaagtagtgtccaagagggttataatggcgattcatcattccaatctcaagcgcagcaggtcaagaccgccttggaatcaacacttaattccttcggacttatagctggcgttgaagatccgatagttacagacgctcggaacatcaagaatcgtgcggctcatcaaggtactaagatcaagccctcgaaaagtccgtcaactcccagtgccatcgagtccgacaatatcccactacccccactcgacctcgtactcaaactcctacgcctagcgaaagtcgagaaacagatatttttctttgaagtcccgctgttcgaagcagacgaattcacagatatgtgcagagacgtttattttgctaccgagcctgtctcactttacacgtggatctgtgtgaacatcgggctctattatctttttctaggactgagcgaagcggactgcgcccgtctggacacatcgcaagatgtgctacgcagggaagttgaggtgcttagatcgaacgctgaagttgccatgcagagtctacgattgtgctcggaaccctcgacagagtcttgtcgtgcacttgcagttttggcaacgttttatacaagagaaggacatagcgcggtagcctggagactcatctcaggctctgcgagagcctgtcttgatttgggtcttcatcgcttgccaagcgatgtcaatgttgacaaaattagccgggagacctctttattctggcatgtttacgcttgggataagttactcgcgatgacatgtggaaggacacctaccatccatcattatgatgtatcgaatgggctgcacttattcgatctacctcggcatggagtacggaatgtgctgtacggcgcttttatcgatttggctatcgtaacaggagaaatacacaagagattgttttccgcttcggcgtatcgcgcatcgcagcaagatcgtgtccaacacgtcagtcaattcgcagctcgtctacgggcgatacaaagtgcggtgcaatcagcaaatcgtgacgacccttcatgggacgaacgcttcggtagtattgtaactgtaatgaaaatttgcgtgcattcccagcttgcagttgtatatcgcatcctcccgcctcacgttcgcaatcctcatccactacaatgttccaatgagtgtgtcgatgaagcacgagaagcattgtctgtcctcgttgaaaagggcaaggctgtggaaaagttcccaaccagactagctcctttcctgaactccgtgctatctctcgttccttttgtcccgttcattgtgattgctggtaatgctattgccacatgttcatcacaagatctgggcatattatcgacagtcgtctctctccttgcatcagtagcatcaacctcaccagcgatcagcaagatatacaatgcttgcgagagattcagccgcattgccgaaatgattgtttcaagctccagtccgccacaacccatccatgataattcggcaccctctgtcacccaagcatctagtatcgaccctacttgtgagcagccactagactttggatttcccatggctcagcaggattgggacagtgcaatgacaggtttcgaggacgaactaggcgattatgatccgagaatgttgacgaatatcatggagccttactttataaacgccggttgggaaacggggtga

SEQ ID NO: 39182 - protein, 601 aa, Muscodor strobelii
  misc_feature: SGI Peptide ID NO. 573626
  misc_feature (227)..(318): Pfam Id: PF04082 Pfam Desc: Fungal specific transcription factor domain
  misc_feature (227)..(311): Pfam Id: PF04082 Pfam Desc: Fungal specific transcription factor domain
  misc_feature (105)..(526): NCBI GI: 242804326 Blast Desc: C6 transcription factor, [Talaromyces stipitatus ATCC 10500] gi|218717697|gb|EED17118.1| C6 transcription factor, [Talaromyces stipitatus ATCC 10500]
  misc_feature (50)..(543): NCBI GI: 121718950 Blast Desc: fungal specific transcription factor domain protein [Aspergillus clavatus NRRL 1] gi|119404441|gb|EAW14817.1| fungal specific transcription factor domain protein [Aspergillus NRRL 1]
  misc_feature (105)..(526): NCBI GI: 212539508 Blast Desc: C6 transcription factor, [Penicillium marneffei ATCC 18224] gi|210067208|gb|EEA21300.1| C6 transcription factor, [Penicillium marneffei ATCC 18224]
  misc_feature (37)..(528): NCBI GI: 85089750 Blast Desc: NCU09974 [Neurospora crassa OR74A] gi|28919413|gb|EAA28856.1| [Neurospora crassa OR74A]
  misc_feature (1)..(526): NCBI GI: 119188293 Blast Desc: CIMG_04194 [Coccidioides immitis RS]
  misc_feature (141)..(526): NCBI GI: 240107892 Blast Desc: Fungal specific transcription factor, [Coccidioides posadasii C735 delta SOWgp]
  misc_feature (13)..(543): NCBI GI: 70985098 Blast Desc: C6 transcription factor [Aspergillus fumigatus Af293] gi|66845683|gb|EAL86017.1| C6 transcription factor, [Aspergillus fumigatus Af293]
  misc_feature (119)..(531): NCBI GI: 46111811 Blast Desc: FG02787.1 [Gibberella zeae PH-1]
  misc_feature (40)..(526): NCBI GI: 258568362 Blast Desc: [Uncinocarpus reesii 1704] gi|237906371|gb|EEP80772.1| [Uncinocarpus reesii 1704]
  misc_feature (122)..(531): NCBI GI: 256721890 Blast Desc: NECHADRAFT_36964 [Nectria haematococca mpVI 77-13-4]
MLQSLMLSKGTPASLTVNSEKSQYTTALTPQSVQSMIDEQVPNLSSVQEGYNGDSSFQSQAQQVKTALESTLNSFGLIAGVEDPIVTDARNIKNRAAHQGTKIKPSKSPSTPSAIESDNIPLPPLDLVLKLLRLAKVEKQIFFFEVPLFEADEFTDMCRDVYFATEPVSLYTWICVNIGLYYLFLGLSEADCARLDTSQDVLRREVEVLRSNAEVAMQSLRLCSEPSTESCRALAVLATFYTREGHSAVAWRLISGSARACLDLGLHRLPSDVNVDKISRETSLFWHVYAWDKLLAMTCGRTPTIHHYDVSNGLHLFDLPRHGVRNVLYGAFIDLAIVTGEIHKRLFSASAYRASQQDRVQHVSQFAARLRAIQSAVQSANRDDPSWDERFGSIVTVMKICVHSQLAVVYRILPPHVRNPHPLQCSNECVDEAREALSVLVEKGKAVEKFPTRLAPFLNSVLSLVPFVPFIVIAGNAIATCSSQDLGILSTVVSLLASVASTSPAISKIYNACERFSRIAEMIVSSSSPPQPIHDNSAPSVTQASSIDPTCEQPLDFGFPMAQQDWDSAMTGFEDELGDYDPRMLTNIMEPYFINAGWETG

SEQ ID NO: 39183 - DNA, 2401 bp, Muscodor strobelii
  misc_feature: SGI EST ID NO. CUFF.94254.0
  misc_feature: Variant of the nucleotide sequence at SEQ ID NO 39181
tgacaactgcaaaacgcgaaagacaaaatgtgatagaagatcaccgtgtgcaagctgcacaacactcaaagttccatgccggacaacaaatcgtgcgggagagaaacgccaaagagtcctcctctcatcgaagtacgaagatgcagttcaagatgtcagtcgccaattggcagatgtcaaggaaatgctgcagagtcttatgctaagcaaaggaactccggcatctttgaccgtgaacagcgagaagtcgcagtacacaacagctttgactccgcagtcggtgcaatcgatgatcgatgagcaagtccctaacctaagtagtgtccaagagggttataatggcgattcatcattccaatctcaagcgcagcaggtcaagaccgccttggaatcaacacttaattccttcggacttatagctggcgttgaagatccgatagttacagacgctcggaacatcaagaatcgtgcggctcatcaaggtactaagatcaagccctcgaaaagtccgtcaactcccagtgccatcgagtccgacaatatcccactacccccactcgacctcgtactcaaactcctacgcctagcgaaagtcgagaaacagatatttttctttgaagtcccgctgttcgaagcagacgaattcacagatatgtgcagagacgtttattttgctaccgagcctgtctcactttacacgtggatctgtgtgaacatcgggctctattatctttttctaggactgagcgaagcggactgcgcccgtctggacacatcgcaagatgtgctacgcagggaagttgaggtgcttagatcgaacgctgaagttgccatgcagagtctacgattgtgctcggaaccctcgacagagtcttgtcgtgcacttgcagttttggcaacgttttatacaagagaaggacatagcgcggtagcctggagactcatctcaggctctgcgagagcctgtcttgatttgggtcttcatcgcttgccaagcgatgtcaatgttgacaaaattagccgggagacctctttattctggcatgtttacgcttgggataagttactcgcgatgacatgtggaaggacacctaccatccatcattatgatgtatcgaatgggctgcacttattcgatctacctcggcatggagtacggaatgtgctgtacggcgcttttatcgatttggctatcgtaacaggagaaatacacaagagattgttttccgcttcggcgtatcgcgcatcgcagcaagatcgtgtccaacacgtcagtcaattcgcagctcgtctacgggcgatacaaagtgcggtgcaatcagcaaatcgtgacgacccttcatgggacgaacgcttcggtagtattgtaactgtaatgaaaatttgcgtgcattcccagcttgcagttgtatatcgcatcctcccgcctcacgttcgcaatcctcatccactacaatgttccaatgagtgtgtcgatgaagcacgagaagcattgtctgtcctcgttgaaaagggcaaggctgtggaaaagttcccaaccagactagctcctttcctgaactccgtgctatctctcgttccttttgtcccgttcattgtgattgctggtaatgctattgccacatgttcatcacaagatctgggcatattatcgacagtcgtctctctccttgcatcagtagcatcaacctcaccagcgatcagcaagatatacaatgcttgcgagagattcagccgcattgccgaaatgattgtttcaagctccagtccgccacaacccatccatgataattcggcaccctctgtcacccaagcatctagtatcgaccctacttgtgagcagccactagactttggatttcccatggctcagcaggattgggacagtgcaatgacaggtttcgaggacgaactaggcgattatgatccgagaatgttgacgaatatcatggagccttactttataaacgccggttgggaaacggggtgaaggcacagggcacatagccatatcgtatttagcgataagtatacgtgtttgaacattacacatattacataattgatctagaccaacgagccgaggtagcaataatctgtcgaaaatgtaatcttagggataaaccttacgggaaatggccttataatcccgcaatgtaccgctctgaccacgactagggcgcgccacgcccagtaacgtcttgatcttggggcgtaacgattcagccgaagtgctgttgagatgcggtatccaagccgatatcaacccgaaataggtagattgtcaattggagagaatgcgcgaaaatttactactatagtcatatcctagttgcttgccgcaagccggtgatatcaagaatcatacacaaagatgaagaagagcgaagacagcatcgtg

SEQ ID NO: 39184 - DNA, 463 bp, Muscodor strobelii
  misc_feature: SGI cDNA ID NO. 573627
  misc_feature: Elevated expression when VOC is produced
  misc_feature: Encodes the peptide sequence at SEQ ID NO 39185
atgacagcctcgacatctcagatagatgctataggacagaagtttcggacacactgggaaaatgccacggaaagcaataatcttacgctccatgggtttcgtaggtttaagaccagccatctaatcaatctccgcttcctcgaagacgaagtcgccgagctagaccatattatttaccaggctggtcttacgctggaccgtaacccatcatccccagatcgattaggactacgatatagtaagaaagaggagaacgcatctctaatcaataagtcagtcacacaagagacgatcatgcggctacgagccctactcaaagaatatgataatgcgcttctcgcctttaaccaaatcatgtccatggagacggtctcactcctagacgatgaaaagcagtccagcatgcgtaccgatcttagtctatacgagaaatataacacgcgactagtgaggacggatctcg

SEQ ID NO: 39185 - protein, 154 aa, Muscodor strobelii
  misc_feature: SGI Peptide ID NO. 573627
  misc_feature: Useful for introducing or modulating the production of volatile compounds
MTASTSQIDAIGQKFRTHWENATESNNLTLHGFRRFKTSHLINLRFLEDEVAELDHIIYQAGLTLDRNPSSPDRLGLRYSKKEENASLINKSVTQETIMRLRALLKEYDNALLAFNQIMSMETVSLLDDEKQSSMRTDLSLYEKYNTRLVRTDL

SEQ ID NO: 39186 - DNA, 794 bp, Muscodor strobelii
  misc_feature: SGI EST ID NO. CUFF.94302.0
  misc_feature: Variant of the nucleotide sequence at SEQ ID NO 39184
catccatctactttgcaaggcatggactttggtggcaaggacaactcggtttgtgccctctaatcgccgacgaaatgatggattatgaaatgctggggctcacggcgacccatcgttaggtcacctgaatatccctctccaacatatatttcagcactagtaatctgagctcaatagaatatataagtagccttatcctttcgactctatctatgattatagacaaactaatgcataacacctcttgttcgctcttgatcttgtttcattatccgcgatatgacagcctcgacatctcagatagatgctataggacagaagtttcggacacactgggaaaatgccacggaaagcaataatcttacgctccatgggtttcgtaggtttaagaccagccatctaatcaatctccgcttcctcgaagacgaagtcgccgagctagaccatattatttaccaggctggtcttacgctggaccgtaacccatcatccccagatcgattaggactacgatatagtaagaaagaggagaacgcatctctaatcaataagtcagtcacacaagagacgatcatgcggctacgagccctactcaaagaatatgataatgcgcttctcgcctttaaccaaatcatgtccatggagacggtctcactcctagacgatgaaaagcagtccagcatgcgtaccgatcttagtctatacgagaaatataacacgcgactagtgaggacggatctcggtatgcggacccgtacagatcctttccaacgccgactgcacaaatacttgcg

SEQ ID NO: 39187 - DNA, 757 bp, Muscodor strobelii
  misc_feature: SGI cDNA ID NO. 573629
  misc_feature: Elevated expression when VOC is produced
  misc_feature: Encodes the peptide sequence at SEQ ID NO 39188
atgacaacactccaatcagcagcgctcgactacggcgagaggtacgagatagctgtttcatatagcacgatcataggcaccggtgccttcagcctcgtaatctgctgtgcgcgccttttcactcggctatttgttatcaaggccttttgtatcgacgattgggcatgtctcgtggcattgctctttacgaccttgtttaatgggattggaattgcgatagtcgcaaccggcgcgggacgacatagtgctcacgtgtcgaagtcggagctcgcattatggttcaagctttactacgcttgcacgtgcctaagcctcatcatcgctttcgccgtcaaggctagtttattgctctacctccgacgactatttccgacttcctatatacgacgcatcgtagcgggcctcctcgtctttatggccctggttactcttccctttgcttttgtcgacgcgtttcaatgcaacccacctcagtacgtctatgaacttcagttggtgatggctccggatagggcgcgacactgtctcccggcgaacattgtatacagcattttcctgttccaggccatcttgctcctgattatcgatatcacgatcctgctgctgccggtgccggtcgtttggtctctgaagctcaagaaaggcaaaggcatccttgtccttctgatcttcgttccagccgtcattgcatgcatcgcgccagctctacgtttccaaagtctcgagtttttgaagacccaagattcagatataacgt

SEQ ID NO: 39188 - protein, 252 aa, Muscodor strobelii
  misc_feature: SGI Peptide ID NO. 573629
  misc_feature (34)..(252): NCBI GI: 145230447 Blast Desc: An01g11190 [Aspergillus niger] gi|134055650|emb|CAK44024.1| protein product [Aspergillus niger]
  misc_feature (39)..(162): NCBI GI: 145240175 Blast Desc: An08g06190 [Aspergillus niger] gi|134077248|emb|CAK45589.1| protein product [Aspergillus niger]
  misc_feature (8)..(252): NCBI GI: 145608993 Blast Desc: MGG_09070 [Magnaporthe grisea 70-15] gi|145016460|gb|EDK00890.1| MGG_09070 [Magnaporthe grisea 70-15]
  misc_feature (38)..(248): NCBI GI: 256734176 Blast Desc: NECHADRAFT_92086 [Nectria haematococca mpVI 77-13-4]
  misc_feature (4)..(252): NCBI GI: 238841340 Blast Desc: integral membrane protein [Microsporum canis CBS 113480]
  misc_feature (29)..(249): NCBI GI: 85113520 Blast Desc: NCU00700 [Neurospora crassa OR74A] gi|28926320|gb|EAA35298.1| [Neurospora crassa OR74A]
  misc_feature (121)..(249): NCBI GI: 169779229 Blast Desc: [Aspergillus oryzae RIB40] gi|83772818|dbj|BAE62946.1| protein product [Aspergillus oryzae]
  misc_feature (20)..(238): NCBI GI: 46139657 Blast Desc: FG11343.1 [Gibberella zeae PH-1]
  misc_feature (29)..(248): NCBI GI: 46126759 Blast Desc: FG07757.1 [Gibberella zeae PH-1]
  misc_feature (29)..(248): NCBI GI: 46119062 Blast Desc: FG04749.1 [Gibberella zeae PH-1]
  misc_feature: Useful for introducing or modulating the production of volatile compounds
MTTLQSAALDYGERYEIAVSYSTIIGTGAFSLVICCARLFTRLFVIKAFCIDDWACLVALLFTTLFNGIGIAIVATGAGRHSAHVSKSELALWFKLYYACTCLSLIIAFAVKASLLLYLRRLFPTSYIRRIVAGLLVFMALVTLPFAFVDAFQCNPPQYVYELQLVMAPDRARHCLPANIVYSIFLFQAILLLIIDITILLLPVPVVWSLKLKKGKGILVLLIFVPAVIACIAPALRFQSLEFLKTQDSDIT

SEQ ID NO: 39189 - DNA, 1050 bp, Muscodor strobelii
  misc_feature: SGI EST ID NO. CUFF.94364.2
  misc_feature: Variant of the nucleotide sequence at SEQ ID NO 39187
catcgctcggcgacacactgttaggatattgatggccacttcagtccgaaacatgtgcctgacgtaaacgaaagcagcatacctatcggagttttagttttgtttccgaaatgtgtcgtacagcatacataagacaagctctctcgtccttctctctggcaggcagtttaggtttcattgcgtacaaccactctaattgttgtcaacattgctccgctccgctgtagcactatgacaacactccaatcagcagcgctcgactacggcgagaggtacgagatagctgtttcatatagcacgatcataggcaccggtgccttcagcctcgtaatctgctgtgcgcgccttttcactcggctatttgttatcaaggccttttgtatcgacgattgggcatgtctcgtggcattgctctttacgaccttgtttaatgggattggaattgcgatagtcgcaaccggcgcgggacgacatagtgctcacgtgtcgaagtcggagctcgcattatggttcaagctttactacgcttgcacgtgcctaagcctcatcatcgctttcgccgtcaaggctagtttattgctctacctccgacgactatttccgacttgtaggtccataggcccattgccacaaatcctgctgcgaaatgctgacagcctcgtcctagcctatatacgacgcatcgtagcgggcctcctcgtctttatggccctggttactcttccctttgcttttgtcgacgcgtttcaatgcaacccacctcagtacgtctatgaacttcagttggtgatggctccggatagggcgcgacactgtctcccggcgaacattgtatacagcattttcctgttccaggccatcttgctcctgattatcgatatcacgatcctgctgctgccggtgccggtcgtttggtctctgaagctcaagaaaggcaaaggcatccttgtccttctgatcttcgttccagccgtcattgcatgcatcgcgccagctctacgtttccaaagtctcgagtttttgaagacccaagattcagatataacgtgt

SEQ ID NO: 39190 - DNA, 255 bp, Muscodor strobelii
  misc_feature: SGI cDNA ID NO. 573630
  misc_feature: Elevated expression when VOC is produced
  misc_feature: Encodes the peptide sequence at SEQ ID NO 39191
atggacgtctatattcagactctgcactttgttcgaactactctccctggtcccatggctaagcaaagcagtgcccacctcaaaggtcaaaaggacaaagccaggaagcgcggcacctctctccagaggaaggcggtggagctaggccagaaagcaaatgtcttcgcggcagtggtctactggaacccgacccatcaacaattcgacgctgcggtacatatccctagaggccagacgctgcctagtggcgaggag

SEQ ID NO: 39191 - protein, 85 aa, Muscodor strobelii
  misc_feature: SGI Peptide ID NO. 573630
  misc_feature: Useful for introducing or modulating the production of volatile compounds
MDVYIQTLHFVRTTLPGPMAKQSSAHLKGQKDKARKRGTSLQRKAVELGQKANVFAAVVYWNPTHQQFDAAVHIPRGQTLPSGEE

SEQ ID NO: 39192 - DNA, 783 bp, Muscodor strobelii
  misc_feature: SGI EST ID NO. CUFF.94342.0
  misc_feature: Variant of the nucleotide sequence at SEQ ID NO 39190
gttctactatgtaagattacccaatataaccttgcaatagtgcaagatgtgcataggtcgtggaggacaagtctattgccctcattgccgttctccgacacgaacgatcaactcatcaaatatacaccaccgtctgtctataattatataccgaagaggtccaaaattggacctgaatggatctaaatttggacatggaaaacttacaaacagatcgcgtatacatacatatagagagcgtcacattagtatggcgtgcagggaaccctctctgaccgtatggacgtctatattcagactctgcactttgttcgaactactctccctggtcccatggctaagcaaagcagtgcccacctcaaaggtcaaaaggacaaagccaggaagcgcggcacctctctccagaggaaggcggtggagctaggccagaaagcaaatgtcttcgcggcagtggtctactggaacccgacccatcaacaattcgacgctgcggtacatatccctagaggccagacgctgcctagtggcgaggagcttcggagagttctagcgtcttgttctcaaaggacacgatcgaatccgccaagacgagctcgaaaggacgtcaaaggtcgccaagcccaagctagcggcgaccatgccttcgcgagttccagttctcaatttgaatggcatctcggcagccctgcgacggctgaccacgccagtgattgtgtgcaagtcgacagcaataccgttgccgacgataccatcgtgcttcataaaagcccaacagcggcgacg

SEQ ID NO: 39193 - DNA, 2001 bp, Muscodor strobelii
  misc_feature: SGI cDNA ID NO. 573631
  misc_feature: Reduced expression when VOC is produced
  misc_feature: Encodes the peptide sequence at SEQ ID NO 39194
atgctgtacagcgaacatgattcgctgaactttgcccaacgcttcgaagaaggcccctatagctcctctctggcttcttccgcttcttcttcctccacctctgtatgctccgacgcatcatctcaaacctcagacaacacttccatatccgcctcatcagacccgtcggaactatgcgacgtatactactctcaacgatctggcttcagccagaccgaatccgcatcatggaccgcacggcctagccaggtcgaggttccacagcagttgcgtcaaaacccgcgacgaaccagcaatagtgcgacgaccagggctggccctcctactcttacacgccaaagcgatcggaaggtcaacttcgtcgataatctcgttgattcgtcaacgcaaattgtcgaagccatatggcctttggcctcggtcttccatcgacaagagttgggtcacaaagctgcaccccctttgcgcaccttcattcaggagacgctgcgccgctctcgcacgagctattcgaccttgcaggtcgcattatactatctaatccttatcaagccccatgttcctgactttgacttcaccatggagcagcccgaggacaaccccacgataaaagcgttgcaatgtggacggcgcatgttcctcgctgcgttgattttagcatccaagtacctccaggacaaaaactactcggcacgagcatggagcaggatatgtgggcttccgacgcaggagattaacagcaacgagatggtatttctgtctgcgatcaactggaaactgcacattacggatctggttttcaagcgttggacagaaatcatcttgaaacatacgccttctcagcctccgtcttccggatcgccttgctttctggtatctgaaaagcagtgtcagaactggaagaatctgattttgcaactcaacgcaggattggacaacattgaggatctcatccctgttagtccatcgcagcgcaagcatctggtcgccttgcccagcacgcctagctctttggtctcgactcctcgtgttcggtcgccgctgtctgccgagacttacgatgctaccccaaccccgaagggtatggttacgcccacagtcatggagcctgttcctgccagtgcgcatacgcctggtagactggctcctgctctcgggctgcttcctactcctcgcttgacgccgcaatcgactggtttctgtacgccagctgtgagtgctgccactgctatgctcggcggcaagtgctcaatgggcttcgcgatggcacaagccgctcaggtgtccgcgtcgcagaacttggaccggtggcccggacccatcagcacgtctcctcggagccacgtgctgactagacgtccatcgcttgctaactctgtctcgactgcgtcttcgcccgaatcaatgatctcggatacttcacgtacatcacgctcttcctcaatatcttctgcttcgtcactggttagcgcgccgttcaccaaattggatgttcaggcgcgatgccgaaatgcgaagctgtacggtgagaggtatagcatgaaaccagccattgcttcggtcccagaagactacgaggagaattgcattacatcatctcctgagtcctacaccggcacggtgggcaaggatttgtaccagatgtcgctggaaaccccattggggcaccgagattgtgagatggacgacgctgctgacgcggcacgtgctctccaagaccttcataactatcgtacttcgtcgacttcgcgaccaagcttaaagcgaagtcatcgcctatcaactgattcatctctgcaagagaatgtccgtgaattattgaatcaacactactatccatacaacggaagccaaactcccgttcaacgatcccatgatagccgcaagcgactttgttgcgcggctgaggctgcttcacactcatattccatccccgcgatccaccctgctgtcggcggcgctggcggccctggaatgtgggatggtatcctcaacaactaa

SEQ ID NO: 39194 - protein, 666 aa, Muscodor strobelii
  misc_feature: SGI Peptide ID NO. 573631
  misc_feature (122)..(260): Pfam Id: PF08613 Pfam Desc: Cyclin
  misc_feature (154)..(260): Pfam Id: PF08613 Pfam Desc: Cyclin
  misc_feature (18)..(665): NCBI GI: 256733637 Blast Desc: NECHADRAFT_99706 [Nectria haematococca mpVI 77-13-4]
  misc_feature (70)..(665): NCBI GI: 149210061 Blast Desc: MGCH7_ch7g512 [Magnaporthe grisea 70-15] gi|86196467|gb|EAQ71105.1| MGCH7_ch7g512 [Magnaporthe grisea 70-15]
  misc_feature (42)..(665): NCBI GI: 116193537 Blast Desc: CHGG_06486 [Chaetomium globosum CBS 148.51] gi|88182399|gb|EAQ89867.1| CHGG_06486 [Chaetomium globosum CBS 148.51]
  misc_feature (20)..(664): NCBI GI: 171684481 Blast Desc: protein product [Podospora anserina] gi|170942201|emb|CAP67853.1| protein product [Podospora anserina]
  misc_feature (18)..(665): NCBI GI: 46128569 Blast Desc: FG08662.1 [Gibberella zeae PH-1]
  misc_feature (123)..(664): NCBI GI: 85115601 Blast Desc: NCU09085 [Neurospora crassa OR74A] gi|28926699|gb|EAA35666.1| [Neurospora crassa OR74A]
  misc_feature (46)..(463): NCBI GI: 261352154 Blast Desc: G1/S-specific cyclin pas1 [Verticillium albo-atrum VaMs.102]
  misc_feature (150)..(665): NCBI GI: 156055812 Blast Desc: SS1G_05258 [Sclerotinia sclerotiorum 1980] gi|154703042|gb|EDO02781.1| SS1G_05258 [Sclerotinia sclerotiorum 1980]
  misc_feature (50)..(612): NCBI GI: 115386814 Blast Desc: conserved [Aspergillus terreus NIH2624] gi|114190946|gb|EAU32646.1| conserved [Aspergillus terreus NIH2624]
  misc_feature (68)..(640): NCBI GI: 212537487 Blast Desc: G1/S-specific cyclin Pcl5, [Penicillium marneffei ATCC 18224] gi|212537489|ref|XP_002148900.1| G1/S-specific cyclin Pcl5, [Penicillium marneffei ATCC 18224] G1/S-specific cyclin
  misc_feature: Useful for introducing or modulating the production of volatile compounds
MLYSEHDSLNFAQRFEEGPYSSSLASSASSSSTSVCSDASSQTSDNTSISASSDPSELCDVYYSQRSGFSQTESASWTARPSQVEVPQQLRQNPRRTSNSATTRAGPPTLTRQSDRKVNFVDNLVDSSTQIVEAIWPLASVFHRQELGHKAAPPLRTFIQETLRRSRTSYSTLQVALYYLILIKPHVPDFDFTMEQPEDNPTIKALQCGRRMFLAALILASKYLQDKNYSARAWSRICGLPTQEINSNEMVFLSAINWKLHITDLVFKRWTEIILKHTPSQPPSSGSPCFLVSEKQCQNWKNLILQLNAGLDNIEDLIPVSPSQRKHLVALPSTPSSLVSTPRVRSPLSAETYDATPTPKGMVTPTVMEPVPASAHTPGRLAPALGLLPTPRLTPQSTGFCTPAVSAATAMLGGKCSMGFAMAQAAQVSASQNLDRWPGPISTSPRSHVLTRRPSLANSVSTASSPESMISDTSRTSRSSSISSASSLVSAPFTKLDVQARCRNAKLYGERYSMKPAIASVPEDYEENCITSSPESYTGTVGKDLYQMSLETPLGHRDCEMDDAADAARALQDLHNYRTSSTSRPSLKRSHRLSTDSSLQENVRELLNQHYYPYNGSQTPVQRSHDSRKRLCCAAEAASHSYSIPAIHPAVGGAGGPGMWDGILNN

SEQ ID NO: 39195 - DNA, 5079 bp, Muscodor strobelii
  misc_feature: SGI EST ID NO. CUFF.96324.1
  misc_feature: Variant of the nucleotide sequence at SEQ ID NO 39193
tggacatcgagtccccctgttttccctctctcccatcgaacaaagccgtcgcaatgttcgattatactctttgaagaacgagaaaaaaaagcatcgactttttgaaagtctgcttgagtgtcatctgcctgccagaccactcttttcgcccccttcaattgtttcccacctcatccctttaacacttccgcctctttgttgttgtccgttccgcagtggcattcacttgcactcttgcgcacgcacccggcaaagaagactcataccgtctgttacccaccgtcatcactcatcataccgatacgactcattcttttgttgttatacaccctgatgttcgaatctgctcactagacaaaaaagtttggaaaaaagagaaaaagacagaggaaagtgccattggccggtaactcaaaatttacgtcctctagcaaaaaacggcacccattgcaccatcttacgcacgaaagaaggtttacatgttctaataccttatttgtcctgatctcatcgtatcgtatctcgttcatctcatacttgtcacgactgattcactcttctctcaatcctttatttgcattattcacattactcacttgccaccggcgttgaaacgggagggatccatccattcgactgctcacacacaaccagcacgcccaatctaggcgcccccggccaacagcgtcacaggaagttggattggaaactgtctttgtctctggttgctgcttcgtgtcgtgccacttggagtcatctgtccgttggcatccagccccagtctaggcccccctcctctcataattagccacctagccactggatcgactgtccggccccctgcctagtgccatctgttcaggcttccagcagcgcctgagagagcaaaggccacctcgccctgtccaccctttaggcccaactgtaccaccaccacacactggctgcggtaatgctccgaggcgccttcgccacctaaacctgaagagaagagtcatcgactaggcataggcccccaggacccccaagcacccccaagaccaccctgaactgacggtccacgcaccacacgcattccgtgttcggttgtatctttgcctcccgctcccacgcgactcatccgcaagtcatacccaggcccaggtatccatctccacccgccactggccactctggttacctgctattcgccatccgcctctgcctcgcggcttggtcttataaggcgttcactgtcgcccatcccacaccaccccttcgcccgcatgctgtgtactgcatcggtagaaagtggttgctgctcgtaccttgcataatcttggagataccatcaccgtcccgtctcgatctcactcttcgacccggctgtacacacgcacctcccgacgacatcgccccctagtcatcagccgtgtgtgtatctctctcgactcggcaatagtctcgactgcaaccactgttcgactccgtctgcgacgacctcaccacgtgacaccacagatagcgtagcagccagctcgatggaaatctagctgctgccacctatcgtcacaccacctcttgtttccctggccgaaacaataaaccacaccatgctgcttgcgaaatcgattctctccactccagtcgtctgtcccgctttgtcctccggtttgatcggtcgtgaaaccctgctgctagactctctcgtctagacgttggtactctttcgaatatttgcagctcagcagcagtatttatgtcgctgttgtgaggaagctactcgttcgatcgacttcacgatttcacctctggtaacacgatcttattggttgactctgctcgacggacgactgggggtaattattcgacctccattcgaccacccaccccaccaccctcaaaatgctgtacagcgaacatgattcgctgaactttgcccaacgcttcgaagaaggcccctatagctcctctctggcttcttccgcttcttcttcctccacctctgtatgctccgacgcatcatctcaaacctcagacaacacttccatatccgcctcatcagacccgtcggaactatgcgacgtatactactctcaacgatctggcttcagccagaccgaatccgcatcatggaccgcacggcctagccaggtcgaggttccacagcagttgcgtcaaaacccgcgacgaaccagcaatagtgcgacgaccagggctggccctcctactcttacacgccaaagcgatcggaaggtcaacttcgtcgataatctcgttgattcgtcaacgcaaattgtcgaagccatatggcctttggcctcggtcttccatcgacaagagttgggtcacaaagctgcaccccctttgcgcaccttcattcaggagacgctgcgccgctctcgcacgagctattcgaccttgcaggtcgcattatactatctaatccttatcaagccccatgttcctgactttgacttcaccatggagcagcccgaggacaaccccacgataaaagcgttgcaatgtggacggcgcatgttcctcgctgcgttgattttagcatccaagtacctccaggacaaaaactactcggcacgagcatggagcaggatatgtgggcttccgacgcaggagattaacagcaacgagatggtatttctgtctgcgatcaactggaaactgcacattacggatctggttttcaagcgttggacagaaatcatcttgaaacatacgccttctcagcctccgtcttccggatcgccttgctttctggtatctgaaaagcagtgtcagaactggaagaatctgattttgcaactcaacgcaggattggacaacattgaggatctcatccctgttagtccatcgcagcgcaagcatctggtcgccttgcccagcacgcctagctctttggtctcgactcctcgtgttcggtcgccgctgtctgccgagacttacgatgctaccccaaccccgaagggtatggttacgcccacagtcatggagcctgttcctgccagtgcgcatacgcctggtagactggctcctgctctcgggctgcttcctactcctcgcttgacgccgcaatcgactggtttctgtacgccagctgtgagtgctgccactgctatgctcggcggcaagtgctcaatgggcttcgcgatggcacaagccgctcaggtgtccgcgtcgcagaacttggaccggtggcccggacccatcagcacgtctcctcggagccacgtgctgactagacgtccatcgcttgctaactctgtctcgactgcgtcttcgcccgaatcaatgatctcggatacttcacgtacatcacgctcttcctcaatatcttctgcttcgtcactggttagcgcgccgttcaccaaattggatgttcaggcgcgatgccgaaatgcgaagctgtacggtgagaggtatagcatgaaaccagccattgcttcggtcccagaagactacgaggagaattgcattacatcatctcctgagtcctacaccggcacggtgggcaaggatttgtaccagatgtcgctggaaaccccattggggcaccgagattgtgagatggacgacgctgctgacgcggcacgtgctctccaagaccttcataactatcgtacttcgtcgacttcgcgaccaagcttaaagcgaagtcatcgcctatcaactgattcatctctgcaagagaatgtccgtgaattattgaatcaacactactatccatacaacggaagccaaactcccgttcaacgatcccatgatagccgcaagcgactttgttgcgcggctgaggctgcttcacactcatattccatccccgcgatccaccctgctgtcggcggcgctggcggccctggaatgtgggatggtatcctcaacaactaacggtgccgccgaatatcgcggtcaagatttgaagtacaacaaaccaacccttgtgacaataatcaaagctttcctttgtttggagaagaagctgcattgctattttggacccttgataccacttttcttgaagatcacctatttatagacaacatcgaaaagggggtttcggagacgttcaaaactgtgcaatccaattacctgtttctaggattctagcattacgtgaaacggagaaaagacggcgtatcgctcgtctgtgtacgatgaccagggagctgtgtctgagttcattctggaaggggtgttttgggataattgggatggggaaggttgtaggctggtaacataccgcctcttcaagcattaggtatgttggcagcggctggaatgcctgcggccaaattgcatcatgtcggagtttttgtttttcatcttctttcactcgattaatctcactagtcgtacggtccattggttgttgatatcacaacggtcgagaaacgcgacggtcactccgaatttggatgacgcgactattagcacaattacacacaaatgagtgaacacgagagtatctggcccgatggggatctctcgtattggaagagcgcttcgaatacaagcttcaaaccattacacagtcaagacagtttagatgcctctttttccgagatactgagttcctgaagacttcagcctcgcagatagcttctacaaatctgaaacccgcttaactggacgataaatggctcctttggtctgctatgatatcacgagtacttcgcactggtgtggctgtctacatgtctgattaccctgggacgttcacctttggcctcagccctgatatgggtgaaccaaccggaaggggatatcgtctgatcgagtgttgtttcacaatgaacagaccgttggccgatgaacggaaacataccacaccacgtgtcaagcaaacgggatcaggccaggtcaattttgcacagtctagggcccaataacgccacgagttgcgtaaaattttgtgaattgctgacctcgtttgtgaacaatagggacctaccgattcatcctgaatttgctcccgcctacctatgacttggtggtggggtagaccggtgagtcagagcgaagtttcgagttcagccaattatactcggtattgatgggccatccccctgttgagtggctggg

SEQ ID NO: 39196 - DNA, 2121 bp, Muscodor strobelii
  misc_feature: SGI cDNA ID NO. 573632
  misc_feature: Encodes the peptide sequence at SEQ ID NO 39197
atgagcttatgtgtacactgtcgagccatcaacgtcgccaccctgccctcatttcccgggttctctaagaacctctggccgaaagatctccccgacataccttcacagcagcatcagacctcgctcgctacgctacgagcctcagcgacgacatgtccgggatgtgaagtgctacatgagggactcatggccggagtgcctgagaagattgcgggcgcgctgttcaagcatgtcggtgccgacgaattcacgactgatccgagggacccgtcaatagagtactcacccgtagagctgcggggactcgctcgagagggctcgacagagaaggagcggcgactgtatggtctattcgtgcaatgcggtaccgcgatgcgcgagttcggcctgtttgcggacgacgactcaactgccgcgctccagggaacagttgtcggcaggaaacctgcgccggtcggacatccagacagagttcttgaatggcttcagatttgtgaagagaagcactcgaaatgttcatctttccagcagcttctgtcccctaccttggcttttccgactcgtgtgcttgacctagaagcactaggatcagagaaagtacgattagtctccggtgcaggtcttcaaggacgctatgtggctttgagccactgctggggtaaagcacccgttgtcagaacggttcaagcaaaccttgcgcatttcacaaaatcgattgatgtcgccagccttaataagacattccaggactccatcatggtcacgagaagactaggactgagatatttgtggatcgactccttatgtatcatccaggacgacgttgccgattgggaaagagaagcagcaagcatggcccaggtgtattctcaggcttacctgactattgccgcctcagctgctacagacgggacacagggtttactgagagccacacctgagggttcacattttgacctctttgtcgacaccgaagccagtcctttgaatgctggtgtttctataggcccctttcttcaaagattccgccgtctggtcgccgcaccactgaacactcgagcctggacgttgcaggaacgaattttgtcgccgcgaatgttacattatgcacagcatcaactacactgggagtgccgtgaatcaatcatcagcgaggcgggaggacccccgtttggagagctcattgataactctggcgaagagtcgtggcacagaggacgattgggaaaattatcagacgatctcttagagaagcacgaaacccagaggctccaagatgcagcacaacacgcaagcaacggccgtagggagcatgaaagctggtatggtctgatacaggaatactgtgaacgagaccttaccaacggctcggataagctcccagcgctgtcaggtattgcttatgcttactcgcaacagcgcaacgcacagtatgttgcgggcctctgggtcgattcgattgcaagtggtcttctgtggcactgtcgcgacgctgaaagcctacaccggccttcgaagtatcgcgcaccgtcatggtcatgggcctctgtagacggcccagtggagttcttcagtgtaagtgatgggctcatactaggcgactctatagagatctacgatataagcgcggaagtagcacctaacggactggatccgtttggtaaagtccaaagcggtaaactatccctttggggcgctatcaagaccgctacgctcaggacactatacgaagaggtggaaagtgataatttctctaataaagaaaaggcctctacgcgaatcctctttgatgaaatctctgcgatagggtctgctacgcttgataccccgatcccagatagcgaggtgacttgcttgctaatcgctacaagttatggctcgtttggcgtgcggttcaataataacttagtcctccttctagctccaacggaaaacagcaccgagtacacacgccttggaatggctatgttctatgaagaaaggaactataacccaggacgcagtgtaactcaccctactgagctgacaggtagcaatgtagaagagatacagggcactaaaggcgagagcttgcaggactggttctatgatgttgatttggtcaatataacattgatttga

SEQ ID NO: 39197 - protein, 706 aa, Muscodor strobelii
  misc_feature: SGI Peptide ID NO. 573632
  misc_feature (212)..(359): Pfam Id: PF06985 Pfam Desc: Heterokaryon incompatibility protein (HET)
  misc_feature (212)..(304): Pfam Id: PF06985 Pfam Desc: Heterokaryon incompatibility protein (HET)
  misc_feature (185)..(621): NCBI GI: 256729778 Blast Desc: NECHADRAFT_83568 [Nectria haematococca mpVI 77-13-4]
  misc_feature (162)..(653): NCBI GI: 171677825 Blast Desc: protein product [Podospora anserina] gi|170936981|emb|CAP61639.1| protein product [Podospora anserina]
  misc_feature (45)..(572): NCBI GI: 225558616 Blast Desc: HET domain-containing protein [Ajellomyces capsulatus G186AR]
  misc_feature (123)..(587): NCBI GI: 238502093 Blast Desc: conserved [Aspergillus flavus NRRL3357] gi|220691090|gb|EED47438.1| conserved [Aspergillus flavus NRRL3357]
  misc_feature (157)..(669): NCBI GI: 256721585 Blast Desc: NECHADRAFT_78531 [Nectria haematococca mpVI 77-13-4]
  misc_feature (117)..(572): NCBI GI: 154286502 Blast Desc: [Ajellomyces capsulatus NAm1] gi|150407687|gb|EDN03228.1| [Ajellomyces capsulatus NAm1]
  misc_feature (1)..(654): NCBI GI: 256722671 Blast Desc: NECHADRAFT_87199 [Nectria haematococca mpVI 77-13-4]
  misc_feature (161)..(606): NCBI GI: 256724255 Blast Desc: NECHADRAFT_87557 [Nectria haematococca mpVI 77-13-4]
  misc_feature (161)..(581): NCBI GI: 169612666 Blast Desc: SNOG_09457 [Phaeosphaeria nodorum SN15] gi|111061602|gb|EAT82722.1| SNOG_09457 [Phaeosphaeria nodorum SN15]
  misc_feature (157)..(584): NCBI GI: 256720830 Blast Desc: NECHADRAFT_85535 [Nectria haematococca mpVI 77-13-4]
MSLCVHCRAINVATLPSFPGFSKNLWPKDLPDIPSQQHQTSLATLRASATTCPGCEVLHEGLMAGVPEKIAGALFKHVGADEFTTDPRDPSIEYSPVELRGLAREGSTEKERRLYGLFVQCGTAMREFGLFADDDSTAALQGTVVGRKPAPVGHPDRVLEWLQICEEKHSKCSSFQQLLSPTLAFPTRVLDLEALGSEKVRLVSGAGLQGRYVALSHCWGKAPVVRTVQANLAHFTKSIDVASLNKTFQDSIMVTRRLGLRYLWIDSLCIIQDDVADWEREAASMAQVYSQAYLTIAASAATDGTQGLLRATPEGSHFDLFVDTEASPLNAGVSIGPFLQRFRRLVAAPLNTRAWTLQERILSPRMLHYAQHQLHWECRESIISEAGGPPFGELIDNSGEESWHRGRLGKLSDDLLEKHETQRLQDAAQHASNGRREHESWYGLIQEYCERDLTNGSDKLPALSGIAYAYSQQRNAQYVAGLWVDSIASGLLWHCRDAESLHRPSKYRAPSWSWASVDGPVEFFSVSDGLILGDSIEIYDISAEVAPNGLDPFGKVQSGKLSLWGAIKTATLRTLYEEVESDNFSNKEKASTRILFDEISAIGSATLDTPIPDSEVTCLLIATSYGSFGVRFNNNLVLLLAPTENSTEYTRLGMAMFYEERNYNPGRSVTHPTELTGSNVEEIQGTKGESLQDWFYDVDLVNITLI

SEQ ID NO: 39198 - DNA, 1725 bp, Muscodor strobelii
  misc_feature: SGI cDNA ID NO. 573633
  misc_feature: Reduced expression when VOC is produced
  misc_feature: Encodes the peptide sequence at SEQ ID NO 39199
atgggcaattcagcaacaccaccaaaccctgccgcggcagacatagtggaagcgagcacggatagcaccaccgatcaaaagccagtacccaaagactggcgattctggcttctgatctcgagtctagttcttacagcgttcctgagtgccttagagggcgctatcgtctccacatctcttccgtctattgcgaatgctctctctgcaggtccagactatatctgggtagtcaatgtctactatctaactagtgctgccgctcaaccgctctatggccaattggccgatctctggggccgacgatggctcatgattggtgccgtcgccatctttaccgttggtagtggaatatgcggctccgctacatcgatagcaattcttataggaggcagaacagtccaaggtctgggctcagccggtataaatattctcgtcgaattaattctttgtgacctgatacctctacgcgaacggggtcaattcttcggtatcttgttcctcttcatcgtcctcgggtccgtcatagcaccttttctaggcggtctactcatcggtcgcctttcgtggcgatgggtgttttatatcaacataccgttcggaggcttcgccactatcctattattccttgtgctccatgtgccacacactccaccgcctgggacgttcctgaacaagctcaataggatcgatttcatcggcaatttcctactgtctgcatcagtgggctcggtcttatacgcccttacatatggtggcacacgatacagcttcgcgaatgcaggcatcattgcaagtctagtaatcgggctgctcggtcacatcgcgtttctgttctttgaagcatcacgatggtgtcgcgagcccgtcatgcctatgactctcttcagcaacaggacatcaattgcagcctacggtctcaccttcctcaacactctggtctcgttctgggtcctatactttctgccgctctatttccaatcagtccgactcgtgtcaccagaacgatccggcatcatactcattcccttctcagtcatctattctctctcagcagctgcgggcggcggcttgtcgacaaaactcggtcgctaccgatcgatccattttgctggcttcggccttctaacgatcgctgttggtgtcttcacaatattcgacaggcacacgtctcttgcggtattagtggtacttgagatcatctgcgcctttggtctgggcgtcgcgacccctactctcctaacggccatccaggccgccttacctgacagcctgaatgccgctagcactggaactttcgcattcgtgaggagcatcggcactatttggggagttagcatccctgcagctatcttcaacaatcgggttgatcaactcctcccacagctttcggacgccgcagcgagacaggccctctcaaatggaggtgcatatcagtccggatcccgcgcgttcgtcgactcgtttcctccttctgttcgagacgccatcgttagcatttacacgcgaagcttgcaacaagtctggcaaattggtattgtatttgcaggcattgggttcctcgtcgtcttcatcgagaaggacctagtgctgcgtggaggaaatgatgacggatcaaaggagaaggccgaacaaattaaacttgaagatcgtccaactactacctatactcacagctctgaggagcctatcatagggccgccagtctcggcctccggggttatttga

SEQ ID NO: 39199 - protein, 574 aa, Muscodor strobelii
  misc_feature: SGI Peptide ID NO. 573633
  misc_feature (42)..(444): Pfam Id: PF07690 Pfam Desc: Major Facilitator Superfamily
  misc_feature (72)..(210): Pfam Id: PF00083 Pfam Desc: Sugar (and other) transporter
  misc_feature (25)..(561): NCBI GI: 256726052 Blast Desc: NECHADRAFT_100870 [Nectria haematococca mpVI 77-13-4]
  misc_feature (19)..(560): NCBI GI: 240109581 Blast Desc: Major Facilitator Superfamily protein [Coccidioides posadasii C735 delta SOWgp]
  misc_feature (18)..(543): NCBI GI: 255941836 Blast Desc: Pc16g13890 [Penicillium chrysogenum Wisconsin 54-1255] gi|211586310|emb|CAP94059.1| Pc16g13890 [Penicillium chrysogenum Wisconsin 54-1255]
  misc_feature (3)..(529): NCBI GI: 261352800 Blast Desc: conserved [Verticillium albo-atrum VaMs.102]
  misc_feature (3)..(549): NCBI GI: 169595160 Blast Desc: SNOG_00314 [Phaeosphaeria nodorum SN15] gi|160701030|gb|EAT91809.2| SNOG_00314 [Phaeosphaeria nodorum SN15]
  misc_feature (31)..(549): NCBI GI: 145233185 Blast Desc: An02g08330 [Aspergillus niger] gi|134056892|emb|CAK37795.1| protein product [Aspergillus niger]
  misc_feature (4)..(544): NCBI GI: 154322713 Blast Desc: BC1G_00699 [Botryotinia fuckeliana B05.10] gi|150848033|gb|EDN23226.1| BC1G_00699 [Botryotinia fuckeliana B05.10]
  misc_feature (33)..(561): NCBI GI: 145236904 Blast Desc: An07g00060 [Aspergillus niger] gi|134075564|emb|CAK39230.1| protein product [Aspergillus niger]
  misc_feature (3)..(564): NCBI GI: 46126849 Blast Desc: FG07802.1 [Gibberella zeae PH-1]
  misc_feature (18)..(560): NCBI GI: 256730290 Blast Desc: [Nectria haematococca mpVI 77-13-4]
  misc_feature: Useful for introducing or modulating the production of volatile compounds
MGNSATPPNPAAADIVEASTDSTTDQKPVPKDWRFWLLISSLVLTAFLSALEGAIVSTSLPSIANALSAGPDYIWVVNVYYLTSAAAQPLYGQLADLWGRRWLMIGAVAIFTVGSGICGSATSIAILIGGRTVQGLGSAGINILVELILCDLIPLRERGQFFGILFLFIVLGSVIAPFLGGLLIGRLSWRWVFYINIPFGGFATILLFLVLHVPHTPPPGTFLNKLNRIDFIGNFLLSASVGSVLYALTYGGTRYSFANAGIIASLVIGLLGHIAFLFFEASRWCREPVMPMTLFSNRTSIAAYGLTFLNTLVSFWVLYFLPLYFQSVRLVSPERSGIILIPFSVIYSLSAAAGGGLSTKLGRYRSIHFAGFGLLTIAVGVFTIFDRHTSLAVLVVLEIICAFGLGVATPTLLTAIQAALPDSLNAASTGTFAFVRSIGTIWGVSIPAAIFNNRVDQLLPQLSDAAARQALSNGGAYQSGSRAFVDSFPPSVRDAIVSIYTRSLQQVWQIGIVFAGIGFLVVFIEKDLVLRGGNDDGSKEKAEQIKLEDRPTTTYTHSSEEPIIGPPVSASGVI

SEQ ID NO: 39200 - DNA, 2161 bp, Muscodor strobelii
  misc_feature: SGI EST ID NO. CUFF.94348.0
  misc_feature: Variant of the nucleotide sequence at SEQ ID NO 39198
ttgcaatgtaaggcatccattttcgtctcatgttgaaaagcatcattttcgcaatcaacaccaccaaaccctgccgcggcagacatagtggaagcgagcacggatagcaccaccgatcaaaagccagtacccaaagactggcgattctggcttctgatctcgagtctagttcttacagcgttcctgagtgccttagagggcgctatcgtctccacatctcttccgtctattgcgaatgctctctctgcaggtccagactatatctgggtagtcaatgtctactatctaactagtgctgccgctcaaccgctctatggccaattggccgatctctggggccgacgatggctcatgattggtgccgtcgccatctttaccgttggtagtggaatatgcggctccgctacatcgatagcaattcttataggaggcagaacagtccaaggtctgggctcagccggtataaatattctcgtcgaattaattctttgtgacctgatacctctacgcgaacggggtcaattcttcggtatcttgttcctcttcatcgtcctcgggtccgtcatagcaccttttctaggcggtctactcatcggtcgcctttcgtggcgatgggtgttttatatcaacataccgttcggaggcttcgccactatcctattattccttgtgctccatgtgccacacactccaccgcctgggacgttcctgaacaagctcaataggatcgatttcatcggcaatttcctactgtctgcatcagtgggctcggtcttatacgcccttacatatggtggcacacgatacagcttcgcgaatgcaggcatcattgcaagtctagtaatcgggctgctcggtcacatcgcgtttctgttctttgaagcatcacgatggtgtcgcgagcccgtcatgcctatgactctcttcagcaacaggacatcaattgcagcctacggtctcaccttcctcaacactctggtctcgttctgggtcctatactttctgccgctctatttccaatcagtccgactcgtgtcaccagaacgatccggcatcatactcattcccttctcagtcatctattctctctcagcagctgcgggcggcggcttgtcgacaaaactcggtcgctaccgatcgatccattttgctggcttcggccttctaacgatcgctgttggtgtcttcacaatattcgacaggcacacgtctcttgcggtattagtggtacttgagatcatctgcgcctttggtctgggcgtcgcgacccctactctcctaacggccatccaggccgccttacctgacagcctgaatgccgctagcactggaactttcgcattcgtgaggagcatcggcactatttggggagttagcatccctgcagctatcttcaacaatcgggttgatcaactcctcccacagctttcggacgccgcagcgagacaggccctctcaaatggaggtgcatatcagtccggatcccgcgcgttcgtcgactcgtttcctccttctgttcgagacgccatcgttagcatttacacgcgaagcttgcaacaagtctggcaaattggtattgtatttgcaggcattgggttcctcgtcgtcttcatcgagaaggacctagtgctgcgtggaggaaatgatgacggatcaaaggagaaggccgaacaaattaaacttgaagatcgtccaactactacctatactcacagctctgaggagcctatcatagggccgccagtctcggcctccggggttatttgaataaggcggtgcgactgcagcgccgatttgttgcaaaggagtatctgcattcactgtacaaattgttcgacttatcagatgtattattcgatgggagttctggcataggagtgtcacatagaaaggtgtgcagatgagatctccaagcgcagccttcccatgctgcgcaagactgattaatcacttgattgtgtaatccaccagtagatatgagaagagggtcgaatgcgcacgcatttcgaataaggactgaattacataaaaacaccgtttgtcatgctctggtatagcatctaaaaatgacaaatcgcagatataatagttacaacattcaataaacacctcttcaggagacggaaggaggtaccattaatgatatataaaaataagttgc

SEQ ID NO: 39201 - DNA, 759 bp, Muscodor strobelii
  misc_feature: SGI cDNA ID NO. 573634
  misc_feature: Encodes the peptide sequence at SEQ ID NO 39202
atgccagagccctttgcctcggaatctgccggcgttgtatcctgtattgctgccaccacagcggatgaggctctagagtcctccaatattgggagacttacagaggttctcaatcggcagcttgctacccttcatcatgtatcaagcttctcagatctttctatcggtaccccattgggactcaacgaccgcatcaagggctgcgccagtattgttataaaactgaatctcgattctgaatttgatcctgctcaaaacgaggtggatcagttcagcacatggcttctcggcgctcctgcagcggtccgatgtttacaaatacagtcacactaccatgacgaatcgaatagcgaagattgcaaatctattcctgacgatccgaatgctaccgagaaccaggctccaattactagtgagcttgagacgctgtttgcaccccatgagctggataatgaagtggacgatgctcctgcatcgctcatgctggacatgctacccacatacggagaacaagtttcgacttccagcagtgtcgatacgtatcggggtttgaagtgtcccatatgtcacttcacgcctagtggcaaatcagcaaatcataaggcttatttccggaagcatctcggtacgcacagttttgctgatattcagtgtgataaatgcaataagacgttcacgaggagggataatctcacgtcgcatatgaaacaggctcacccattaccagcgaaacggctcaaaattggtcatatactgtaa

SEQ ID NO: 39202 - protein, 252 aa, Muscodor strobelii
  misc_feature: SGI Peptide ID NO. 573634
  misc_feature (216)..(239): Pfam Id: PF00096 Pfam Desc: Zinc finger, C2H2 type
  misc_feature (184)..(246): NCBI GI: 116192335 Blast Desc: CHGG_05885 [Chaetomium globosum CBS 148.51] gi|88181798|gb|EAQ89266.1| CHGG_05885 [Chaetomium globosum CBS 148.51]
  misc_feature (184)..(239): NCBI GI: 171684303 Blast Desc: protein product [Podospora anserina] gi|170942112|emb|CAP67764.1| protein product [Podospora anserina]
  misc_feature (189)..(245): NCBI GI: 145603562 Blast Desc: [Magnaporthe grisea 70-15] gi|145011775|gb|EDJ96431.1| [Magnaporthe grisea 70-15]
  misc_feature (184)..(239): NCBI GI: 38567103 Blast Desc: [Neurospora crassa]
  misc_feature (184)..(239): NCBI GI: 164427931 Blast Desc: NCU02487 [Neurospora crassa OR74A] gi|157071941|gb|EAA35845.2| [Neurospora crassa OR74A]
  misc_feature (173)..(239): NCBI GI: 255720641 Blast Desc: [Candida tropicalis MYA-3404] gi|240135744|gb|EER35297.1| [Candida tropicalis MYA-3404]
  misc_feature (158)..(234): NCBI GI: 281343237 Blast Desc: PANDA_015276 [Ailuropoda melanoleuca]
  misc_feature (148)..(236): NCBI GI: 118089950 Blast Desc: : similar to LOC152485 protein [Gallus gallus]
MPEPFASESAGVVSCIAATTADEALESSNIGRLTEVLNRQLATLHHVSSFSDLSIGTPLGLNDRIKGCASIVIKLNLDSEFDPAQNEVDQFSTWLLGAPAAVRCLQIQSHYHDESNSEDCKSIPDDPNATENQAPITSELETLFAPHELDNEVDDAPASLMLDMLPTYGEQVSTSSSVDTYRGLKCPICHFTPSGKSANHKAYFRKHLGTHSFADIQCDKCNKTFTRRDNLTSHMKQAHPLPAKRLKIGHIL

SEQ ID NO: 39203 - DNA, 1890 bp, Muscodor strobelii
  misc_feature: SGI cDNA ID NO. 573635
  misc_feature: Elevated expression when VOC is produced
  misc_feature: Encodes the peptide sequence at SEQ ID NO 39204
atgaaagcgtctcttcccttctttgtagctcttggcagctcagtcttagcccttgagcctattgttacccttccccatagcagggtctcctaccgaggcgtgttgaggaactcggtagaagactttcataacgttaagttcgcccatgatacgtcgggctcgggacgcttcgctcctccaaggctgtacaacccaccaagtggtaccgaggtcgacgcaacaattcctggaccagtatgtccccaacttcgccctccgattcccccattctttagcgagacaccaaaccagagtgaagattgtttgaacctcaggatttctagacccgctaggattgacgtttcttcttcaaccaagctccctgtcgtcgtccacatcaccggcggcggtgtagtcaaaggggctgcagacgatgcgaatttcgaccctgcaaatctcattgagcactctatctccataggcaagcctatcatccatgtcgtcctcaattggaggctcacgatcttcgggtttgcccgtttgcaaaacttgaaagatcagaactcactcaatgtgggcatgcgagatcaacgagctggattccaatggatcaaagacaatatcgaagcattcggaggtgatcctgatagaatcacagcctttgggctcagttccggagggacactatcatctctccatctcatgacatacggtggtgataagggtgtgcctttcacacaggcctgggtcatgtcagggccaccgggaacatccttcaatatgacatctgacgcgactgagcttcacacttacgcagttgccggacagctaggttgtcaaaatgagagcgctgacgatgaagccatactagcgtgtttaagagaagtgccgatggatacattgacggacacagcaatggcgtattccgtcgcaaatcacccgcccgctgggcttttcacattcatcccgtcagtcgatggcgatttcctccctgatcgtcagtccactctgtacaagaaagggaggtttgcgaaaggcatccccatggtctttggatgggcccaggatgacggagcgatgaatgccggacccgcgcctatgttcaaatccgaggaggacatgaaaacaccattgaagaaatttgctcatgccctcactgacgatgactacgagaagcttttcgccctgtatcctgaacagagctttgaggacgatgttcagaggtaccaagcccgaaaggcagaagccgatcctgaagctcctgtccattacttccgcatctcacgcataatgcgcgatctgatgttcacctgctcatcaatcgacttcgggtatgaaatggctaaacaaagccaagaagaaaatcaactcacaggtgtgtatcactatactctgaatcagagcatggcgaccccgctttttaggggcgccggcatgccctggctgggtaccgtccatggtagtgacctggactatctttacaacaatctgtttccaagagcacagatgccagaggaacaacgccagttttcagatatgatgatttcttcttttatcgatttcgcgtacacggggcgacctggaagcgaaggtgacctttcttggccccagtcttttccagcatcagataacatgcaagcgggatcaccagacgtcttcaatctacggatactgggtggcccactaggcacggcttccgtacgattgaccaagaaactattagcgccagcgtctcagggccagcatcaagatgacctcgggtcgatgcagatcccactcggcagcaatgacatcgagtatgggcaaatgcagtcgctccaagacaaggagaggcaacgagaactgtcgcgagaagatctgtttaagcgctgctcattcatcaacacactcgcggagaagctaggccactga

SEQ ID NO: 39204 - protein, 629 aa, Muscodor strobelii
  misc_feature: SGI Peptide ID NO. 573635
  misc_feature (2)..(563): Pfam Id: PF00135 Pfam Desc: Carboxylesterase
  misc_feature (53)..(531): Pfam Id: PF00135 Pfam Desc: Carboxylesterase
  misc_feature (19)..(629): NCBI GI: 171680151 Blast Desc: protein product [Podospora anserina] gi|170939702|emb|CAP64928.1| protein product [Podospora anserina]
  misc_feature (20)..(627): NCBI GI: 154309495 Blast Desc: BC1G_07218 [Botryotinia fuckeliana B05.10] gi|150852241|gb|EDN27433.1| BC1G_07218 [Botryotinia fuckeliana B05.10]
  misc_feature (20)..(628): NCBI GI: 85092405 Blast Desc: NCU04930 [Neurospora crassa OR74A] gi|28920783|gb|EAA30142.1| [Neurospora crassa OR74A]
  misc_feature (20)..(622): NCBI GI: 145242092 Blast Desc: An09g03760 [Aspergillus niger] gi|134078237|emb|CAK96818.1| protein product [Aspergillus niger]
  misc_feature (19)..(554): NCBI GI: 145245011 Blast Desc: An11g08070 [Aspergillus niger] gi|134079468|emb|CAK46000.1| protein product [Aspergillus niger]
  misc_feature (20)..(554): NCBI GI: 119191482 Blast Desc: CIMG_00118 [Coccidioides immitis RS]
  misc_feature (20)..(554): NCBI GI: 240106455 Blast Desc: lipase, [Coccidioides posadasii C735 delta SOWgp]
  misc_feature (39)..(621): NCBI GI: 67521714 Blast Desc: AN1314.2 [Aspergillus nidulans FGSC A4] gi|40746341|gb|EAA65497.1| AN1314.2 [Aspergillus nidulans FGSC A4] gi|259488355|tpe|CBF87734.1| TPA: conserved [Aspergillus FGSC
  misc_feature (11)..(490): NCBI GI: 154304491 Blast Desc: BC1G_09121 [Botryotinia fuckeliana B05.10] gi|150854101|gb|EDN29293.1| BC1G_09121 [Botryotinia fuckeliana B05.10]
  misc_feature (5)..(565): NCBI GI: 119487447 Blast Desc: carboxylesterase family protein [Neosartorya fischeri NRRL 181] gi|119410673|gb|EAW20619.1| carboxylesterase family protein [Neosartorya fischeri NRRL 181]
  misc_feature (3)..(487): SWISSPROT Homolog: EC 3.1.1.3 Triacylglycerol lipase
  misc_feature: Useful for introducing or modulating the production of volatile compounds
MKASLPFFVALGSSVLALEPIVTLPHSRVSYRGVLRNSVEDFHNVKFAHDTSGSGRFAPPRLYNPPSGTEVDATIPGPVCPQLRPPIPPFFSETPNQSEDCLNLRISRPARIDVSSSTKLPVVVHITGGGVVKGAADDANFDPANLIEHSISIGKPIIHVVLNWRLTIFGFARLQNLKDQNSLNVGMRDQRAGFQWIKDNIEAFGGDPDRITAFGLSSGGTLSSLHLMTYGGDKGVPFTQAWVMSGPPGTSFNMTSDATELHTYAVAGQLGCQNESADDEAILACLREVPMDTLTDTAMAYSVANHPPAGLFTFIPSVDGDFLPDRQSTLYKKGRFAKGIPMVFGWAQDDGAMNAGPAPMFKSEEDMKTPLKKFAHALTDDDYEKLFALYPEQSFEDDVQRYQARKAEADPEAPVHYFRISRIMRDLMFTCSSIDFGYEMAKQSQEENQLTGVYHYTLNQSMATPLFRGAGMPWLGTVHGSDLDYLYNNLFPRAQMPEEQRQFSDMMISSFIDFAYTGRPGSEGDLSWPQSFPASDNMQAGSPDVFNLRILGGPLGTASVRLTKKLLAPASQGQHQDDLGSMQIPLGSNDIEYGQMQSLQDKERQRELSREDLFKRCSFINTLAEKLGH

SEQ ID NO: 39205 - DNA, 2362 bp, Muscodor strobelii
  misc_feature: SGI EST ID NO. CUFF.94360.0
  misc_feature: Variant of the nucleotide sequence at SEQ ID NO 39203
tcagatgcaccccgcgaaaaggctcattctttatatccgctatgatgtttctcataagtgacgtttggcactttcatgatgcccggcatcatttcgctcagtagattcgtgaacttcccctcgttcatcattttcgttctggttgtcaatctctgtacctcgctacctcaattccgcgatgaaagcgtctcttcccttctttgtagctcttggcagctcagtcttagcccttgagcctattgttacccttccccatagcagggtctcctaccgaggcgtgttgaggaactcggtagaagactttcataacgttaagttcgcccatgatacgtcgggctcgggacgcttcgctcctccaaggctgtacaacccaccaagtggtaccgaggtcgacgcaacaattcctggaccagtatgtccccaacttcgccctccgattcccccattctttagcgagacaccaaaccagagtgaagattgtttgaacctcaggatttctagacccgctaggattgacgtttcttcttcaaccaagctccctgtcgtcgtccacatcaccggcggcggtgtagtcaaaggggctgcagacgatgcgaatttcgaccctgcaaatctcattgagcactctatctccataggcaagcctatcatccatgtcgtcctcaattggaggctcacgatcttcgggtttgcccgtttgcaaaacttgaaagatcagaactcactcaatgtgggcatgcgagatcaacgagctggattccaatggatcaaagacaatatcgaagcattcggaggtgatcctgatagaatcacagcctttgggctcagttccggagggacactatcatctctccatctcatgacatacggtggtgataagggtgtgcctttcacacaggcctgggtcatgtcagggccaccgggaacatccttcaatatgacatctgacgcgactgagcttcacacttacgcagttgccggacagctaggttgtcaaaatgagagcgctgacgatgaagccatactagcgtgtttaagagaagtgccgatggatacattgacggacacagcaatggcgtattccgtcgcaaatcacccgcccgctgggcttttcacattcatcccgtcagtcgatggcgatttcctccctgatcgtcagtccactctgtacaagaaagggaggtttgcgaaaggcatccccatggtctttggatgggcccaggatgacggagcgatgaatgccggacccgcgcctatgttcaaatccgaggaggacatgaaaacaccattgaagaaatttgctcatgccctcactgacgatgactacgagaagcttttcgccctgtatcctgaacagagctttgaggacgatgttcagaggtaccaagcccgaaaggcagaagccgatcctgaagctcctgtccattacttccgcatctcacgcataatgcgcgatctgatgttcacctgctcatcaatcgacttcgggtatgaaatggctaaacaaagccaagaagaaaatcaactcacaggtgtgtatcactatactctgaatcagagcatggcgaccccgctttttaggggcgccggcatgccctggctgggtaccgtccatggtagtgacctggactatctttacaacaatctgtttccaagagcacagatgccagaggaacaacgccagttttcagatatgatgatttcttcttttatcgatttcgcgtacacggggcgacctggaagcgaaggtgacctttcttggccccagtcttttccagcatcagataacatgcaagcgggatcaccagacgtcttcaatctacggatactgggtggcccactaggcacggcttccgtacgattgaccaagaaactattagcgccagcgtctcagggccagcatcaagatgacctcgggtcgatgcagatcccactcggcagcaatgacatcgagtatgggcaaatgcagtcgctccaagacaaggagaggcaacgagaactgtcgcgagaagatctgtttaagcgctgctcattcatcaacacactcgcggagaagctaggccactgaggttcaattgaatatcaaagcgacgtcatgacagagttgaatagtttacaactctgcgtccacaaataaaacatcgtatacaacctactccagttaacagctttcctttaaacccattagggatgggcgggtcatcctattagactcatattacgccccggctattgtgtaataagtggccaaacgttatgtatacttgcttcgggagattgcttccctacctaatagtgagcattttgaacaacaggtccgattaatgtacttatgaaatgcgtcaaacgtacgctcaaaatg

SEQ ID NO: 39206 - DNA, 1167 bp, Muscodor strobelii
  misc_feature: SGI cDNA ID NO. 573636
  misc_feature: Elevated expression when VOC is produced
  misc_feature: Encodes the peptide sequence at SEQ ID NO 39207
atgcaggtgcgagacgtcgccgacgtcgatggccgtaatgcacttcgactggcattgagtatgaacgagcgagagagggacaaccccgagattatcgaaaaagtaaagctcttattacagaatggggccgacccagaccaaattgataacatgggtatgtcgtcaaacatggccgttccttacacaatactctcaaagtcgaactctcccggctacgaccgtgctttggaaggcttgttccctcattcctctgctatcgaagagttcgaactatcatatttgcacagagtggtcgtcggcataattccgatcagtctggcaagtgtgatccgaacgactgttgctagtcaggtgaatgcaaaggaccgtttcggatgcacaccgctgatgtacgcggccagccgcagcgacctggcggtcgttaatacgttgatcgaagccggggccgacataaacgatggcgatgtctattcttctagcgctctgcaatttgccgtattatcgagaggtacagagagcccggcttgcgtcgacgcactcctcaaggccggagccgacgccaatgctgtgactttcgatggaaggtcttgcttgcatttcgtggcagaaattgatcgagtcgtcatctatcgcagattgctgaaagccggggccgatgtggaagttcggagccacaggggcaagacgcccatgattgttgcagctgagcgcaactctctgaaagttatgcgttgtctatacgataccggggccaatctggaggcaatggacaactatgggctgacgccactcatctgtgccgccgaaaacgactcgagagacgctctggttctcctgcttcgccttggtgctaattgtgcgcgtaccgacaacaaactgcacacgctgctacactatctagcgcaatttgcgagcatcgagacaattcaagcacttaccaacattggaatcagggggcaagatgcgctagcacggagtgaatatggtctgacagcgcaacaagtattggaaaggcgcgaacccgaacccgagcctgagttgagagccgcctttgagcgtctcctacgggcatggtgtggcgctgaggtggacagcgatgaatcaatagctgacgaagagcacttctatgatgctgtggaaaatctggcgggcgaagaaaataaatga

SEQ ID NO: 39207 - protein, 388 aa, Muscodor strobelii
  misc_feature: SGI Peptide ID NO. 573636
  misc_feature (124)..(156): Pfam Id: PF00023 Pfam Desc: Ankyrin repeat
  misc_feature (226)..(258): Pfam Id: PF00023 Pfam Desc: Ankyrin repeat
  misc_feature (259)..(291): Pfam Id: PF00023 Pfam Desc: Ankyrin repeat
  misc_feature (10)..(50): Pfam Id: PF00023 Pfam Desc: Ankyrin repeat
  misc_feature (193)..(225): Pfam Id: PF00023 Pfam Desc: Ankyrin repeat
  misc_feature (8)..(323): NCBI GI: 123507472 Blast Desc: ankyrin repeat protein [Trichomonas vaginalis G3] gi|121912377|gb|EAY17199.1| ankyrin repeat protein, [Trichomonas vaginalis G3]
  misc_feature (8)..(347): NCBI GI: 123507472 Blast Desc: ankyrin repeat protein [Trichomonas vaginalis G3] gi|121912377|gb|EAY17199.1| ankyrin repeat protein, [Trichomonas vaginalis G3]
  misc_feature (8)..(323): NCBI GI: 123507472 Blast Desc: ankyrin repeat protein [Trichomonas vaginalis G3] gi|121912377|gb|EAY17199.1| ankyrin repeat protein, [Trichomonas vaginalis G3]
  misc_feature (20)..(316): NCBI GI: 123507472 Blast Desc: ankyrin repeat protein [Trichomonas vaginalis G3] gi|121912377|gb|EAY17199.1| ankyrin repeat protein, [Trichomonas vaginalis G3]
  misc_feature (8)..(316): NCBI GI: 123507472 Blast Desc: ankyrin repeat protein [Trichomonas vaginalis G3] gi|121912377|gb|EAY17199.1| ankyrin repeat protein, [Trichomonas vaginalis G3]
  misc_feature (96)..(331): NCBI GI: 123398895 Blast Desc: ankyrin repeat protein [Trichomonas vaginalis G3] gi|121882538|gb|EAX88435.1| ankyrin repeat protein, [Trichomonas vaginalis G3]
  misc_feature (32)..(318): NCBI GI: 123425103 Blast Desc: ankyrin repeat protein [Trichomonas vaginalis G3] gi|121888321|gb|EAX93801.1| ankyrin repeat protein, [Trichomonas vaginalis G3]
  misc_feature (115)..(335): NCBI GI: 123507540 Blast Desc: ankyrin repeat protein [Trichomonas vaginalis G3] gi|121912392|gb|EAY17214.1| ankyrin repeat protein, [Trichomonas vaginalis G3]
  misc_feature (8)..(329): NCBI GI: 123502045 Blast Desc: ankyrin repeat protein [Trichomonas vaginalis G3] gi|121911148|gb|EAY15985.1| ankyrin repeat protein, [Trichomonas vaginalis G3]
  misc_feature (115)..(331): NCBI GI: 123453498 Blast Desc: ankyrin repeat protein [Trichomonas vaginalis G3] gi|121897368|gb|EAY02491.1| ankyrin repeat protein, [Trichomonas vaginalis G3]
  misc_feature (37)..(331): SWISSPROT Homolog: EC 2.7.11.1 Non-specific serine/threonine protein kinase
  misc_feature: Useful for introducing or modulating the production of volatile compounds
MQVRDVADVDGRNALRLALSMNERERDNPEIIEKVKLLLQNGADPDQIDNMGMSSNMAVPYTILSKSNSPGYDRALEGLFPHSSAIEEFELSYLHRVVVGIIPISLASVIRTTVASQVNAKDRFGCTPLMYAASRSDLAVVNTLIEAGADINDGDVYSSSALQFAVLSRGTESPACVDALLKAGADANAVTFDGRSCLHFVAEIDRVVIYRRLLKAGADVEVRSHRGKTPMIVAAERNSLKVMRCLYDTGANLEAMDNYGLTPLICAAENDSRDALVLLLRLGANCARTDNKLHTLLHYLAQFASIETIQALTNIGIRGQDALARSEYGLTAQQVLERREPEPEPELRAAFERLLRAWCGAEVDSDESIADEEHFYDAVENLAGEENK

SEQ ID NO: 39208 - DNA, 3594 bp, Muscodor strobelii
  misc_feature: SGI EST ID NO. CUFF.94367.0
  misc_feature: Variant of the nucleotide sequence at SEQ ID NO 39206
aaaagaacgttttatcattggcgcagatgtcaagaacgttctagaccagaggcgaagccttcaccgaaaagtcgctaccgagccgcgtgctacccgtcagccccattggacaccgactactgagcgccctatttcgtcgcagcctgcttccaaagtgcatatctttggcgtcattgatactcgcacgaatgaacaatcgtggcttggcagggatacggggattgaccaacgcagggaagaggcgacctagtatgactggactaattgccgttggacacatgtaggctatggcaagggtaggcgccatgcatactacactagatagctgagttctgtgaggtaccttaagttactgtatatcgcattcgacaaatacccctaaaaggtcaccttctgcccctccttgtatctctctcacattgtcctcttaagtttcctgcgatggatatgtatatcggccaatggctgaccttttctcagttctggcaggagctgctggtttggcggatgtatctgtcaagacgtcgttgaaactgcgcaatctattcttggagttcaagaatgcaccccagttgatatcagggttgtccaacgaaatcacggacataggtgtggtgctgcaaagagtcagtgatctacggcaatccattgaaggcgtaggcgacttgcaacatgatgcgacataccttcgtgacctaagtaactatctcaatgatattcgggcaattctcacggaacttgaagtactcgctagtgttctcaagccaggaaagccagcagcccaaggattccgatggcttcgacaaaaaaagcatgccacaaggttgaggactaggttgaaggaggcgcgcgagaagatcaatgagctgctgatatcccataatacctccttacaaagtcgcatcaaactcgaacttcatgaaattcggttgggtacacagcaggctcaagcagctcaagcaactgccgagacagcaaataacaacttccaaacgactttaggaggactagccgcaatccgcagtacactgactcatcagcgaatgacggcggtctcagagatacagaccgtacgagatgacatatctgcacaagcggccgaacttaccagccataagcgagaagttgataatcaactctcaatcatccgtaacacgacggatgttggttctcaagcactcagtcggattgaagcggaacaggcacatcattttgaacaaacgcaattgattcagattgccatcttgaacgaacttggcaccattggcgactctagatcagtgataagaagatcaaggcctatagtcaagtcgatctctgctcatgaaagctctaatgctttgctttacctttcgatgcggctccggggctcacgctgtgttaatgattgcccgtgcaagtgtcatgcgacagcactcccagctagatcattacgaatcccacgcatcttacaggcagcaatcggatccttattcctcggcttcacaggatatccatatacttcagtccagtgtgacattaggtcctgtgcgaaaggaaagtatttgcggttgcaggcaacttatgcttttccacagtggtggttcctgcactacgttgtgcatgctttcgtagaagcctccatgtcgggtatactcacgttcgcgctcgcaataagtcgaaggattccgttcatgcgaggcaatatactctatgaggcgtgctacggaagccccgatactctacgacgcttgctccaacgaagaccaatgcaggtgcgagacgtcgccgacgtcgatggccgtaatgcacttcgactggcattgagtatgaacgagcgagagagggacaaccccgagattatcgaaaaagtaaagctcttattacagaatggggccgacccagaccaaattgataacatgggtatgtcgtcaaacatggccgttccttacacaatactctcaaagtcgaactctcccggctacgaccgtgctttggaaggcttgttccctcattcctctgctatcgaagagttcgaactatcatatttgcacagagtggtcgtcggcataattccgatcagtctggcaagtgtgatccgaacgactgttgctagtcaggtgaatgcaaaggaccgtttcggatgcacaccgctgatgtacgcggccagccgcagcgacctggcggtcgttaatacgttgatcgaagccggggccgacataaacgatggcgatgtctattcttctagcgctctgcaatttgccgtattatcgagaggtacagagagcccggcttgcgtcgacgcactcctcaaggccggagccgacgccaatgctgtgactttcgatggaaggtcttgcttgcatttcgtggcagaaattgatcgagtcgtcatctatcgcagattgctgaaagccggggccgatgtggaagttcggagccacaggggcaagacgcccatgattgttgcagctgagcgcaactctctgaaagttatgcgttgtctatacgataccggggccaatctggaggcaatggacaactatgggctgacgccactcatctgtgccgccgaaaacgactcgagagacgctctggttctcctgcttcgccttggtgctaattgtgcgcgtaccgacaacaaactgcacacgctgctacactatctagcgcaatttgcgagcatcgagacaattcaagcacttaccaacattggaatcagggggcaagatgcgctagcacggagtgaatatggtctgacagcgcaacaagtattggaaaggcgcgaacccgaacccgagcctgagttgagagccgcctttgagcgtctcctacgggcatggtgtggcgctgaggtggacagcgatgaatcaatagctgacgaagagcacttctatgatgctgtggaaaatctggcgggcgaagaaaataaatgagatgcttaggtatcatgtgttgggggttcgggacacacttcctccttgtatgtcaagaaatcacgagccaccggtctctacatgcacttttcgctatcacagcccatgatttcagcctctccttcatatttctagaggtagtgactccttatatccttctcagcacagctctctctcagcttcaacacaacctcaaagttgacaggttccaaggcggtcttttcaagaaacgccgtctcaagatccagatcaatctctttcccattagccgactgtatgtcaaacgcccagacaatgatagcaataccagtactgaatggccccccttttccgccatcacacactcgctcacacactccatgatacattctcagacgacttcgtacactacggccccaaaattaatcaaacaaccattttggcgatctttggcaactaaatacttgagggactaaaataaggggcaaatttgttaggaggcaatctgagttgcgtttgatttttattgctatttggtacggagaaaggcgtaatagggtattctaaactttataaaaagcgagaacttagaatgcattgctctaagaagccctagctgttaatagtatggttaatacctgtagggatctatggtgtttagtttatctaagagtagaaaatcatataatcaaaaatttcg

SEQ ID NO: 39209 - DNA, 1002 bp, Muscodor strobelii
  misc_feature: SGI cDNA ID NO. 573637
  misc_feature: Elevated expression when VOC is produced
  misc_feature: Encodes the peptide sequence at SEQ ID NO 39210
atgagtgacaagtcgggcaatatgtcgccagcgacacgagacgttctcaccaaggtgcgccaacttgtgccgccgatgctggagaagtttcacaaaggccaactaggtcgcgttgccgtaattggtggtagtgaggactatacgggagcaccttatttctcagcaatggcaagcgcgaggctaggttgcgatatgtctcacgtcatttgcacgcctggggctgcagccgtcatcaagacttatagtccgaatttgatggtccatccattaatgcggcaatcaccatcctcttcctcagcaccggcatcagagacggacccgaagcaagtcgcaggaggtataattgacatgctcccacgactacatgttctcgtcatcggcccgggactcggacgcgatccattaatgcatgagaccattgctcatgttctagccgcggcccgcgagcggaagatgccagtggtcctcgacgccgatgccttagcgctcgtctcgaaatcccctgaactcgtgatggggtggcgggaggttgtgctcacgccaaatgtcgtggagttcggacggctctggaagggtctcatcaacgaagatgagaaagagtcggaatcggaatcagcacaagttgaaaaattgtcaaaagcacttggtggcgtgacaattgtacagaaaggtgggaaagatttcatcagtaatggagagacgacattggttgttgatgcgaagggcgggctgaagaggagtggtggtcaaggcgatacgctcacggggagtattgcgacgttccttgcttggcgtaaggcatatcttgatgggctttgggatcatggcggtaagcttgaggaagcagaaactctgagtcttgcggcttttggaggagctgttatcacgagggagtgttctcgtcttgcgtttgagaagaagggtcggagtctgcaagctagtgacttgactgatgaagttcacgttgcgttcatgaatcttataggagagcaagaagggtga

SEQ ID NO: 39210 - protein, 333 aa, Muscodor strobelii
  misc_feature: SGI Peptide ID NO. 573637
  misc_feature (38)..(322): Pfam Id: PF01256 Pfam Desc: Carbohydrate kinase
  misc_feature (1)..(332): NCBI GI: 256735137 Blast Desc: NECHADRAFT_98759 [Nectria haematococca mpVI 77-13-4]
  misc_feature (8)..(330): NCBI GI: 85119493 Blast Desc: NCU02513 [Neurospora crassa OR74A] gi|28927456|gb|EAA36408.1| NCU02513 [Neurospora crassa OR74A]
  misc_feature (8)..(332): NCBI GI: 46108374 Blast Desc: FG01069.1 [Gibberella zeae PH-1]
  misc_feature (1)..(328): NCBI GI: 154308940 Blast Desc: BC1G_07998 [Botryotinia fuckeliana B05.10] gi|150852624|gb|EDN27816.1| BC1G_07998 [Botryotinia fuckeliana B05.10]
  misc_feature (8)..(333): NCBI GI: 261356482 Blast Desc: YjeF domain-containing protein [Verticillium albo-atrum VaMs.102]
  misc_feature (8)..(332): NCBI GI: 169602415 Blast Desc: SNOG_04206 [Phaeosphaeria nodorum SN15] gi|111066846|gb|EAT87966.1| SNOG_04206 [Phaeosphaeria nodorum SN15]
  misc_feature (8)..(332): NCBI GI: 189203115 Blast Desc: YjeF domain containing protein [Pyrenophora tritici-repentis Pt-1C-BFP] gi|187984992|gb|EDU50480.1| YjeF domain containing protein [Pyrenophora tritici-repentis
  misc_feature (9)..(332): NCBI GI: 242798952 Blast Desc: YjeF domain protein [Talaromyces stipitatus ATCC 10500] gi|218716619|gb|EED16040.1| YjeF domain protein [Talaromyces stipitatus ATCC 10500]
  misc_feature (35)..(332): NCBI GI: 156063140 Blast Desc: SS1G_01686 [Sclerotinia sclerotiorum 1980] gi|154697022|gb|EDN96760.1| SS1G_01686 [Sclerotinia sclerotiorum 1980]
  misc_feature (8)..(297): NCBI GI: 171696282 Blast Desc: protein product [Podospora anserina] gi|170948383|emb|CAP60547.1| protein product [Podospora anserina]
  misc_feature: Useful for introducing or modulating the production of volatile compounds
MSDKSGNMSPATRDVLTKVRQLVPPMLEKFHKGQLGRVAVIGGSEDYTGAPYFSAMASARLGCDMSHVICTPGAAAVIKTYSPNLMVHPLMRQSPSSSSAPASETDPKQVAGGIIDMLPRLHVLVIGPGLGRDPLMHETIAHVLAAARERKMPVVLDADALALVSKSPELVMGWREVVLTPNVVEFGRLWKGLINEDEKESESESAQVEKLSKALGGVTIVQKGGKDFISNGETTLVVDAKGGLKRSGGQGDTLTGSIATFLAWRKAYLDGLWDHGGKLEEAETLSLAAFGGAVITRECSRLAFEKKGRSLQASDLTDEVHVAFMNLIGEQEG

SEQ ID NO: 39211 - DNA, 1684 bp, Muscodor strobelii
  misc_feature: SGI EST ID NO. CUFF.94375.0
  misc_feature: Variant of the nucleotide sequence at SEQ ID NO 39209
gaaaacatccaaattgtgtaattgccatcactaatttcaatccataagacaaaattccgcatacaacaacgttttctaatacacatacctatacgccgattttattgtctgtgtctacagatcactaaacttacctagactcaacgcggagacagccaagcttcatattgccatatactagacaccgttcaaggcgcaaatgagtgacaagtcgggcaatatgtcgccagcgacacgagacgttctcaccaaggtgcgccaacttgtgccgccgatgctggagaagtttcacaaaggccaactaggtcgcgttgccgtaattggtggtagtgaggactatacgggagcaccttatttctcagcaatggcaagcgcgaggctaggttgcgatatgtctcacgtcatttgcacgcctggggctgcagccgtcatcaagacttatagtccgaatttgatggtccatccattaatgcggcaatcaccatcctcttcctcagcaccggcatcagagacggacccgaagcaagtcgcaggaggtataattgacatgctcccacgactacatgttctcgtcatcggcccgggactcggacgcgatccattaatgcatgagaccattgctcatgttctagccgcggcccgcgagcggaagatgccagtggtcctcgacgccgatgccttagcgctcgtctcgaaatcccctgaactcgtgatggggtggcgggaggttgtgctcacgccaaatgtcgtggagttcggacggctctggaagggtctcatcaacgaagatgagaaagagtcggaatcggaatcagcacaagttgaaaaattgtcaaaagcacttggtggcgtgacaattgtacagaaaggtgggaaagatttcatcagtaatggagagacgacattggttgttgatgcgaagggcgggctgaagaggagtggtggtcaaggcgatacgctcacggggagtattgcgacgttccttgcttggcgtaaggcatatcttgatgggctttgggatcatggcggtaagcttgaggaagcagaaactctgagtcttgcggcttttggaggagctgttatcacgagggagtgttctcgtcttgcgtttgagaagaagggtcggagtctgcaagctagtgacttgactgatgaagttcacgttgcgttcatgaatcttataggagagcaagaagggtgagtgctgttttggctcgccgtattgtctaagagaagatgctaatatagtgcagctagaaaataccaatcccatttgtagacctcacttatgtaattatcatactgagtagttatcttagaattatcacccaagtcaaagcagtcaagtcgtgcaagtcaaagcggccaagtagtggcctcgttattcgagaatttcaagagcgtccattcgcaagggacgaaaccggatacagagaataaccacggcgtcacacctctatggattgcggctgcatctggggcatgatatcattgttgcttttctagcccaacgagacggcgcatatgttaattcaagatcaacatacaggagatcacctcttttctggtcgcctagtgacggcaatgaacaaatcgtttctgtattaatggaggccggtgcgattcctgatttcgcagatgaaaatggggatatagcactcgcaatggcaaggaagaacggtca

SEQ ID NO: 39212 - DNA, 1002 bp, Muscodor strobelii
  misc_feature: SGI cDNA ID NO. 573638
  misc_feature: Reduced expression when VOC is produced
  misc_feature: Encodes the peptide sequence at SEQ ID NO 39213
atgagtgacaagtcgggcaatatgtcgccagcgacacgagacgttctcaccaaggtgcgccaacttgtgccgccgatgctggagaagtttcacaaaggccaactaggtcgcgttgccgtaattggtggtagtgaggactatacgggagcaccttatttctcagcaatggcaagcgcgaggctaggttgcgatatgtctcacgtcatttgcacgcctggggctgcagccgtcatcaagacttatagtccgaatttgatggtccatccattaatgcggcaatcaccatcctcttcctcagcaccggcatcagagacggacccgaagcaagtcgcaggaggtataattgacatgctcccacgactacatgttctcgtcatcggcccgggactcggacgcgatccattaatgcatgagaccattgctcatgttctagccgcggcccgcgagcggaagatgccagtggtcctcgacgccgatgccttagcgctcgtctcgaaatcccctgaactcgtgatggggtggcgggaggttgtgctcacgccaaatgtcgtggagttcggacggctctggaagggtctcatcaacgaagatgagaaagagtcggaatcggaatcagcacaagttgaaaaattgtcaaaagcacttggtggcgtgacaattgtacagaaaggtgggaaagatttcatcagtaatggagagacgacattggttgttgatgcgaagggcgggctgaagaggagtggtggtcaaggcgatacgctcacggggagtattgcgacgttccttgcttggcgtaaggcatatcttgatgggctttgggatcatggcggtaagcttgaggaagcagaaactctgagtcttgcggcttttggaggagctgttatcacgagggagtgttctcgtcttgcgtttgagaagaagggtcggagtctgcaagctagtgacttgactgatgaagttcacgttgcgttcatgaatcttataggagagcaagaaggctag

SEQ ID NO: 39213 - protein, 333 aa, Muscodor strobelii; identical to SEQ ID NO: 39210
  misc_feature: SGI Peptide ID NO. 573638
  misc_feature (38)..(322): Pfam Id: PF01256 Pfam Desc: Carbohydrate kinase
  misc_feature (1)..(332): NCBI GI: 256735137 Blast Desc: NECHADRAFT_98759 [Nectria haematococca mpVI 77-13-4]
  misc_feature (8)..(330): NCBI GI: 85119493 Blast Desc: NCU02513 [Neurospora crassa OR74A] gi|28927456|gb|EAA36408.1| NCU02513 [Neurospora crassa OR74A]
  misc_feature (8)..(332): NCBI GI: 46108374 Blast Desc: FG01069.1 [Gibberella zeae PH-1]
  misc_feature (1)..(328): NCBI GI: 154308940 Blast Desc: BC1G_07998 [Botryotinia fuckeliana B05.10] gi|150852624|gb|EDN27816.1| BC1G_07998 [Botryotinia fuckeliana B05.10]
  misc_feature (8)..(333): NCBI GI: 261356482 Blast Desc: YjeF domain-containing protein [Verticillium albo-atrum VaMs.102]
  misc_feature (8)..(332): NCBI GI: 169602415 Blast Desc: SNOG_04206 [Phaeosphaeria nodorum SN15] gi|111066846|gb|EAT87966.1| SNOG_04206 [Phaeosphaeria nodorum SN15]
  misc_feature (8)..(332): NCBI GI: 189203115 Blast Desc: YjeF domain containing protein [Pyrenophora tritici-repentis Pt-1C-BFP] gi|187984992|gb|EDU50480.1| YjeF domain containing protein [Pyrenophora tritici-repentis
  misc_feature (9)..(332): NCBI GI: 242798952 Blast Desc: YjeF domain protein [Talaromyces stipitatus ATCC 10500] gi|218716619|gb|EED16040.1| YjeF domain protein [Talaromyces stipitatus ATCC 10500]
  misc_feature (35)..(332): NCBI GI: 156063140 Blast Desc: SS1G_01686 [Sclerotinia sclerotiorum 1980] gi|154697022|gb|EDN96760.1| SS1G_01686 [Sclerotinia sclerotiorum 1980]
  misc_feature (8)..(297): NCBI GI: 171696282 Blast Desc: protein product [Podospora anserina] gi|170948383|emb|CAP60547.1| protein product [Podospora anserina]
  misc_feature: Useful for introducing or modulating the production of volatile compounds

SEQ ID NO: 39214 - DNA, 1684 bp, Muscodor strobelii; identical to SEQ ID NO: 39211
  misc_feature: SGI EST ID NO. CUFF.94375.0
  misc_feature: Variant of the nucleotide sequence at SEQ ID NO 39212

SEQ ID NO: 39215 - DNA, 1644 bp, Muscodor strobelii
  misc_feature: SGI cDNA ID NO. 573639
  misc_feature: Reduced expression when VOC is produced
  misc_feature: Encodes the peptide sequence at SEQ ID NO 39216
atgtaccgcaacgccctccgccagtcctcgcgcgtcgtgagcgctctctctgcctcgggcagagtggctgctacacgaaatgccgcacccgccgccatcaacatccacgcccgcacctacgccgagaaggcctcgcccaccgaggtctcatccatcctagagcagagaattcgaggtgtgtccgaggagtcgtctctcgctgagaccggccgtgtcctctctgtcggtgatggtattgcgcgtgtgcacggtatggccaatgtccaggctgaggagctggtcgagttcgcctctggcgtcaagggcatgtgcatgaacttggaggctggccaagtcggtgttgtgcttttcggttccgatcgtctggtcaaggagggtgagaccgtcaagcgtaccggtgaaattgtcgatgtccccgtcggccccgagatgcttggtcgtgtcgtcgatgctctgggtaaccccatcgacggcaagggccccatcaacaccaaggagaagcgccgtgcccagctcaaggctcccggcatcttgccccgcaagtccgtcaaccagcccgtacagactggtctcaagtctatcgatgccatggttcccattggccgtggacagcgtgagcttatcatcggtgatcgtcaaaccggaaagaccgccgtcgctctggacgccatgttgaaccagaagcgatggaacgacggaaacgacgaggtcaagaagctctactgtgtctacgtcgccgtcggtcagaagcgatctaccgtcgctcagctcgtccagaccctcgaggagaacgacgccatgaagtactccatcgtcgtcgccgccaccgcttccgaggccgcccctctacagtacattgcccccttcactggtgtatggttccgtgacaacggcaagcactcccttgtcatctacgacgatctgtccaagcaggccgtggcctaccgtcagatgtctctgctgctccgtcgtcctcccggacgtgaggcttaccccggtgatgtcttctacctccactcgcgtctcttggagcgtgctgccaagatgaatgacaagctcggcggtggttccatgactgccctgcccgtcattgagacccagggtggtgatgtgtccgcttacattcccaccaacgtcatttccatcactgatggccagatcttcttggaggctgagttgttctacaagggtatccgacctgccatcaacgtcggtctctctgtctcccgtgtcggttccgctgctcagctcaaggccatgaagcaagtcgctggttccctgaagctcttcttggcccagtatcgtgaagtcgctgccttcgcccagttcggttctgatttggatgccgctaccaagcagaccctgaaccgtggtgagcgtctgactgagcttctgaagcagaagcagtactcccctatggccgtcaacgagatggttcccctcatcttcgccggtgtcaacggtttcctcgacaacgtccccgttgccaagattctgcagtgggaggctgacttccttgctcacttgaagacgaacgagtcggatctccttgctaccattgacaaggagggatccatcagcaaggatctcgagacgagactgaaggatgtcatcactaccttcaccaagagcttcacatcgtaa

SEQ ID NO: 39216 - protein, 547 aa, Muscodor strobelii
  misc_feature: SGI Peptide ID NO. 573639
  misc_feature (65)..(131): Pfam Id: PF09378 Pfam Desc: HAS barrel domain
  misc_feature (189)..(409): Pfam Id: PF00006 Pfam Desc: ATP synthase alpha/beta family, nucleotide-binding domain
  misc_feature (421)..(525): Pfam Id: PF00306 Pfam Desc: ATP synthase alpha/beta chain, C terminal domain
  misc_feature (65)..(133): Pfam Id: PF02874 Pfam Desc: ATP synthase alpha/beta family, beta-barrel domain
  misc_feature (1)..(545): NCBI GI: 171696284 Blast Desc: protein product [Podospora anserina] gi|170948384|emb|CAP60548.1| protein product [Podospora anserina]
  misc_feature (1)..(545): NCBI GI: 85119497 Blast Desc: ATP synthase alpha chain, mitochondrial precursor [Neurospora crassa OR74A] gi|584806|sp|P37211.1|ATPA_NEUCR RecName: Full=ATP synthase subunit alpha, mitochondrial; Flags:
  misc_feature (1)..(547): NCBI GI: 39972915 Blast Desc: mitochondrial F1 ATPase subunit alpha [Magnaporthe grisea 70-15] gi|145012523|gb|EDJ97177.1| mitochondrial F1 ATPase subunit alpha [Magnaporthe grisea 70-15]
  misc_feature (1)..(545): NCBI GI: 154308715 Blast Desc: BC1G_07780 [Botryotinia fuckeliana B05.10] gi|150852731|gb|EDN27923.1| BC1G_07780 [Botryotinia fuckeliana B05.10]
  misc_feature (1)..(547): NCBI GI: 59802944 Blast Desc: ATP synthase alpha chain-like protein [Magnaporthe grisea]
  misc_feature (1)..(546): NCBI GI: 119188523 Blast Desc: CIMG_04309 [Coccidioides immitis RS]
  misc_feature (1)..(546): NCBI GI: 240111580 Blast Desc: ATP synthase alpha chain, mitochondrial precursor, [Coccidioides posadasii C735 delta SOWgp]
  misc_feature (1)..(545): NCBI GI: 256735138 Blast Desc: [Nectria haematococca mpVI 77-13-4]
  misc_feature (1)..(547): NCBI GI: 226291035 Blast Desc: ATPase alpha subunit [Paracoccidioides brasiliensis Pb18]
  misc_feature (1)..(545): NCBI GI: 226510502 Blast Desc: LOC100273100 [Zea mays] gi|194702226|gb|ACF85197.1| [Zea mays]
  misc_feature (48)..(545): SWISSPROT Homolog: EC 3.6.3.14 H(+)-transporting two-sector ATPase
  misc_feature: Useful for introducing or modulating the production of volatile compounds
MYRNALRQSSRVVSALSASGRVAATRNAAPAAINIHARTYAEKASPTEVSSILEQRIRGVSEESSLAETGRVLSVGDGIARVHGMANVQAEELVEFASGVKGMCMNLEAGQVGVVLFGSDRLVKEGETVKRTGEIVDVPVGPEMLGRVVDALGNPIDGKGPINTKEKRRAQLKAPGILPRKSVNQPVQTGLKSIDAMVPIGRGQRELIIGDRQTGKTAVALDAMLNQKRWNDGNDEVKKLYCVYVAVGQKRSTVAQLVQTLEENDAMKYSIVVAATASEAAPLQYIAPFTGVWFRDNGKHSLVIYDDLSKQAVAYRQMSLLLRRPPGREAYPGDVFYLHSRLLERAAKMNDKLGGGSMTALPVIETQGGDVSAYIPTNVISITDGQIFLEAELFYKGIRPAINVGLSVSRVGSAAQLKAMKQVAGSLKLFLAQYREVAAFAQFGSDLDAATKQTLNRGERLTELLKQKQYSPMAVNEMVPLIFAGVNGFLDNVPVAKILQWEADFLAHLKTNESDLLATIDKEGSISKDLETRLKDVITTFTKSFTS

SEQ ID NO: 39217 - DNA, 2415 bp, Muscodor strobelii
  misc_feature: SGI EST ID NO. CUFF.94447.0
  misc_feature: Variant of the nucleotide sequence at SEQ ID NO 39215
tttgctgtcatatgtgctgttatgattggaatgctatatatctcgtctactgcatcgactggcttgtagtgcactatttctatcccaggcctgcctggctcattacctgtaatggtcgactgctggactcatcaggctgacctggcctgtgcaccaccagctggccgtccagtccccttcgctctcggggctcttgctctccagtctctttcatttcctctctggaaaaagtctctatgaaaaacctccctcaaatcccatccacctctccccatctcctctcctctcaattgcaagtcaattgcagttgattcttaatacagaggaccctatttccctcttttaatatgtaccgcaacgccctccgccagtcctcgcgcgtcgtgagcgctctctctgcctcgggcagagtggctgctacacgaaatgccgcacccgccgccatcaacatccacgcccgcacctacgccgagaaggcctcgcccaccgaggtctcatccatcctagagcagagaattcgaggtgtgtccgaggagtcgtctctcgctgagaccggccgtgtcctctctgtcggtgatggtattgcgcgtgtgcacggtatggccaatgtccaggctgaggagctggtcgagttcgcctctggcgtcaagggcatgtgcatgaacttggaggctggccaagtcggtgttgtgcttttcggttccgatcgtctggtcaaggagggtgagaccgtcaagcgtaccggtgaaattgtcgatgtccccgtcggccccgagatgcttggtcgtgtcgtcgatgctctgggtaaccccatcgacggcaagggccccatcaacaccaaggagaagcgccgtgcccagctcaaggctcccggcatcttgccccgcaagtccgtcaaccagcccgtacagactggtctcaagtctatcgatgccatggttcccattggccgtggacagcgtgagcttatcatcggtgatcgtcaaaccggaaagaccgccgtcgctctggacgccatgttgaaccagaagcgatggaacgacggaaacgacgaggtcaagaagctctactgtgtctacgtcgccgtcggtcagaagcgatctaccgtcgctcagctcgtccagaccctcgaggagaacgacgccatgaagtactccatcgtcgtcgccgccaccgcttccgaggccgcccctctacagtacattgcccccttcactggtgcatcgattggcgaatttgagtgcaaccctttgttctaggccttgaagtggccaattccatgaggaagatgctaatatcttctacagggttccgtgacaacggcaagcactcccttgtcatctacgacgatctgtccaagcaggccgtggcctaccgtcagatgtctctgctgctccgtcgtcctcccggacgtgaggcttaccccggtgatgtcttctacctccactcgcgtctcttggagcgtgctgccaagatgaatgacaagctcggcggtggttccatgactgccctgcccgtcattgagacccagggtggtgatgtgtccgcttacattcccaccaacgtcatttccatcactgatggccagatcttcttggaggctgagttgttctacaagggtatccgacctgccatcaacgtcggtctctctgtctcccgtgtcggttccgctgctcagctcaaggccatgaagcaagtcgctggttccctgaagctcttcttggcccagtatcgtgaagtcgctgccttcgcccagttcggttctgatttggatgccgctaccaagcagaccctgaaccgtggtgagcgtctgactgagcttctgaagcagaagcagtactcccctatggccgtcaacgagatggttcccctcatcttcgccggtgtcaacggtttcctcgacaacgtccccgttgccaagattctgcagtgggaggctgacttccttgctcacttgaagacgaacgagtcggatctccttgctaccattgacaaggagggatccatcagcaaggatctcgagacgagactgaaggatgtcatcactaccttcaccaagagcttcacatcgtaaaaaatttaacaataacgtcggcgtggatactgtctataactagagcggatgaggtggtggaccttgttatttgtagagatggcgagtaagggtgctggatgctgagagtgcggcttagacacggaatattccccaatcataagcccccttgtaaattagagccaaaaaactcaaagagcacctgattccttttgttttgtaacttcccgtctttacggtttcgtgacatttccgaagaaaaagagcgacaagtctggacatgtcgtaatcgcaaacgaacgcactgcaccacttgacgtataatatactgtgatataaaccagctaacaatgcgaataaac

SEQ ID NO: 39218 - DNA, 2292 bp, Muscodor strobelii
  misc_feature: SGI cDNA ID NO. 573640
  misc_feature: Reduced expression when VOC is produced
  misc_feature: Encodes the peptide sequence at SEQ ID NO 39219
atgtcttcggccagatccagcatgccatggctgaaacgccatgtcttgcggtcactctacgagtctatcgactcctcatactctagagctgccaccaggcagtattccacaaattctttgaatcctttgcgcagacaacaaccctctagcttcttctctacctcttcaccctcctctcaaaaccctttctcccggttctttccacgaaaacccaccctctctgccaccaatactcgccgcagctgcacatccggcggtttattactcattggcctcactcccaattcgcctgctgccactaccttagctgcaacatgttctgcagctgccgactccgctgttgccagcgctgttacttctcctctgagtgctgccaagctggccacccgctcgtggtcgcgggcgatacatactagtcgcgctcagggcacaaaaatacaatacagagccaaatctacaaattcaaataatgaaaagacggaaccaaaagatgcgaaccacaagaccacgcccaacacatcctctaccacgccggaaccacacccacacgatgccgagtcgtccgtgtccaagtacttccacctaccgcacatgccacacttgccccatcgaccgacgagggatgagtttcttgctgccgccaacggtttctgggagcgtttaaaagtgcgcttcaagtgggcatccataagaagcatgagaccctggaatattgacgaatggggtgctttcatctcctggttcctatttggtcacatcgtttggatcctggttgggacgacaacgtttttctcactcgtcatcctcagcatcaataccgttgtggctcaagaaacattagccaaatgggttggagactatttgaccgaatctgctggcttgaccgtcatttttgagtctgccatcgtaccgcgctggaaagatggcgtgatcagcttccgcaacgtgtttgtgtctcgaagacccggtcagctgcagtcctctgtgagcaagggttcttcttccaacgctgccgccgtcgccgcagcagagagagactctgacaaggacctcgcccctgtagaagaggacgatggaaattacacccagtttgatgtgaccctcaatactgtcaacgtgacgttgtccttcgccaaatggtggaatggcaagggtttcctaaaagacgtagagattaaaggagttcgtggtgttatcgacaggacctctgtcagatggtcagatgaatatgtcgatccattatcgtatcggcatgagcatcaaccaggcgacttcgaaatcgattcgttcaagatggaagatctacttgttaccattcatcagccgaatgggttcagacccttttcggtcagcatatactcgtgtgagcttccccagctccggaaacagtacttattctacgatttcttgtctgcaaaccacatgtcaggttcttacgacggatctctcttcacgatacatcctcgacaagtccatggtgtcccggccggacaagagcgttttgttgaccctctgaacgaccccgatgcctggaagaaattcagccgtctgagaatcgatggtctaagaatcgatcatctcaaccgcggcgtcgagggtcccttcggctggatctatgaaggaaacgttgacattgtggccgatattcgattcccacgtgacggcgatgacagcatagccaaggtggtgtctgacttttacgacaaacttgaagaagcagtgacgtcaaaccgatatcttcacctcctggatagtccaacccgtcgtcgagacgatattatccacaacgaacccacacccattcaagcatcagacgtaccaaacgaagccgatccagccaataccgtgctggaatcgctcgcagatgacagcaccgccgtccccgcgcctccgcaagccccatcgtcatcagatgaggaggtacctcgctatctagttatggacctccgtatccatctcaacgatgtcaaggccacggtgcctgtcttcacatcgaatctttcatacgtgaaccaagcactcgtgagacccattgtagcgtatatcaatgccaagcgcacatatataccgattggctgtcgaatcgtcaagcgtgcgtcggattttgagggctcctggtcaatttatgactgtgggctgatggacgatacctccgctgaggtatatgcagcgttcgcgagagatgttgaggaccaacagagtcgtgtcagaagacttaagaaagtcgggtattggacgctatctcttgctgttcatgcgcttttcatgggcatggccggcaatgttgtctga

SEQ ID NO: 39219 - protein, 763 aa, Muscodor strobelii
  misc_feature: SGI Peptide ID NO. 573640
  misc_feature (206)..(763): Pfam Id: PF08118 Pfam Desc: Yeast mitochondrial distribution and morphology (MDM) proteins
  misc_feature (206)..(559): Pfam Id: PF08118 Pfam Desc: Yeast mitochondrial distribution and morphology (MDM) proteins
  misc_feature (641)..(763): Pfam Id: PF08118 Pfam Desc: Yeast mitochondrial distribution and morphology (MDM) proteins
  misc_feature (42)..(763): NCBI GI: 116196636 Blast Desc: CHGG_04916 [Chaetomium globosum CBS 148.51] gi|88180829|gb|EAQ88297.1| CHGG_04916 [Chaetomium globosum CBS 148.51]
  misc_feature (11)..(763): NCBI GI: 171676974 Blast Desc: protein product [Podospora anserina] gi|170936554|emb|CAP61214.1| protein product [Podospora anserina]
  misc_feature (48)..(763): NCBI GI: 256734303 Blast Desc: [Nectria haematococca mpVI 77-13-4]
  misc_feature (76)..(762): NCBI GI: 156057121 Blast Desc: SS1G_04291 [Sclerotinia sclerotiorum 1980] gi|154702077|gb|EDO01816.1| SS1G_04291 [Sclerotinia sclerotiorum 1980]
  misc_feature (163)..(763): NCBI GI: 46108924 Blast Desc: FG01344.1 [Gibberella zeae PH-1]
  misc_feature (144)..(763): NCBI GI: 85106061 Blast Desc: NCU07955 [Neurospora crassa OR74A] gi|28923683|gb|EAA32852.1| NCU07955 [Neurospora crassa OR74A]
  misc_feature (201)..(762): NCBI GI: 154297106 Blast Desc: BC1G_12212 [Botryotinia fuckeliana B05.10] gi|150843041|gb|EDN18234.1| BC1G_12212 [Botryotinia fuckeliana B05.10]
  misc_feature (37)..(763): NCBI GI: 225554382 Blast Desc: mitochondrial distribution and morphology protein [Ajellomyces capsulatus G186AR]
  misc_feature (131)..(762): NCBI GI: 119185108 Blast Desc: CIMG_07267 [Coccidioides immitis RS]
  misc_feature (131)..(762): NCBI GI: 240106543 Blast Desc: mitochondrial distribution and morphology (MDM) family protein [Coccidioides posadasii C735 delta SOWgp]
  misc_feature: Useful for introducing or modulating the production of volatile compounds
MSSARSSMPWLKRHVLRSLYESIDSSYSRAATRQYSTNSLNPLRRQQPSSFFSTSSPSSQNPFSRFFPRKPTLSATNTRRSCTSGGLLLIGLTPNSPAATTLAATCSAAADSAVASAVTSPLSAAKLATRSWSRAIHTSRAQGTKIQYRAKSTNSNNEKTEPKDANHKTTPNTSSTTPEPHPHDAESSVSKYFHLPHMPHLPHRPTRDEFLAAANGFWERLKVRFKWASIRSMRPWNIDEWGAFISWFLFGHIVWILVGTTTFFSLVILSINTVVAQETLAKWVGDYLTESAGLTVIFESAIVPRWKDGVISFRNVFVSRRPGQLQSSVSKGSSSNAAAVAAAERDSDKDLAPVEEDDGNYTQFDVTLNTVNVTLSFAKWWNGKGFLKDVEIKGVRGVIDRTSVRWSDEYVDPLSYRHEHQPGDFEIDSFKMEDLLVTIHQPNGFRPFSVSIYSCELPQLRKQYLFYDFLSANHMSGSYDGSLFTIHPRQVHGVPAGQERFVDPLNDPDAWKKFSRLRIDGLRIDHLNRGVEGPFGWIYEGNVDIVADIRFPRDGDDSIAKVVSDFYDKLEEAVTSNRYLHLLDSPTRRRDDIIHNEPTPIQASDVPNEADPANTVLESLADDSTAVPAPPQAPSSSDEEVPRYLVMDLRIHLNDVKATVPVFTSNLSYVNQALVRPIVAYINAKRTYIPIGCRIVKRASDFEGSWSIYDCGLMDDTSAEVYAAFARDVEDQQSRVRRLKKVGYWTLSLAVHALFMGMAGNVV

SEQ ID NO: 39220 - DNA, 2866 bp, Muscodor strobelii
  misc_feature: SGI EST ID NO. CUFF.94380.0
  misc_feature: Variant of the nucleotide sequence at SEQ ID NO 39218
tgaggatgtggggccgtctagcaacagcacgggcagctctaccgggcagtttcccagattcctggtcatgatgctttttgattgccatattgcttcatgctgccaacttcatgctctatgcgtaaacctcgttgcccaccctcgtcatccttcatgcgcgcactggtgccgcatgcatagtcgaacagattgtttctatcttctacttagaaacacagttacttcataattgtaatcaacaacatccaaatgtcgccatgatcctcacatcgccgtcatgtcttcggccagatccagcatgccatggctgaaacgccatgtcttgcggtcactctacgagtctatcgactcctcatactctagagctgccaccaggcagtattccacaaattctttgaatcctttgcgcagacaacaaccctctagcttcttctctacctcttcaccctcctctcaaaaccctttctcccggttctttccacgaaaacccaccctctctgccaccaatactcgccgcagctgcacatccggcggtttattactcattggcctcactcccaattcgcctgctgccactaccttagctgcaacatgttctgcagctgccgactccgctgttgccagcgctgttacttctcctctgagtgctgccaagctggccacccgctcgtggtcgcgggcgatacatactagtcgcgctcagggcacaaaaatacaatacagagccaaatctacaaattcaaataatgaaaagacggaaccaaaagatgcgaaccacaagaccacgcccaacacatcctctaccacgccggaaccacacccacacgatgccgagtcgtccgtgtccaagtacttccacctaccgcacatgccacacttgccccatcgaccgacgagggatgagtttcttgctgccgccaacggtttctgggagcgtttaaaagtgcgcttcaagtgggcatccataagaagcatgagaccctggaatattgacgaatggggtgctttcatctcctggttcctatttggtcacatcgtttggatcctggttgggacgacaacgtttttctcactcgtcatcctcagcatcaataccgttgtggctcaagaaacattagccaaatgggttggagactatttgaccgaatctgctggcttgaccgtcatttttgagtctgccatcgtaccgcgctggaaagatggcgtgatcagcttccgcaacgtgtttgtgtctcgaagacccggtcagctgcagtcctctgtgagcaagggttcttcttccaacgctgccgccgtcgccgcagcagagagagactctgacaaggacctcgcccctgtagaagaggacgatggaaattacacccagtttgatgtgaccctcaatactgtcaacgtgacgttgtccttcgccaaatggtggaatggcaagggtttcctaaaagacgtagagattaaaggagttcgtggtgttatcgacaggacctctgtcagatggtcagatgaatatgtcgatccattatcgtatcggcatgagcatcaaccaggcgacttcgaaatcgattcgttcaagatggaagatctacttgttaccattcatcagccgaatgggttcagacccttttcggtcagcatatactcgtgtgagcttccccagctccggaaacagtacttattctacgatttcttgtctgcaaaccacatgtcaggttcttacgacggatctctcttcacgatacatcctcgacaagtccatggtgtcccggccggacaagagcgttttgttgaccctctgaacgaccccgatgcctggaagaaattcagccgtctgagaatcgatggtctaagaatcgatcatctcaaccgcggcgtcgagggtcccttcggctggatctatgaaggaaacgttgacattgtggccgatattcgattcccacgtgacggcgatgacagcatagccaaggtggtgtctgacttttacgacaaacttgaagaagcagtgacgtcaaaccgatatcttcacctcctggatagtccaacccgtcgtcgagacgatattatccacaacgaacccacacccattcaagcatcagacgtaccaaacgaagccgatccagccaataccgtgctggaatcgctcgcagatgacagcaccgccgtccccgcgcctccgcaagccccatcgtcatcagatgaggaggtacctcgctatctagttatggacctccgtatccatctcaacgatgtcaaggccacggtgcctgtcttcacatcgaatctttcatacgtgaaccaagcactcgtgagacccattgtagcgtatatcaatgccaagcgcacatatataccgattggctgtcgaatcgtcaagcgtgcgtcggattttgagggctcctggtcaatttatgactgtgggctgatggacgatacctccgctgaggtatatgcagcgttcgcgagagatgttgaggaccaacagagtcgtgtcagaagacttaagaaagtcgggtattggacgctatctcttgctgttcatgcgcttttcatgggcatggccggcaatgttgtctgagactaagcactgtataaaattctccagcatgtataaagtctgaaggtccgggccaacatatatatactctgctttttgggttgcacatgtacaattgggatgcctggcgttggccaaggggaaacggataataggggtttgggcttttcatgatttccaaagaaaaatacccctctgtctgtctgttgatctcgactaaaaaatacgtagaattaaatgtgctttaagtcgagaaggaaataaataagagaattcttcctctacttaagcggcgatatcagaatttaatcgcgaaac

SEQ ID NO: 39221 - DNA, 777 bp, Muscodor strobelii
  misc_feature: SGI cDNA ID NO. 573641
  misc_feature: Reduced expression when VOC is produced
  misc_feature: Encodes the peptide sequence at SEQ ID NO 39222
atgcctgcccccacggccgccctccagcctgtggtggacgatgcgccggatgccactctgcagctaccagagaccgagaacacccaagactttgtcctcgatggacttgacgagatgccagccgattcaagcgctttgcaagccccgatagcccccgaaggagacgacatggacattgtcgacgaggagaaccgccccaaattccccgaggttcaatctacagacgctgccgtccgcgctcagacacgcaaagtccccatcccgccccatcgattctctcccctcaagtcccagtggccccagatatatccgcctttggtcgagcatctgaagctacaggtcaggatggatattaagaacaaggctgtcgagttgagaaactcgaaaacgtcaagcccaggtgctttacagaagggtgaagatttcgttcgagctttctgtctaggatttgacgttcaggatgccgtagctttactgcgactcgacgatttatatctagaaacgtttgaagtcaaagacgtcaaaactctcactggcgatcaccttgctcgtgctattggacgcattgcgggaaataatggaaagacgaagtttgccattgaaaacgcatcaaggacgagaattgttctcgctgactccaaaattcatatccttggaggattcaaaaacatcagaattgcccgtgaaagtgtcgtttcattaatattgggaaagcctcctggcaaagtttacaacaacttacgtacggtatccgcgaggatgaaggagagatattaa

SEQ ID NO: 39222 - protein, 258 aa, Muscodor strobelii
  misc_feature: SGI Peptide ID NO. 573641
  misc_feature (183)..(231): Pfam Id: PF00013 Pfam Desc: KH domain
  misc_feature (1)..(258): NCBI GI: 156057119 Blast Desc: SS1G_04290 [Sclerotinia sclerotiorum 1980] gi|154702076|gb|EDO01815.1| SS1G_04290 [Sclerotinia sclerotiorum 1980]
  misc_feature (1)..(258): NCBI GI: 154297104 Blast Desc: BC1G_12211 [Botryotinia fuckeliana B05.10] gi|150843040|gb|EDN18233.1| BC1G_12211 [Botryotinia fuckeliana B05.10]
  misc_feature (1)..(258): NCBI GI: 240106544 Blast Desc: KH domain containing protein [Coccidioides posadasii C735 delta SOWgp]
  misc_feature (1)..(258): NCBI GI: 119185111 Blast Desc: CIMG_07268 [Coccidioides immitis RS] gi|121931649|sp|Q1DQZ5.1|PNO1_COCIM RecName: Full=Pre-rRNA-processing protein PNO1
  misc_feature (1)..(258): NCBI GI: 238844788 Blast Desc: pre-rRNA-processing protein PNO1 [Microsporum canis CBS 113480]
  misc_feature (1)..(258): NCBI GI: 256735013 Blast Desc: [Nectria haematococca mpVI 77-13-4]
  misc_feature (1)..(258): NCBI GI: 46108926 Blast Desc: FG01345.1 [Gibberella zeae PH-1] gi|121817859|sp|Q4IN63.1|PNO1_GIBZE RecName: Full=Pre-rRNA-processing protein PNO1
  misc_feature (1)..(258): NCBI GI: 154278894 Blast Desc: HCAG_04100 [Ajellomyces capsulatus NAm1] gi|150412203|gb|EDN07590.1| HCAG_04100 [Ajellomyces capsulatus NAm1]
  misc_feature (1)..(258): NCBI GI: 225554383 Blast Desc: pre-rRNA-processing protein PNO1 [Ajellomyces capsulatus G186AR]
  misc_feature (1)..(258): NCBI GI: 240273185 Blast Desc: pre-rRNA-processing protein PNO1 [Ajellomyces capsulatus H143]
  misc_feature: Useful for introducing or modulating the production of volatile compounds
MPAPTAALQPVVDDAPDATLQLPETENTQDFVLDGLDEMPADSSALQAPIAPEGDDMDIVDEENRPKFPEVQSTDAAVRAQTRKVPIPPHRFSPLKSQWPQIYPPLVEHLKLQVRMDIKNKAVELRNSKTSSPGALQKGEDFVRAFCLGFDVQDAVALLRLDDLYLETFEVKDVKTLTGDHLARAIGRIAGNNGKTKFAIENASRTRIVLADSKIHILGGFKNIRIARESVVSLILGKPPGKVYNNLRTVSARMKERY

SEQ ID NO: 39223 - DNA, 1333 bp, Muscodor strobelii
  misc_feature: SGI EST ID NO. CUFF.94390.0
  misc_feature: Variant of the nucleotide sequence at SEQ ID NO 39221
caatccagtgccttatcgccctcactcgatacctctacaacttcacacctccgccacttgccgagtaagattcagctgagataattcacagacctacggcagttcagaacactataccctttcgcaattaaatttcatacccaaacaactgaacattgccttaatcaatccgacaacatgcctgcccccacggccgccctccagcctgtggtggacgatgcgccggatgccactctgcagctaccagagaccgagaacacccaagactttgtcctcgatggacttgacgagatgccagccgattcaagcgctttgcaagccccgatagcccccgaaggagacgacatggacattgtcgacgaggagaaccgccccaaattccccgaggttcaatctacagacgctgccgtccgcgctcagacacgcaaagtccccatcccgccccatcgattctctcccctcaagtcccagtggccccagatatatccgcctttggtcgagcatctgaagctacaggtcaggatggatattaagaacaaggctgtcgagttgagaaactcgaaaacgtcaagcccaggtgctttacagaagggtgaagatttcgttcgagctttctgtctaggatttgacgttcaggatgccgtagctttactgcgactcgacgatttatatctagaaacgtttgaagtcaaagacgtcaaaactctcactggcgatcaccttgctcgtgctattggacgcattgcgggaaataatggaaagacgaagtttgccattgaaaacgcatcaaggacgagaattgttctcgctgactccaaaattcatatccttggaggattcaaaaacatcagaattgcccgtgaaagtgtcgtttcattaatattgggaaagcctcctggcaaagtttacaacaacttacgtacggtatccgcgaggatgaaggagagatattaattacgaggtagccgacggatcaagactcgatcacatgcccacggacaaagtagtatggtagaactgaccatatgggaataactaatgctttatgacatttgatgtgaacattcgcatcgagggatcaggtagagaacgaagcactggtcgactagatcatgggtttagatgagtgtcagcgccagctcatcgtgaacgtgcataagatgcgcatggatggctactcaggtgaaaccctaattgaaaaatggtcacttcgctcggctagctgaactggccagttttgagtccagctttcttagctagatgtgttgttctgctcaagagcagctaaataaacaaatgatatcacttactctctgccgaaaggttgtcaaca

SEQ ID NO: 39224 - DNA, 3654 bp, Muscodor strobelii
  misc_feature: SGI cDNA ID NO. 573642
  misc_feature: Reduced expression when VOC is produced
  misc_feature: Encodes the peptide sequence at SEQ ID NO 39225
atggcagtgtccgaactgtcctccgctccgccgtcgccagcgtcgccggcatcggaatcaccaacggcatcgcttcctcctccgtctccctcagattccccgtcgtcgcccgttgaagagagagacgggaaagacgagaagcattcgacgacgcccgttccacacacgccaaacgcattcgagaatctccccgacgagatcattcaacaaattcttcgtttgaccgaccccgactcgtttgcttctctcgtactactcaattcaaaatggcggcgcatatcacagcagccctttctctatgctcaccatctatctcactgcccttcgtacgcaatgagccattccgttctccctgcttcggccatctgcgatgataacctgcctaatctccgccgtctctttgctcgcgaggtgaaacggaatctcttcgaagcttatctacgacccaagcaaacaaatatcaagttaatatcaaattcgatcagttcgtcctccgcaccaggtggcgagggtatgcagttcagcccctctgccagaggccaccatattcttgcctacaactcgtcgcggatatatctgctggacgttcggggccctggattggccgtgaaacgcgagctgaagattctacgtcgccccgccgcagcctgtgtcgtggacgacgggagtttcctggcggtgctatctactgacatgcaagttgatctctatgatctaaacgagacgcccccgcgccgaaaacagtctcttatcctcgataatagcccccgagctattgctctgtctccatgtggaagcgtactggcggcggcttatgaaggaggtatcgaggtccagtcgctaaatcctgctgcccttgcgacggatcgtcgagctgtgaaatgcgatggtgtagatgctcttgctttctcttttgatggcacgcaactattaggcactaccacaagttcgccgactcccaatactgtcatactcactgcgccgtactatgatcccggcaatcaaattgcgaacgatgatattagcgctctttggaccacatctattctttttcctaacactagccgagactgcagccatgcggtgcttttgcaagaatcaaattcaatggaggcaacatggacattcacgtacgatagaagtttcgaaacgtttcgtgcagtgagcatcgacgatcttcgaaacggtacaacatatttcacaggtcctatccctgctgctgcatctccgggcccggtattaccgtgtaccctaccagctgcaaactacaaaggagaactcgtttctgctggatttgaaggcaaacacatctggctctatggagtacctgaagatctggaagccgtgccggaacttcaccatcatgcggattcatctgcgcaacccactcttggtcgcagagccagcgggatatccgttcgatcgccttcacgaagacaggagtccgctgggcgccgtgtacctcaatggcaagtcctttgcgacaagtcacgaaatagcttcattagtgggcgaatgatagctgaattaggtggcgttagcaatgttaaatgggtgtctggctttgggaggtcgtcttgtgaggaaagactgattatagccgcgcgaggcattgtaccacaccgcccaatcaccgaagacgaaggtattgattttgtggatggtggacgaatcaccatactcgattttgattttggccttgagaatgggcaagaaagggagatcactattgaggtaggcactgcggaacctgaggttctcgaagaggagcaccgggacatggaggctgaagtggccattgttcgtaggaggacagtcgcacagcggaggggaaaccggggcggtggtgtcatgcgatctgccacagtgatgaacccgccagctgacccaatgcctcctatgcctcccatgcctcgacaatcacatcctacggatgaggatctggaggacccactgattccacgacgtatgaggactgtccacgacagctaccaagacactgctcccgaggcacaagaggatgtgtcactggaagaggcccaggaagctttagatgctccttacacacatgcgagtccacggtcggggactactttacgtcgagctgccacggccgctgctgcgaaccgccaacgcaatcctcccgcgccagttgctggtcctgtagagtacaggcgcgcagacggtagagcagagcatcctcacgaaagcgatgccgataactgggtgcccccacctcctccatatgtcaaggacgacccgatggttgatctgccttctttcctccgacatactcctatccctggtgctaacatcccgagaagaacacacacggccgcgccagatataccacctgtcccgccactacctgtcacccctcccgttcctccaataccttcaacggcccatatgcatggatcgaaccgacctgaattgcctagaatccgtactgatgccactaccaatgcccttcaacatcacccaaagactgcctatgcctcaatgcgcatggtaagtgacccgggcgcggtccaaggacttattggccaggacacacagagcacacctcagtctggatcgtcaagctcggcacacccgcaaactagagttgcccaagttgatgatgaagacatttatgatgcttcacctgtcggaacgccacagccggcagcccgccggttaccagtagcatcgactcccgatcgaccttctgcaggctcgcaatcatcaaatcgctttcctcatgccactccatccatacctggtgatggggaaagtccgagcccagctcaatcttatgtaccggccttgaacacgccgtcgcctcccagagctcagatcctgcaaccgcaaggaattatcacggagattcccgtcattgggaggctcccgaatgcatcaacctggccaagagcgcctgatgggctgtcagtgccgcaggcatccatcttgaatggatatccccattcggcgcctgtagccaatgtgaataacgatcagatgatcccatcatctttcccacattctgcagaaccagtacaagtcatgggtttgcgcagtcgacagcctagtataggagtttcccaaccgccgcctggtgggttccaagtaccccgcgtgcctgttgggagccggagccgaaatcaggatacgcggcgtctcagctccttaccgcctttacgagcaccttcgccccctgagcagccactcattattagcacgccgacgggcgttgccggggcattcgatggtaatcttactcatgggccggtgttgcacgcaccggtcccgcggcatccccgccccattccgggtcctggtgtgaatcagcctacagctcagagacttgaaaccatgacgggcctgagtatgcgcgaggagccccagatgcagatgaatcatgggatatataacatgcccccaccaataccccagtcttcctacctcagacatcatgcgagtgtcagccggcgaccaagccgcgcgcgtaggggcgcgctgaagaacctgcaggatgcgaggcagagaggctggacggacaggaagaaaaagaaagagcaggagaatgagcagggtggctggacagatatcagaagaccggaggagcaggtacctgtggggaaggagaaggagaggaagtgtgttgttatgtga

SEQ ID NO: 39225 - protein, 1217 aa, Muscodor strobelii
  misc_feature: SGI Peptide ID NO. 573642
  misc_feature (58)..(105): Pfam Id: PF00646 Pfam Desc: F-box domain
  misc_feature (32)..(1178): NCBI GI: 145603155 Blast Desc: MGG_04395 [Magnaporthe grisea 70-15] gi|145011454|gb|EDJ96110.1| MGG_04395 [Magnaporthe grisea 70-15]
  misc_feature (57)..(1184): NCBI GI: 85090457 Blast Desc: NCU07425 [Neurospora crassa OR74A] gi|28919787|gb|EAA29190.1| conserved [Neurospora crassa OR74A]
  misc_feature (66)..(1179): NCBI GI: 256732608 Blast Desc: NECHADRAFT_10619 [Nectria haematococca mpVI 77-13-4]
  misc_feature (52)..(1217): NCBI GI: 46125373 Blast Desc: FG07064.1 [Gibberella zeae PH-1]
  misc_feature (71)..(1043): NCBI GI: 171687541 Blast Desc: protein product [Podospora anserina] gi|170943732|emb|CAP69384.1| protein product [Podospora anserina]
  misc_feature (28)..(767): NCBI GI: 116180666 Blast Desc: CHGG_00961 [Chaetomium globosum CBS 148.51] gi|88185258|gb|EAQ92726.1| CHGG_00961 [Chaetomium globosum CBS 148.51]
  misc_feature (44)..(768): NCBI GI: 70989259 Blast Desc: F-box domain protein [Aspergillus fumigatus Af293] gi|66847110|gb|EAL87441.1| F-box domain protein [Aspergillus fumigatus Af293]
  misc_feature (44)..(768): NCBI GI: 159128891 Blast Desc: F-box domain protein [Aspergillus fumigatus A1163]
  misc_feature (59)..(780): NCBI GI: 121710440 Blast Desc: F-box domain protein [Aspergillus clavatus NRRL 1] gi|119400986|gb|EAW11410.1| F-box domain protein [Aspergillus clavatus NRRL 1]
  misc_feature (60)..(768): NCBI GI: 67532716 Blast Desc: AN4488.2 [Aspergillus nidulans FGSC A4] gi|40741641|gb|EAA60831.1| AN4488.2 [Aspergillus nidulans FGSC A4] gi|259482689|tpe|CBF77406.1| TPA: F-box domain protein FGSC
  misc_feature: Useful for introducing or modulating the production of volatile compounds
MAVSELSSAPPSPASPASESPTASLPPPSPSDSPSSPVEERDGKDEKHSTTPVPHTPNAFENLPDEIIQQILRLTDPDSFASLVLLNSKWRRISQQPFLYAHHLSHCPSYAMSHSVLPASAICDDNLPNLRRLFAREVKRNLFEAYLRPKQTNIKLISNSISSSSAPGGEGMQFSPSARGHHILAYNSSRIYLLDVRGPGLAVKRELKILRRPAAACVVDDGSFLAVLSTDMQVDLYDLNETPPRRKQSLILDNSPRAIALSPCGSVLAAAYEGGIEVQSLNPAALATDRRAVKCDGVDALAFSFDGTQLLGTTTSSPTPNTVILTAPYYDPGNQIANDDISALWTTSILFPNTSRDCSHAVLLQESNSMEATWTFTYDRSFETFRAVSIDDLRNGTTYFTGPIPAAASPGPVLPCTLPAANYKGELVSAGFEGKHIWLYGVPEDLEAVPELHHHADSSAQPTLGRRASGISVRSPSRRQESAGRRVPQWQVLCDKSRNSFISGRMIAELGGVSNVKWVSGFGRSSCEERLIIAARGIVPHRPITEDEGIDFVDGGRITILDFDFGLENGQEREITIEVGTAEPEVLEEEHRDMEAEVAIVRRRTVAQRRGNRGGGVMRSATVMNPPADPMPPMPPMPRQSHPTDEDLEDPLIPRRMRTVHDSYQDTAPEAQEDVSLEEAQEALDAPYTHASPRSGTTLRRAATAAAANRQRNPPAPVAGPVEYRRADGRAEHPHESDADNWVPPPPPYVKDDPMVDLPSFLRHTPIPGANIPRRTHTAAPDIPPVPPLPVTPPVPPIPSTAHMHGSNRPELPRIRTDATTNALQHHPKTAYASMRMVSDPGAVQGLIGQDTQSTPQSGSSSSAHPQTRVAQVDDEDIYDASPVGTPQPAARRLPVASTPDRPSAGSQSSNRFPHATPSIPGDGESPSPAQSYVPALNTPSPPRAQILQPQGIITEIPVIGRLPNASTWPRAPDGLSVPQASILNGYPHSAPVANVNNDQMIPSSFPHSAEPVQVMGLRSRQPSIGVSQPPPGGFQVPRVPVGSRSRNQDTRRLSSLPPLRAPSPPEQPLIISTPTGVAGAFDGNLTHGPVLHAPVPRHPRPIPGPGVNQPTAQRLETMTGLSMREEPQMQMNHGIYNMPPPIPQSSYLRHHASVSRRPSRARRGALKNLQDARQRGWTDRKKKKEQENEQGGWTDIRRPEEQVPVGKEKERKCVVM

SEQ ID NO: 39226 - DNA, 4869 bp, Muscodor strobelii
  misc_feature: SGI EST ID NO. CUFF.94734.1
  misc_feature: Variant of the nucleotide sequence at SEQ ID NO 39224
gtgacattgaaaggagttgaaacaagagctgattcaccaatgagcttcaaatggttgtacattggagatctcgtagtcagttgggccccaagtagcgagatctgtccaacagaaacaattagagagcagtgttttacgagcaaaaatccacagtccacagtccccatcgacaggctcgccagggtccatgctctctcttcatgcacactctattctcgggaggttgacaagtcggaagtgatgaccgagttggccaagtggatattacctacctaaacttcgcggctgtactccgcctcgccagaaacgtttctttcaccaccaccacgcgaattgacctgcattgctctcgtctcatctttgaaacatcccgtttgccagcctggatactcgtccaatcaacagagctacctcataaacatattgtcgccgctgtccggatcatcgattgcacccctttatttatcatcgaatgccgacgaggaagcatagagtcgagcatcgtgctgaatgacatcgtgctaccgaattacgaggagcaatacacgtcgatcaccgtaaccgtcccgtagacaatgctagccactggctaagctcaagaatcaccgcagatagagctcagagcccaatgtccatcgtaatggccaagctgttcgaccataccggttaaccattcgcctcccgagctgtttccacgatacacaacttcctagccttacttctcgtctcgtggtccatcgcagtgcgtcgtatacaacagagatggcagtgtccgaactgtcctccgctccgccgtcgccagcgtcgccggcatcggaatcaccaacggcatcgcttcctcctccgtctccctcagattccccgtcgtcgcccgttgaagagagagacgggaaagacgagaagcattcgacgacgcccgttccacacacgccaaacgcattcgagaatctccccgacgagatcattcaacaaattcttcgtttgaccgaccccgactcgtttgcttctctcgtactactcaattcaaaatggcggcgcatatcacagcagccctttctctatgctcaccatctatctcactgcccttcgtacgcaatgagccattccgttctccctgcttcggccatctgcgatgataacctgcctaatctccgccgtctctttgctcgcgaggtgaaacggaatctcttcgaagcttatctacgacccaagcaaacaaatatcaagttaatatcaaattcgatcagttcgtcctccgcaccaggtggcgagggtatgcagttcagcccctctgccagaggccaccatattcttgcctacaactcgtcgcggatatatctgctggacgttcggggccctggattggccgtgaaacgcgagctgaagattctacgtcgccccgccgcagcctgtgtcgtggacgacgggagtttcctggcggtgctatctactgacatgcaagttgatctctatgatctaaacgagacgcccccgcgccgaaaacagtctcttatcctcgataatagcccccgagctattgctctgtctccatgtggaagcgtactggcggcggcttatgaaggaggtatcgaggtccagtcgctaaatcctgctgcccttgcgacggatcgtcgagctgtgaaatgcgatggtgtagatgctcttgctttctcttttgatggcacgcaactattaggcactaccacaagttcgccgactcccaatactgtcatactcactgcgccgtactatgatcccggcaatcaaattgcgaacgatgatattagcgctctttggaccacatctattctttttcctaacactagccgagactgcagccatgcggtgcttttgcaagaatcaaattcaatggaggcaacatggacattcacgtacgatagaagtttcgaaacgtttcgtgcagtgagcatcgacgatcttcgaaacggtacaacatatttcacaggtcctatccctgctgctgcatctccgggcccggtattaccgtgtaccctaccagctgcaaactacaaaggagaactcgtttctgctggatttgaaggcaaacacatctggctctatggagtacctgaagatctggaagccgtgccggaacttcaccatcatgcggattcatctgcgcaacccactcttggtcgcagagccagcgggatatccgttcgatcgccttcacgaagacaggagtccgctgggcgccgtgtacctcaatggcaagtcctttgcgacaagtcacgaaatagcttcattagtgggcgaatgatagctgaattaggtggcgttagcaatgttaaatgggtgtctggctttgggaggtcgtcttgtgaggaaagactgattatagccgcgcgaggcattgtaccacaccgcccaatcaccgaagacgaaggtattgattttgtggatggtggacgaatcaccatactcgattttgattttggccttgagaatgggcaagaaagggagatcactattgaggtaggcactgcggaacctgaggttctcgaagaggagcaccgggacatggaggctgaagtggccattgttcgtaggaggacagtcgcacagcggaggggaaaccggggcggtggtgtcatgcgatctgccacagtgatgaacccgccagctgacccaatgcctcctatgcctcccatgcctcgacaatcacatcctacggatgaggatctggaggacccactgattccacgacgtatgaggactgtccacgacagctaccaagacactgctcccgaggcacaagaggatgtgtcactggaagaggcccaggaagctttagatgctccttacacacatgcgagtccacggtcggggactactttacgtcgagctgccacggccgctgctgcgaaccgccaacgcaatcctcccgcgccagttgctggtcctgtagagtacaggcgcgcagacggtagagcagagcatcctcacgaaagcgatgccgataactgggtgcccccacctcctccatatgtcaaggacgacccgatggttgatctgccttctttcctccgacatactcctatccctggtgctaacatcccgagaagaacacacacggccgcgccagatataccacctgtcccgccactacctgtcacccctcccgttcctccaataccttcaacggcccatatgcatggatcgaaccgacctgaattgcctagaatccgtactgatgccactaccaatgcccttcaacatcacccaaagactgcctatgcctcaatgcgcatggtaagtgacccgggcgcggtccaaggacttattggccaggacacacagagcacacctcagtctggatcgtcaagctcggcacacccgcaaactagagttgcccaagttgatgatgaagacatttatgatgcttcacctgtcggaacgccacagccggcagcccgccggttaccagtagcatcgactcccgatcgaccttctgcaggctcgcaatcatcaaatcgctttcctcatgccactccatccatacctggtgatggggaaagtccgagcccagctcaatcttatgtaccggccttgaacacgccgtcgcctcccagagctcagatcctgcaaccgcaaggaattatcacggagattcccgtcattgggaggctcccgaatgcatcaacctggccaagagcgcctgatgggctgtcagtgccgcaggcatccatcttgaatggatatccccattcggcgcctgtagccaatgtgaataacgatcagatgatcccatcatctttcccacattctgcagaaccagtacaagtcatgggtttgcgcagtcgacagcctagtataggagtttcccaaccgccgcctggtgggttccaagtaccccgcgtgcctgttgggagccggagccgaaatcaggatacgcggcgtctcagctccttaccgcctttacgagcaccttcgccccctgagcagccactcattattagcacgccgacgggcgttgccggggcattcgatggtaatcttactcatgggccggtgttgcacgcaccggtcccgcggcatccccgccccattccgggtcctggtgtgaatcagcctacagctcagagacttgaaaccatgacgggcctgagtatgcgcgaggagccccagatgcagatgaatcatgggatatataacatgcccccaccaataccccagtcttcctacctcagacatcatgcgagtgtcagccggcgaccaagccgcgcgcgtaggggcgcgctgaagaacctgcaggatgcgaggcagagaggctggacggacaggaagaaaaagaaagagcaggagaatgagcagggtggctggacagatatcagaagaccggaggagcaggtacctgtggggaaggagaaggagaggaagtgtgttgttatgtgaaaaagggggatgtatggatatgatggcgctttgcatttgccgttttcttgtatgcgacatatacccatttgctttggatgcatgttcttctcggtcgtttatggctaaaattgtacgaagcccgcaagcaagcaagttgggagcagcggatttggctttttctttgttttgatggggataagaacaagtagggattggatatgatgactgtgatatgaatacactgcttgggttacaaatttgccatggcctgctcgcgtattgtgtggtgtgtattcactcgatcttgtaggtgtgaagagccgctggccagccactttttgaccggccagccgtgagctcacactcattcgccctgatgtgagagttcttgaccgggccttgtataattgtgtctagaagctgtgaggataatacacaccaatgccatgtatatctatcaagagtgtgaca

SEQ ID NO: 39227 - DNA, 759 bp, Muscodor strobelii
  misc_feature: SGI cDNA ID NO. 573643
  misc_feature: Encodes the peptide sequence at SEQ ID NO 39228
atgtcatcccatcgcccctacacgccctccgaaattcacctcgcctacctccgcccagctgtcctccagattctacgcgcccagggctactacgcctcgtcgtccacaacgatcgacactctcaccgagttagctggccagttcatgtacgccatcgcaaagcgcactgcgttgcacgccacagaaaacaatgttatcggccccccgggcacaccagatgttgtagatgtacgcatggctcttgaggaatgcggcgccctgggacagggttctggtcccagacctgcaagacgcaagagtgcagccagcgaagacgaagattgggcaactgaagaagacatgcgcggtgtacaagagttcataagctgggccaaaggacggaagaacgcacgcatccgcaaggttgctggtatcaccgcgcccgctggtgcggtcgtggccggtgcagtggccgaggacggtacggttgaggagaggccgacggattacttggatgctctgaagcgcaaacacaacaagacagaccaagactccaaatacgctggcacacttctcggccgtccaatcgaccatggcgagattcttgttgaaggcggacctgacacgagcctcgcagcctgggcaacaaagatgcacgaatcatcgctacgaccgcccgaaattgagcgtcccgctgacgatggtgacgggtctagaccacccagttccggactcagttcattggcagacgaggatgtagagccgatggactttgactag

SEQ ID NO: 39228 - protein, 252 aa, Muscodor strobelii
  misc_feature: SGI Peptide ID NO. 573643
  misc_feature (9)..(252): NCBI GI: 85111289 Blast Desc: NCU03096 [Neurospora crassa OR74A] gi|28925609|gb|EAA34630.1| conserved [Neurospora crassa OR74A]
  misc_feature (9)..(211): NCBI GI: 212539067 Blast Desc: Bromodomain associated domain protein [Penicillium marneffei ATCC 18224] gi|210069431|gb|EEA23522.1| Bromodomain associated domain protein [Penicillium marneffei ATCC 18224]
  misc_feature (8)..(243): NCBI GI: 46108428 Blast Desc: FG01096.1 [Gibberella zeae PH-1]
  misc_feature (8)..(252): NCBI GI: 171687813 Blast Desc: protein product [Podospora anserina] gi|170943868|emb|CAP69520.1| protein product [Podospora anserina]
  misc_feature (9)..(211): NCBI GI: 242819702 Blast Desc: Bromodomain associated domain protein [Talaromyces stipitatus ATCC 10500] gi|218713836|gb|EED13260.1| Bromodomain associated domain protein [Talaromyces stipitatus ATCC 10500]
  misc_feature (8)..(210): NCBI GI: 256735131 Blast Desc: [Nectria haematococca mpVI 77-13-4]
  misc_feature (10)..(211): NCBI GI: 145250721 Blast Desc: An15g03360 [Aspergillus niger] gi|134082396|emb|CAK42411.1| protein product [Aspergillus niger]
  misc_feature (11)..(211): NCBI GI: 238844945 Blast Desc: bromodomain associated protein [Microsporum canis CBS 113480]
  misc_feature (12)..(233): NCBI GI: 119481845 Blast Desc: bromodomain associated protein [Neosartorya fischeri NRRL 181] gi|119409105|gb|EAW19054.1| bromodomain associated protein [Neosartorya fischeri NRRL 181]
  misc_feature (9)..(219): NCBI GI: 39950972 Blast Desc: MGG_01265 [Magnaporthe grisea 70-15] gi|145020927|gb|EDK05056.1| MGG_01265 [Magnaporthe grisea 70-15]
MSSHRPYTPSEIHLAYLRPAVLQILRAQGYYASSSTTIDTLTELAGQFMYAIAKRTALHATENNVIGPPGTPDVVDVRMALEECGALGQGSGPRPARRKSAASEDEDWATEEDMRGVQEFISWAKGRKNARIRKVAGITAPAGAVVAGAVAEDGTVEERPTDYLDALKRKHNKTDQDSKYAGTLLGRPIDHGEILVEGGPDTSLAAWATKMHESSLRPPEIERPADDGDGSRPPSSGLSSLADEDVEPMDFD

SEQ ID NO: 39229 - DNA, 1995 bp, Muscodor strobelii
  misc_feature: SGI EST ID NO. CUFF.94394.0
  misc_feature: Variant of the nucleotide sequence at SEQ ID NO 39227
cttgatgtgacctgaggattgggcataggacctagaggtgtgacaatagaggaggcatcggtgttggcctaatcgatagcctgagcataaatggcaagtgcactaactagcagatgcgccaggatagttctaaggttagcagcggggcatgcagctgtacctgcctcgcctgccccgtccacagtcaattgtccgttgcctgtcaaccgcgacggcaggcacgattgatattgcattcagacctctttccagaaaagttgttggctcgatgtttgccaggacgacataacagctgcagctgccacgcctctcttggctcactggcgcatcctctctttccaaccaatcttcctgttctgcattgagctttgcgctgcaagtctagctgcagcatcattgttaacgtccttctcccagctcaacttggcagtcctcccctccacccgacacattaccgaccatgtcatcccatcgcccctacacgccctccgaaattcacctcgcctacctccgcccagctgtcctccagattctacgcgcccagggctactacgcctcgtcgtccacaacgatcgacactctcaccgagttagctggccagttcatgtacgccatcgcaaagcgcactgcgttgcacgccacagaaaacaatgttatcggccccccgggcacaccagatgttgtagatgtacgcatggctcttgaggaatgcggcgccctgggacagggttctggtcccagacctgcaagacgcaagagtgcagccagcgaagacgaagattgggcaactgaagaagacatgcgcggtgtacaagagttcataagctgggccaaaggacggaagaacgcacgcatccgcaaggttgctggtatcaccgcgcccgctggtgcggtcgtggccggtgcagtggccgaggacggtacggttgaggagaggccgacggattacttggatgctctgaagcgcaaacacaacaagacagaccaagactccaaatacgctggcacacttctcggccgtccaatcgaccatggcgagattcttgttgaaggcggacctgacacgagcctcgcagcctgggcaacaaagatgcacgaatcatcgctacgaccgcccgaaattgagcgtcccgctgacgatggtgacgggtctagaccacccagttccggactcagttcattggcagacgaggatgtagagccgatggactttgactagttgtcgcaaaaatgccaccttgtctttgacgacatgttttgaagaagaagggcttctagcaaggtggtagcattgttacaagagactaaatgataggaaaagggggaaagaacatagcagcgcactgtcttatgatacccagcacctccttttcctcggtacgaaatcggaggtgcactgcataggccggcgtttttgggtttcgaatctgggttcacaaaaatcgatcggcaaagactataccacaagggtgtttttcggaacatagacattggtcgggaatctttgactgccacttgagtcgtgacggcttaaatcatgcgatccatcgctagatagtcgccaattcactcataccaagattccacatatgattacaattcacacacgcccacctgaatttgttcagtgccggctaagttaatctagtgagcattggaatagtaggtactgggtatgcaagaagtcagctaacagaacgtgaagcagtagtatagagagctatgaaattgctcgtaaaacgcgggcttgatcgagaaacataatttaggacaaggtgatatgtttacaagagttctacaacgctgtttatatcatacttatacccatcacgatgcaatggctcaagtacagttatggcatatgtcgtagaagtccgaagttactgagacatatctgataaagacctcatacatctctctcacgaacagtgctacccagtttttgacatcctagcaatagaccatcctatacatagtcctaaaactcaacttaag

SEQ ID NO: 39230 - DNA, 1581 bp, Muscodor strobelii
  misc_feature: SGI cDNA ID NO. 573644
  misc_feature: Reduced expression when VOC is produced
  misc_feature: Encodes the peptide sequence at SEQ ID NO 39231
atgtcggggtccaacggcaaaccgagcttgaagctcgacacaaacacaaacccgatgcctcctcctgccgctgtctccgccactcccatagacacgcccaaacctatcctcaagatcaacccctcaagacagaattctttcagtggcgacggcacaactacaccatccgagaagaagatcctcaagatcaaagtcaacagtagtcagccacccactcccgctaccgccaccgccgctcgcgccgcgactccaaccatcgtcaagactaaggctggcagaactatgaagcccacagccaagcttgccgagtccaagaagcgcgcctacgaaagcgacgacgaggatgtaccccttgctaccactcgcaccgactctcgcccgccgagcaaggccatcaagctcaggaacatccccccaacacccactgccggcacacctctggttcgcctcaagcctcgaggtgatcctcttccacgcaaacatggcgacgcatacgactccgaagccgaagatcgcgagacagatccctcgcgcgaaagcaatgtcgtcttccgcaccgccgaccccgaagccgcagagtatctcaagaaggccattgccgagggtacaattggaatacccaaggccaacggtggtgcggatttcagcatccaatacttagatagcaaagagcgccgcgccttcgtcaacatcaacggcacttcctatgccgccgtcttggttcaactcccaaccatcaccgaagccatgaagacatgggaccgcaaatctatgatgaagaactctgatatcaccgagatgcttctgtgttttgccaaggttgcgaacgagcaagaggccaagactatcccgctacccgccatggtatcaaagaccgatctgaagtggcctcacggcattacaccaccaatgcacgatgccgcaaatcggcgattccgaaagactctgtctgaacaacagtatgagcgcactcagcgacaggtggagaagctcctcgcagatgatgcggcagcacaagaggtccgcacagaactgatcgtcgatgaggacgaggaagacgatgaagatgccgaaggcgagctagatgaagaagacgactacttcggcaatagtgtgcgacaagacatggatgtcgatgcagaccaagaagatgagaatgaccctgatctcgaggctgagcttgagaaagccttcatgatggaggacgacgacatcgtcgatgcggacacacctggtactcaactagaagcgccgaccccaatgaccatgggcgtgaatacacctatgcctgcccaagaggaagcagtctccgacgaggaggaagacgaggaagaaatatctgatgaagacgatgacgacgacgatgaggatgctgacgatgaggatcgagccaaggaccgagagcgtaaacagcagcttggagaattgaacgatcttcagaagcaactcaaacacgcccaagaaaaccttgaggcaactaccatgcctgtcttgaagaaacgtctcgttgcgagcatcgaaagcatcaagaaggagattgcagtgaagaaggccgctctggacctaacggaggaagaatag

SEQ ID NO: 39231 - protein, 526 aa, Muscodor strobelii
  misc_feature: SGI Peptide ID NO. 573644
  misc_feature (178)..(340): Pfam Id: PF04658 Pfam Desc: TAFII55 protein conserved region
  misc_feature (179)..(340): Pfam Id: PF04658 Pfam Desc: TAFII55 protein conserved region
  misc_feature (37)..(522): NCBI GI: 256734463 Blast Desc: NECHADRAFT_74752 [Nectria haematococca mpVI 77-13-4]
  misc_feature (34)..(522): NCBI GI: 46108240 Blast Desc: FG01002.1 [Gibberella zeae PH-1]
  misc_feature (23)..(435): NCBI GI: 261356306 Blast Desc: transcription initiation factor TFIID subunit 7 [Verticillium albo-atrum VaMs.102]
  misc_feature (67)..(526): NCBI GI: 85111287 Blast Desc: NCU03095 [Neurospora crassa OR74A] gi|28925608|gb|EAA34629.1| [Neurospora crassa OR74A]
  misc_feature (73)..(525): NCBI GI: 171687805 Blast Desc: protein product [Podospora anserina] gi|170943864|emb|CAP69516.1| protein product [Podospora anserina]
  misc_feature (89)..(526): NCBI GI: 156032459 Blast Desc: SS1G_13927 [Sclerotinia sclerotiorum 1980] gi|154699329|gb|EDN99067.1| SS1G_13927 [Sclerotinia sclerotiorum 1980]
  misc_feature (65)..(398): NCBI GI: 116180420 Blast Desc: CHGG_00838 [Chaetomium globosum CBS 148.51] gi|88185135|gb|EAQ92603.1| CHGG_00838 [Chaetomium globosum CBS 148.51]
  misc_feature (89)..(526): NCBI GI: 154296109 Blast Desc: BC1G_12784 [Botryotinia fuckeliana B05.10] gi|150843745|gb|EDN18938.1| BC1G_12784 [Botryotinia fuckeliana B05.10]
  misc_feature (6)..(441): NCBI GI: 39950983 Blast Desc: MGG_01266 [Magnaporthe grisea 70-15] gi|145020926|gb|EDK05055.1| MGG_01266 [Magnaporthe grisea 70-15]
  misc_feature (1)..(520): NCBI GI: 119196041 Blast Desc: CIMG_02395 [Coccidioides immitis RS]
  misc_feature: Useful for introducing or modulating the production of volatile compounds
MSGSNGKPSLKLDTNTNPMPPPAAVSATPIDTPKPILKINPSRQNSFSGDGTTTPSEKKILKIKVNSSQPPTPATATAARAATPTIVKTKAGRTMKPTAKLAESKKRAYESDDEDVPLATTRTDSRPPSKAIKLRNIPPTPTAGTPLVRLKPRGDPLPRKHGDAYDSEAEDRETDPSRESNVVFRTADPEAAEYLKKAIAEGTIGIPKANGGADFSIQYLDSKERRAFVNINGTSYAAVLVQLPTITEAMKTWDRKSMMKNSDITEMLLCFAKVANEQEAKTIPLPAMVSKTDLKWPHGITPPMHDAANRRFRKTLSEQQYERTQRQVEKLLADDAAAQEVRTELIVDEDEEDDEDAEGELDEEDDYFGNSVRQDMDVDADQEDENDPDLEAELEKAFMMEDDDIVDADTPGTQLEAPTPMTMGVNTPMPAQEEAVSDEEEDEEEISDEDDDDDDEDADDEDRAKDRERKQQLGELNDLQKQLKHAQENLEATTMPVLKKRLVASIESIKKEIAVKKAALDLTEEE

SEQ ID NO: 39232 - DNA, 2480 bp, Muscodor strobelii
  misc_feature: SGI EST ID NO. CUFF.94396.0
  misc_feature: Variant of the nucleotide sequence at SEQ ID NO 39230
gcacaagtacacagtacagccacccctccgtctcagcaatcctcccccgttgcatctctccaagttattatatcatttccgaataacttctacacaccaccatagacgagtccatcctcgacacttcgtccacgctgcagcgacgagataacctgattacacaacatccacatcgaagctcgcccccacgcgcatttaggcgcgcaattgtcctgtccgccaaacacctgggatttcaagcgcaagtgactaggcgactgcttcttccttcgcctcgtctcttctcgcaatgtcggggtccaacggcaaaccgagcttgaagctcgacacaaacacaaacccgatgcctcctcctgccgctgtctccgccactcccatagacacgcccaaacctatcctcaagatcaacccctcaagacagaattctttcagtggcgacggcacaactacaccatccgagaagaagatcctcaagatcaaagtcaacagtagtcagccacccactcccgctaccgccaccgccgctcgcgccgcgactccaaccatcgtcaagactaaggctggcagaactatgaagcccacagccaagcttgccgagtccaagaagcgcgcctacgaaagcgacgacgaggatgtaccccttgctaccactcgcaccgactctcgcccgccgagcaaggccatcaagctcaggaacatccccccaacacccactgccggcacacctctggttcgcctcaagcctcgaggtgatcctcttccacgcaaacatggcgacgcatacgactccgaagccgaagatcgcgagacagatccctcgcgcgaaagcaatgtcgtcttccgcaccgccgaccccgaagccgcagagtatctcaagaaggccattgccgagggtacaattggaatacccaaggccaacggtggtgcggatttcagcatccaatacttagatagcaaagagcgccgcgccttcgtcaacatcaacggcacttcctatgccgccgtcttggttcaactcccaaccatcaccgaagccatgaagacatgggaccgcaaatctatgatgaagaactctgatatcaccgagatgcttctgtgttttgccaaggttgcgaacgagcaagaggccaagactatcccgctacccgccatggtatcaaagaccgatctgaagtggcctcacggcattacaccaccaatgcacgatgccgcaaatcggcgattccgaaagactctgtctgaacaacagtatgagcgcactcagcgacaggtggagaagctcctcgcagatgatgcggcagcacaagaggtccgcacagaactgatcgtcgatgaggacgaggaagacgatgaagatgccgaaggcgagctagatgaagaagacgactacttcggcaatagtgtgcgacaagacatggatgtcgatgcagaccaagaagatgagaatgaccctgatctcgaggctgagcttgagaaagccttcatgatggaggacgacgacatcgtcgatgcggacacacctggtactcaactagaagcgccgaccccaatgaccatgggcgtgaatacacctatgcctgcccaagaggaagcagtctccgacgaggaggaagacgaggaagaaatatctgatgaagacgatgacgacgacgatgaggatgctgacgatgaggatcgagccaaggaccgagagcgtaaacagcagcttggagaattgaacgatcttcagaagcaactcaaacacgcccaagaaaaccttgaggcaactaccatgcctgtcttgaagaaacgtctcgttgcgagcatcgaaagcatcaagaaggagattgcagtgaagaaggccgctctggacctaacggaggaagaataggaacttcatctggcgctggaaaagaaggctgaagctgtcaggaacatgaataactcgcgaagtcatcaatggttgaaattcaaggagcaagttcaaaacttggacgtgatgatcgaagacatccaggcgagaatccaacttcgcaaacagagagatccttcccctagtgtgcgatcagctggctccatggggtctctgtttgatgcagagggcgatggtgacgagaccaatgatacctcattcgagtcaagtcaacatccccagatcaacaacacaaccggtacaatggcagctgaggaagaagaatcgtcggatgaaagtgaggaagacgagcccgtcagctttgagccgggtctgttcgcacctgtagcaagctttgggagatcgcgatagggagatgagctttggtacttgcgttacggaacactgttcactggaatctctctatttgttcgtgaggttctgtttggaacgatggtcagtatcgatcatgtccacggttcaatgaggctgagagagaaaggaatggcgttacatggttatagcgataccccctggctgcacaatatgatatttttgctagagcgttatacttaattgattactttcc

SEQ ID NO: 39233 - DNA, 609 bp, Muscodor strobelii
  misc_feature: SGI cDNA ID NO. 573645
  misc_feature: Reduced expression when VOC is produced
  misc_feature: Encodes the peptide sequence at SEQ ID NO 39234
atgatctgcaggcggtgtcttcagcgcgcatcgtcgcttcgcgcgcctctcaccacaacgcccaaatctctcagtctccccatacgccgaaccatctcctccacgacgccagtgcaagagcccgctgcagcgccctcatcaaatccaacctcgacaccaccaccagccgcagagtccaaatccatctcctcctgtcccgaaggcacgatcctcaaaggcctgaactacttcaaaaacaaaatcgaccccgtcgcactcgccgacgatgcctaccccccgtggctgtggaagtgtctcgacgttcagaagaagatagacgacgagggcgaagcagacgccggtgatgaattctccaaatccaaaaagcagcgccgtctcgcagcaaagcgccagcgcctctacgaagcccgcctcatcgccgaaggcaacctcgaggctctcgcgcccaagatccccctccaacaccagtccatcaacctccccgccaacgaagagaacaccaccgaaggagctctgaagtctatcgaggcgcgtcaggagttgacccgtgctatgcgccgcgagcgcaaggctaagattaaggagagcaactacttgaagtctatgtag

SEQ ID NO: 39234 - protein, 202 aa, Muscodor strobelii
  misc_feature: SGI Peptide ID NO. 573645
  misc_feature (19)..(202): Pfam Id: PF08561 Pfam Desc: Mitochondrial ribosomal protein L37
  misc_feature (1)..(202): NCBI GI: 116180418 Blast Desc: CHGG_00837 [Chaetomium globosum CBS 148.51] gi|88185134|gb|EAQ92602.1| CHGG_00837 [Chaetomium globosum CBS 148.51]
  misc_feature (1)..(202): NCBI GI: 256734465 Blast Desc: NECHADRAFT_73374 [Nectria haematococca mpVI 77-13-4]
  misc_feature (1)..(202): NCBI GI: 145613912 Blast Desc: MGG_11244 [Magnaporthe grisea 70-15] gi|145020925|gb|EDK05054.1| MGG_11244 [Magnaporthe grisea 70-15]
  misc_feature (1)..(202): NCBI GI: 171687815 Blast Desc: protein product [Podospora anserina] gi|170943869|emb|CAP69521.1| protein product [Podospora anserina]
  misc_feature (1)..(202): NCBI GI: 46108230 Blast Desc: FG00997.1 [Gibberella zeae PH-1]
  misc_feature (61)..(202): NCBI GI: 164427306 Blast Desc: NCU03094 [Neurospora crassa OR74A] gi|157071688|gb|EAA34628.2| conserved [Neurospora crassa OR74A]
  misc_feature (1)..(202): NCBI GI: 156032457 Blast Desc: SS1G_13926 [Sclerotinia sclerotiorum 1980] gi|154699328|gb|EDN99066.1| SS1G_13926 [Sclerotinia sclerotiorum 1980]
  misc_feature (1)..(202): NCBI GI: 261356307 Blast Desc: conserved [Verticillium albo-atrum VaMs.102]
  misc_feature (1)..(202): NCBI GI: 189203533 Blast Desc: conserved [Pyrenophora tritici-repentis Pt-1C-BFP] gi|187985201|gb|EDU50689.1| conserved [Pyrenophora tritici-repentis Pt-1C-BFP]
  misc_feature (1)..(202): NCBI GI: 169603253 Blast Desc: SNOG_04634 [Phaeosphaeria nodorum SN15] gi|111067274|gb|EAT88394.1| SNOG_04634 [Phaeosphaeria nodorum SN15]
  misc_feature: Useful for introducing or modulating the production of volatile compounds
MICRRCLQRASSLRAPLTTTPKSLSLPIRRTISSTTPVQEPAAAPSSNPTSTPPPAAESKSISSCPEGTILKGLNYFKNKIDPVALADDAYPPWLWKCLDVQKKIDDEGEADAGDEFSKSKKQRRLAAKRQRLYEARLIAEGNLEALAPKIPLQHQSINLPANEENTTEGALKSIEARQELTRAMRRERKAKIKESNYLKSM

SEQ ID NO: 39235 - DNA, 967 bp, Muscodor strobelii
  misc_feature: SGI EST ID NO. CUFF.94400.0
  misc_feature: Variant of the nucleotide sequence at SEQ ID NO 39233
tgggacctcaccagtacttcacgacccttcagtatcatactctcaaaagaagagacctcccggcattgcaacaaatttcgccgggacaacacaactacgaaatcatgatctgcaggcggtgtcttcagcgcgcatcgtcgcttcgcgcgcctctcaccacaacgcccaaatctctcagtctccccatacgccgaaccatctcctccacgacgccagtgcaagagcccgctgcagcgccctcatcaaatccaacctcgacaccaccaccagccgcagagtccaaatccatctcctcctgtcccgaaggcacgatcctcaaaggcctgaactacttcaaaaacaaaatcgaccccgtcgcactcgccgacgatgcctaccccccgtggctgtggaagtgtctcgacgttcagaagaagatagacgacgagggcgaagcagacgccggtgatgaattctccaaatccaaaaagcagcgccgtctcgcagcaaagcgccagcgcctctacgaagcccgcctcatcgccgaaggcaacctcgaggctctcgcgcccaagatccccctccaacaccagtccatcaacctccccgccaacgaagagaacaccaccgaaggagctctgaagtctatcgaggcgcgtcaggagttgacccgtgctatgcgccgcgagcgcaaggctaagattaaggagagcaactacttgaagtctatgtagactatgttcaaagtgtgtgctctgagatgggtccgatttgtatgtgggtgtgtatctggatgtgtataaaatgatcgacataggtggtggttagtgatgagacggacgagtagaaactcgtggtatatcattgtataaatatggccaattcggcattcgtctaactcacagttcagccgaagcttagatctactgagggtgctcttatgagctgtataaaccaaatttatttatatcgcaattattgactgaac

SEQ ID NO: 39236 - DNA, 309 bp, Muscodor strobelii
  misc_feature: SGI cDNA ID NO. 573646
  misc_feature: Encodes the peptide sequence at SEQ ID NO 39237
atgccgacgcccgagtctgccgccttcttggccaagaagcccaccgttcctcccaccttcgagggtgttgacttcgacgacaccaagcgcctcaagcaggcccaagatgccgtcattcgcgaacaatggatacaggtcatgatgggccgattggtgcgcgaggagctgagcaaatgctactaccgcgagggtgtcaaccacctggagaagtgcggtcacttaagagagagataccttcagctgctcaaagaccaccgggtccggggctatctgttcgagcaacagaactacatcgatggaaagaaatag

SEQ ID NO: 39237 - protein, 102 aa, Muscodor strobelii
  misc_feature: SGI Peptide ID NO. 573646
  misc_feature (1)..(98): NCBI GI: 85111283 Blast Desc: NADH:ubiquinone oxidoreductase 12.3kD subunit [Neurospora crassa OR74A] gi|62297731|sp|Q03015.2|NDUS6_NEUCR RecName: Full=NADH-ubiquinone oxidoreductase 12 kDa subunit,
  misc_feature (1)..(98): NCBI GI: 3040 Blast Desc: NUO-12.3 [Neurospora crassa]
  misc_feature (1)..(99): NCBI GI: 39950993 Blast Desc: MGG_01267 [Magnaporthe grisea 70-15] gi|145020924|gb|EDK05053.1| MGG_01267 [Magnaporthe grisea 70-15]
  misc_feature (1)..(99): NCBI GI: 68137987 Blast Desc: mitochondrial NADH-ubiquinone oxidoreductase 12 kDa subunit precursor [Chaetomium globosum]
  misc_feature (1)..(98): NCBI GI: 171687817 Blast Desc: protein product [Podospora anserina] gi|170943870|emb|CAP69522.1| protein product [Podospora anserina]
  misc_feature (2)..(98): NCBI GI: 156032455 Blast Desc: SS1G_13925 [Sclerotinia sclerotiorum 1980] gi|154699327|gb|EDN99065.1| SS1G_13925 [Sclerotinia sclerotiorum 1980]
  misc_feature (2)..(99): NCBI GI: 154296107 Blast Desc: BC1G_12783 [Botryotinia fuckeliana B05.10] gi|150843744|gb|EDN18937.1| BC1G_12783 [Botryotinia fuckeliana B05.10]
  misc_feature (1)..(99): NCBI GI: 116180416 Blast Desc: CHGG_00836 [Chaetomium globosum CBS 148.51] gi|88185133|gb|EAQ92601.1| CHGG_00836 [Chaetomium globosum CBS 148.51]
  misc_feature (1)..(99): NCBI GI: 189203999 Blast Desc: NADH-ubiquinone oxidoreductase 12 kDa subunit, mitochondrial precursor [Pyrenophora tritici-repentis Pt-1C-BFP] gi|187985434|gb|EDU50922.1| NADH-ubiquinone oxidoreductase 12 kDa
  misc_feature (1)..(99): NCBI GI: 169602757 Blast Desc: SNOG_04381 [Phaeosphaeria nodorum SN15] gi|111067021|gb|EAT88141.1| SNOG_04381 [Phaeosphaeria nodorum SN15]
MPTPESAAFLAKKPTVPPTFEGVDFDDTKRLKQAQDAVIREQWIQVMMGRLVREELSKCYYREGVNHLEKCGHLRERYLQLLKDHRVRGYLFEQQNYIDGKK

SEQ ID NO: 39238 - DNA, 761 bp, Muscodor strobelii
  misc_feature: SGI EST ID NO. CUFF.94535.0
  misc_feature: Variant of the nucleotide sequence at SEQ ID NO 39236
gcgagagctcccgcgccaattgacgtatcaagtgctgctgttcgaggtgaacgacagtcaccttctcccaacgacgactccccgatctgagtacgaatccccgaaatcacagttaccggccacggagtattggaactcacattgtctcgcacaggcacagtcgttctgctcgccatgccgacgcccgagtctgccgccttcttggccaagaagcccaccgttcctcccaccttcgagggtgttgacttcgacgacaccaagcgcctcaagcaggcccaagatgccgtcattcgcgaacaatggatacaggtcatgatgggccgattggtgcgcgaggagctgagcaaatgctactaccgcgagggtgtcaaccacctggagaagtgcggtcacttaagagagagataccttcagctgctcaaagaccaccgggtccggggctatctgttcgagcaacagaactacatcgatggaaagaaatagacagactaggtgttgctgtcaccgcatttcatgcgaagttgaccgtatttacgagtcaatggtggtctgagagatgcgagggagcaaggaagggaacgggcgtcggaatgactcttgtaccttttactatacctaaatgcctacaaatttgtgctccaaaaagtgagactatgcaaagcaatacatttcctcctaccaatatgcaatcaaataaaggcaaagggaactgcagtatagtgtccttcggattacaatgctggcaggatgttcaattcgac

SEQ ID NO: 39239 - DNA, 231 bp, Muscodor strobelii
  misc_feature: SGI cDNA ID NO. 573647
  misc_feature: Encodes the peptide sequence at SEQ ID NO 39240
atgaccaaaactacttcttactcctcctcgacacgagctgttgatgggtcgcatgacggccgcacctatcaatcatcttcggctggaacggcgcgagactcgcctgacagtcatcgcaaatcgaagaagtcgaaaaagtcaaagaaagcctccgcaaagagatctaaagcagagcaagaggcagatcttatcggtattggtgcccaattctacgatcatgggtccaagtag

SEQ ID NO: 39240 - protein, 76 aa, Muscodor strobelii
  misc_feature: SGI Peptide ID NO. 573647
MTKTTSYSSSTRAVDGSHDGRTYQSSSAGTARDSPDSHRKSKKSKKSKKASAKRSKAEQEADLIGIGAQFYDHGSK

SEQ ID NO: 39241 - DNA, 1360 bp, Muscodor strobelii
  misc_feature: SGI EST ID NO. CUFF.94417.0
  misc_feature: Variant of the nucleotide sequence at SEQ ID NO 39239
gtcaatcctgcctctatgcaagattcagctcaagcatccgcaagagggaagggcaactcaccgcaattggttatctccagaaccagacaaagccacagcggctcgtgtcgacatgtccctgcaggatatagatagctctgtcaggcaaccaccagggtccggtacaagagacttctgaacttcaccgacgagtcgacaccagtcattggctgtcgccagaaccataattcgcgttgtcgtcaacattaagactaccttacctgcctccatcatacgccgaaacgggatcacgagcggcgatgccctaataccctggtcatgaagttttcggcaatttttggtttcaccatcgcggaaggccgactacgtggcttcccaagatgactccattcggtgccggtccttgtgatagacgtcacaacttgctagtgtttttattggaccgtaccagaaccagactgcaactgagaggcagcaagccaaggctgagaaggcattgtgttgctcaatatcatcatgacgagaaaatattccggaatgcagaagtcaggctcattataaatatggtcatccggtcccgtatgtcctcgccagtcttgaggtgcggcagaacaacacaagactacgatcaatagacgatcacccagactcgaaattcttcaaatcttgacaagatgaccaaaactacttcttactcctcctcgacacgagctgttgatgggtcgcatgacggccgcacctatcaatcatcttcggctggaacggcgcgagactcgcctgacagtcatcgcaaatcgaagaagtcgaaaaagtcaaagaaagcctccgcaaagagatctaaagcagagcaagaggcagatcttatcggtattggtgcccaattctacgatcatgggtccaagtagccatctttgacctgctgcgtcacaatccacgcagattcatgatatctgatagttgtgttttttttttttcttgagggttttcaactgttatagccgtcatgtaatgtctctcttggcagcccaggggtcgcaagttggtcaaatatgaaaggggcgctggatcacgtcggtatggtagttacaattagaaatgctgttatcttagatcatatatttctgttttgcgttacaatgttacttggtagtgtctcaagttcattccgatgtttatcctcatatctacgctatcatgatcgttggaagcgaccagccgtgcgttgcttacacgactcaatcgtcaacactttatcggctcacttatactatcatgagatacatcccttcagtagcgccggattgtacaaatgtctgtccagtttttgtagcaccttaaccttatgagttcgatttaattg

SEQ ID NO: 39242 - DNA, 1737 bp, Muscodor strobelii
  misc_feature: SGI cDNA ID NO. 573648
  misc_feature: Encodes the peptide sequence at SEQ ID NO 39243
atgcatctcctcaagacagacacgatcaagcttatccctcaaaatcccaacaagcctcatgaatatgccatcttctctcacacatgggaagacgacgaggttctctttgaagatttcgagaaaggcgttccggacataaaactcgcttataaaaaagttgaatcggcctgtcgcgaggctagaagaaatgggtacgattatatttggattgataactgttgcatagacagaagaagtagtgccgagttgagtgaggcgattaattcgatgtatgtctggtacgagaaggcggagatttgtttcgcatacttgtccgatgttgacaaaaacgaagacataaacatcgacagcctagcgttccaaagtgacctgcaagggtcaaggtggttcacgagggggtggacgctacaagagttgctcgcttctcgcgatatatacttttacggaaaagactggaaatttctcggcaccaaatggcccctccgtggacaattgtccaatataacagggattgacatggatatattggaagactcacgaatacttaagcgggctagtatcgcgaaaagaatgtcctgggctgccacgagggtgaccacacgacccgaggacgtcgcgtattgtctcatgggtctattcggagtgaacatgcctatgttatatggtgaagggcaagtaaaagcatactggcgtctccaagaagaaatcatgaagcaatcggatgaccaatccctcttcgcgtggacgcaaagtgatgcacctgactttcaaaaacacggtctgctagctgatcatccatctgccttcatcaagtgccggcacatcatgccatacgaagactacaaaccccgtccgccatttcacatgactaaccgaggtttgagcatcgaacttcacttatcccgcgttagcgaagatgcctgggttgccgcccttgattgcccagtgccacctgactatccagactccaaatttctcgcgatctacttggaaaggctctccgctgccaccggtcaatttgcccgaacacgcgttagtcgtttggcacaaactagcgacctaggtacgctacaaactatctacgtgcgacaagcaccagaagattctatcgatgaccggcggccattgcctcgccacattttccagcttcgtagcgtgccggatcgagcccggtttgacatcacatctgtcgttgttgccgcccaagataaggaatcatccgggccgccgcgcctcacttcatctcgcatcgatccgaagagcggtcagctgccgacacgcacgacgttcagcatcgcgcgggccgcgtaccagctgacggtcgccttcatttttgagcacgtagcagacggccaaaagatagtagttatgctcggctctctggcggacttccgcgttgggtacgctgcagccgaactggctgacttcagaattaagcaggggttcttcaagagcttctcatcggagtttccgcaaatcgttcgggacccggaacaatatgcggccattgagctgccagagtttactgtcagagtcaagatggatgttgtcgtctcggacgcgagcaagtactacatggtagatatcgacgtggtgtatacaggctcggaattggaaatattaagtgcgttggacgatttgagtgtcaatgagggccgaacgggcgtgcttaatgcgggtcaacattcgatttggtcgaagataagagtgaaaacaaaagagacaaaaaagcaataa

SEQ ID NO: 39243 - protein, 578 aa, Muscodor strobelii
  misc_feature: SGI Peptide ID NO. 573648
  misc_feature (22)..(138): Pfam Id: PF06985 Pfam Desc: Heterokaryon incompatibility protein (HET)
  misc_feature (1)..(475): NCBI GI: 238493477 Blast Desc: conserved [Aspergillus flavus NRRL3357] gi|220696469|gb|EED52811.1| conserved [Aspergillus flavus NRRL3357]
  misc_feature (9)..(302): NCBI GI: 256722427 Blast Desc: NECHADRAFT_35001 [Nectria haematococca mpVI 77-13-4]
  misc_feature (1)..(364): NCBI GI: 256720984 Blast Desc: NECHADRAFT_82249 [Nectria haematococca mpVI 77-13-4]
  misc_feature (1)..(396): NCBI GI: 121715886 Blast Desc: HET domain protein [Aspergillus clavatus NRRL 1] gi|119403709|gb|EAW14126.1| HET domain protein [Aspergillus clavatus NRRL 1]
  misc_feature (22)..(396): NCBI GI: 119481395 Blast Desc: HET domain protein [Neosartorya fischeri NRRL 181] gi|119408880|gb|EAW18829.1| HET domain protein [Neosartorya fischeri NRRL 181]
  misc_feature (1)..(358): NCBI GI: 145257695 Blast Desc: An04g04570 [Aspergillus niger] gi|134058737|emb|CAK38721.1| protein product [Aspergillus niger]
  misc_feature (1)..(375): NCBI GI: 46139867 Blast Desc: FG11448.1 [Gibberella zeae PH-1]
  misc_feature (16)..(349): NCBI GI: 145246214 Blast Desc: An12g02770 [Aspergillus niger] gi|134080070|emb|CAK41116.1| protein product [Aspergillus niger]
  misc_feature (1)..(389): NCBI GI: 256720502 Blast Desc: NECHADRAFT_55867 [Nectria haematococca mpVI 77-13-4]
  misc_feature (6)..(396): NCBI GI: 71001840 Blast Desc: HET domain protein [Aspergillus fumigatus Af293] gi|66853239|gb|EAL93563.1| HET domain protein [Aspergillus fumigatus Af293] gi|159129660|gb|EDP54774.1| HET domain protein
MHLLKTDTIKLIPQNPNKPHEYAIFSHTWEDDEVLFEDFEKGVPDIKLAYKKVESACREARRNGYDYIWIDNCCIDRRSSAELSEAINSMYVWYEKAEICFAYLSDVDKNEDINIDSLAFQSDLQGSRWFTRGWTLQELLASRDIYFYGKDWKFLGTKWPLRGQLSNITGIDMDILEDSRILKRASIAKRMSWAATRVTTRPEDVAYCLMGLFGVNMPMLYGEGQVKAYWRLQEEIMKQSDDQSLFAWTQSDAPDFQKHGLLADHPSAFIKCRHIMPYEDYKPRPPFHMTNRGLSIELHLSRVSEDAWVAALDCPVPPDYPDSKFLAIYLERLSAATGQFARTRVSRLAQTSDLGTLQTIYVRQAPEDSIDDRRPLPRHIFQLRSVPDRARFDITSVVVAAQDKESSGPPRLTSSRIDPKSGQLPTRTTFSIARAAYQLTVAFIFEHVADGQKIVVMLGSLADFRVGYAAAELADFRIKQGFFKSFSSEFPQIVRDPEQYAAIELPEFTVRVKMDVVVSDASKYYMVDIDVVYTGSELEILSALDDLSVNEGRTGVLNAGQHSIWSKIRVKTKETKKQ

SEQ ID NO: 39244 - DNA, 329 bp, Muscodor strobelii
  misc_feature: SGI EST ID NO. CUFF.94440.0
  misc_feature: Variant of the nucleotide sequence at SEQ ID NO 39242
tgtatgtctggtacgagaaggcggagatttgtttcgcatacttgtccgatgttgacaaaaacgaagacataaacatcgacagcctagcgttccaaagtgacctgcaagggtcaaggtggttcacgagggggtggacgctacaagagttgctcgcttctcgcgatatatacttttacggaaaagactggaaatttctcggcaccaaatggcccctccgtggacaattgtccaatataacagggattgacatggatatattggaagactcacgaatacttaagcgggctagtatcgcgaaaagaatgtcctgggctgccacgagggtgacc

SEQ ID NO: 39245 - DNA, 1845 bp, Muscodor strobelii
  misc_feature: SGI cDNA ID NO. 573649
  misc_feature: Reduced expression when VOC is produced
  misc_feature: Encodes the peptide sequence at SEQ ID NO 39246
atgtggaaagctggctgccatggccgggctctcgtcactccggcccgccacacgcgcgccgtagcccgccgctctctgctgttgcctttgacggcagtccggcataggggtggtgccgcccgcccagcttacaagagagaaggcaaccagcgcctcggcttcggctcgtgggagtctctgcagactctgtggcccatggccgagcagcttgagaagacgggtctgtggaagcccaggagggtgaagggcgggcccaagggcgacaggcaccgcatcaacatcgtcagcgacgaccttgtcaaggacatcatctcgtacgtcggcccgactctcgaccgccaccgcggctgcgacctgctcgacctctaccccggcgccggcgtctggagcaccgccctgcacgaccacctccagccgcgctcccacatcctcctcgagcccgaggccgacttctaccgcccctacctgcagcccctgctcgccgccccggcgtctcgctcgtgccccgctccggcatcgtctggaacgacctcaacgaagtcctgtccccccgaacacctcccccaccagacgcccctcggccccgaccagccctacgccgccaacgacaccctgctcgtcaccgccatcgtcgccacccagcccaagcgctccttcggcaacttcgacagccgctacggccgcgtccgcatgctgctctgggtccgcaacgacgaccacgggcccttcctgcccaagctcatggcccggcgccgccgccaggccatcctcaacgagctgctgtgcgaccacgtcgtcgaggtctgcggcagcgacgacgtcaagacctccgccttcagccgcgacgccaccatcgacgacgcctccgcctacgacaccgccaagcgcatgcaggccgccggcatcatcctgcccccgggccggttcccagacggcttccatcgcatctgggctgctgccgagaagggccgccgccgcccacccgccggggatgtgccctcgcgcatcgagagagcatttcatcaggaaatcaaagacatggagtcggcccgtgcggcggcctcgcaagtggctgaacaaggcgaggccgctcctcccgaccaggccaccgatcttgctgagaaaaacgcgctggatattttgaagtggagagtcaccacagtaacgaagaagtacgataacatgtttaagcttaggaagagcatggaggacatcgtggcccgcatcatgaagggcgaggaccacgacatggccaaacgcaaagaggcatgggccaagcaatacgatgcgctaacccaaacagccaagggagactggctcggatacaatgaagaattgcacctgttccagcagaacccaccagtgctgcattacgaccgacgtccctatgagcggctgcagacccagccaagtgaattcttccccaacgttcccctgagcctgctggatatccagcctacagatccccatccggccttttctctggctggtgctgggtcgaggcgcgctggcgactggctcgacctcctcatcaccggcatgatgcatgtccccaaggcgcccatcgaggagaacgtgagaaaccagtggatgggagccgaagattatatcgtgccccgatggacgagcctctacgatcttgagaacggcggtttcattaaggacctcccccacgccggtgggtccataaggtctttgaaccgtcgccagtgggagcagctcctagaactttggctgcaatggccgttccaccccgagcttcgtgaatacattggccgcatgtatcatgacgacgacattgaatccgatgaatttgtcgagaagagaatctatgaagagttctga

SEQ ID NO: 39246 - protein, 614 aa, Muscodor strobelii
  misc_feature: SGI Peptide ID NO. 573649
  misc_feature (66)..(604): NCBI GI: 116179470 Blast Desc: CHGG_00363 [Chaetomium globosum CBS 148.51] gi|88184660|gb|EAQ92128.1| CHGG_00363 [Chaetomium globosum CBS 148.51]
  misc_feature (60)..(597): NCBI GI: 261354704 Blast Desc: conserved [Verticillium albo-atrum VaMs.102]
  misc_feature (65)..(607): NCBI GI: 85093756 Blast Desc: NCU02332 [Neurospora crassa OR74A] gi|28921210|gb|EAA30522.1| [Neurospora crassa OR74A]
  misc_feature (65)..(594): NCBI GI: 256728846 Blast Desc: NECHADRAFT_60662 [Nectria haematococca mpVI 77-13-4]
  misc_feature (66)..(594): NCBI GI: 46138901 Blast Desc: FG10965.1 [Gibberella zeae PH-1]
  misc_feature (87)..(563): NCBI GI: 145615792 Blast Desc: MGG_14310 [Magnaporthe grisea 70-15] gi|145022936|gb|EDK06631.1| MGG_14310 [Magnaporthe grisea 70-15]
  misc_feature (73)..(603): NCBI GI: 171681463 Blast Desc: protein product [Podospora anserina] gi|170940690|emb|CAP65918.1| protein product [Podospora anserina]
  misc_feature (83)..(563): NCBI GI: 156042968 Blast Desc: SS1G_11283 [Sclerotinia sclerotiorum 1980] gi|154695668|gb|EDN95406.1| SS1G_11283 [Sclerotinia sclerotiorum 1980]
  misc_feature (91)..(583): NCBI GI: 189200707 Blast Desc: [Pyrenophora tritici-repentis Pt-1C-BFP] gi|187983789|gb|EDU49277.1| [Pyrenophora tritici-repentis Pt-1C-BFP]
  misc_feature (83)..(493): NCBI GI: 258564242 Blast Desc: [Uncinocarpus reesii 1704] gi|237908373|gb|EEP82774.1| [Uncinocarpus reesii 1704]
  misc_feature: Useful for introducing or modulating the production of volatile compounds
MWKAGCHGRALVTPARHTRAVARRSLLLPLTAVRHRGGAARPAYKREGNQRLGFGSWESLQTLWPMAEQLEKTGLWKPRRVKGGPKGDRHRINIVSDDLVKDIISYVGPTLDRHRGCDLLDLYPGAGVWSTALHDHLQPRSHILLEPEADFYRPYLQPLLAAPASRSCPAPASSGTTSTKSCPPEHLPHQTPLGPDQPYAANDTLLVTAIVATQPKRSFGNFDSRYGRVRMLLWVRNDDHGPFLPKLMARRRRQAILNELLCDHVVEVCGSDDVKTSAFSRDATIDDASAYDTAKRMQAAGIILPPGRFPDGFHRIWAAAEKGRRRPPAGDVPSRIERAFHQEIKDMESARAAASQVAEQGEAAPPDQATDLAEKNALDILKWRVTTVTKKYDNMFKLRKSMEDIVARIMKGEDHDMAKRKEAWAKQYDALTQTAKGDWLGYNEELHLFQQNPPVLHYDRRPYERLQTQPSEFFPNVPLSLLDIQPTDPHPAFSLAGAGSRRAGDWLDLLITGMMHVPKAPIEENVRNQWMGAEDYIVPRWTSLYDLENGGFIKDLPHAGGSIRSLNRRQWEQLLELWLQWPFHPELREYIGRMYHDDDIESDEFVEKRIYEEF

SEQ ID NO: 39247 - DNA, 1062 bp, Muscodor strobelii
  misc_feature: SGI cDNA ID NO. 573650
  misc_feature: Encodes the peptide sequence at SEQ ID NO 39248
atgactacctcgatagttgacctttgcgagatcgcgcccgtagaaccacctgatggagtctataatttcgcacatccgagagagacctttacaccgcttgttctatcactaggaattcttctgttgatactttcaaccattctcacggccgggaggctctaccagaaccggcgaagacttcgagtctcggactatattgtatggacagcgtggtttttcaacattggatttacagttgacattcttctccaagccaactatggtcgccatctctgggacatacccgtatgctggtatacgacctcatactttcaaatcctctttgtccaggcttttctcttcgcaccagcatacttcttctccagggcgtcgatactcttcctctatcgagaactcttcggaacgataaggagcacacgaattgcaattgatgttggccttgtcgcttcgttcctcatttacatcccgaacatcgcgctttctgcgatttttgaggcccctagtgccggtcgagcatggtcatcgcttctgacggatcgaaagtcgaataaacttacaatattcggccttgtccagagcagcgtcacgattttcttagacgtttacatctttgtaggtcttgtggcaagtatagcgtctcttattcttcgtgttcagctcaacaccccgacggacgtctcgtgggtccaaataaaagttgcactcctctcctttgtggagaccaatttggcaattatcattagttgtgtaccggtgtgtgcccagctgatcaaagtacacatcggcgacggcctgggttggttctgccgattgtcaggtcggagtagacacacaacacctgtggccgggtccgacgaaagtaacccgaagatagtcaccttcggaggagcaccaatccggcaatggcagaactattatgagatgactgactcgggtggtattgaaactcaggtcactgctgaggatgagggttaccaaggtgcggggaagggtcaagagggaatcgttcgtcagactggatttcaccaacaaagttcaagcctgacatccaacacagcatag

SEQ ID NO: 39248 - protein, 353 aa, Muscodor strobelii
  misc_feature: SGI Peptide ID NO. 573650
  misc_feature (7)..(323): NCBI GI: 242764997 Blast Desc: conserved [Talaromyces stipitatus ATCC 10500] gi|218724081|gb|EED23498.1| conserved [Talaromyces stipitatus ATCC 10500]
  misc_feature (6)..(322): NCBI GI: 212538419 Blast Desc: PMAA_097870 [Penicillium marneffei ATCC 18224] gi|210069107|gb|EEA23198.1| PMAA_097870 [Penicillium marneffei ATCC 18224]
  misc_feature (7)..(323): NCBI GI: 242764820 Blast Desc: TSTA_068860 [Talaromyces stipitatus ATCC 10500] gi|218724045|gb|EED23462.1| TSTA_068860 [Talaromyces stipitatus ATCC 10500]
  misc_feature (7)..(261): NCBI GI: 119481749 Blast Desc: NFIA_089630 [Neosartorya fischeri NRRL 181] gi|119409057|gb|EAW19006.1| conserved [Neosartorya fischeri NRRL 181]
  misc_feature (7)..(261): NCBI GI: 71002194 Blast Desc: AFUA_2G14450 [Aspergillus fumigatus Af293] gi|66853416|gb|EAL93740.1| AFUA_2G14450 [Aspergillus fumigatus Af293] gi|159129833|gb|EDP54947.1| AFUB_030070 [Aspergillus
  misc_feature (13)..(287): NCBI GI: 238840889 Blast Desc: conserved [Microsporum canis CBS 113480]
  misc_feature (60)..(263): NCBI GI: 238845707 Blast Desc: conserved [Microsporum canis CBS 113480]
  misc_feature (5)..(352): NCBI GI: 238842461 Blast Desc: conserved [Microsporum canis CBS 113480]
  misc_feature (7)..(251): NCBI GI: 169612652 Blast Desc: SNOG_09450 [Phaeosphaeria nodorum SN15] gi|111061595|gb|EAT82715.1| SNOG_09450 [Phaeosphaeria nodorum SN15]
  misc_feature (22)..(343): NCBI GI: 154284936 Blast Desc: [Ajellomyces capsulatus NAm1] gi|150406904|gb|EDN02445.1| [Ajellomyces capsulatus NAm1]
MTTSIVDLCEIAPVEPPDGVYNFAHPRETFTPLVLSLGILLLILSTILTAGRLYQNRRRLRVSDYIVWTAWFFNIGFTVDILLQANYGRHLWDIPVCWYTTSYFQILFVQAFLFAPAYFFSRASILFLYRELFGTIRSTRIAIDVGLVASFLIYIPNIALSAIFEAPSAGRAWSSLLTDRKSNKLTIFGLVQSSVTIFLDVYIFVGLVASIASLILRVQLNTPTDVSWVQIKVALLSFVETNLAIIISCVPVCAQLIKVHIGDGLGWFCRLSGRSRHTTPVAGSDESNPKIVTFGGAPIRQWQNYYEMTDSGGIETQVTAEDEGYQGAGKGQEGIVRQTGFHQQSSSLTSNTA

SEQ ID NO: 39249 - DNA, 335 bp, Muscodor strobelii
  misc_feature: SGI EST ID NO. CUFF.94470.0
  misc_feature: Variant of the nucleotide sequence at SEQ ID NO 39247
agatattgtatggacagcgtggtttttcaacattggatttacagttgacattcttctccaagccaactatggtcgccatctctgggacatacccgtatgctggtatacgacctcatactttcaaatcctctttgtccaggcttttctcttcgcaccagcatacttcttctccagggcgtcgatactcttcctctatcgagaactcttcggaacgataaggagcacacgaattgcaattgatgttggccttgtcgcttcgttcctcatttacatcccgaacatcgcgctttctgcgatttttgaggcccctagtgccggtcgagcatggtcatcgc

SEQ ID NO: 39250 - DNA, 1443 bp, Muscodor strobelii
  misc_feature: SGI cDNA ID NO. 573651
  misc_feature: Elevated expression when VOC is produced
  misc_feature: Encodes the peptide sequence at SEQ ID NO 39251
atgtcgtccaagagctcaattgtacgcacatgttgtcaatcattggtcaccctgctgggaccggaaaaggttgcattctccggaagcaatgcttacaatgcctctgtatcgtcctatttcaccaaccaagcggtgaccccgccaccactctgcgtagcattaccatctactacagctgaagtgtcgcagattatttccttgctcacatcagaccctaccactgagcaatgcgactttgccatccggtccggcggccactcaaccgtgcctgacgccgctaatgcgcccggcagtgtgaccatcgacctgcagtctctcaacaacatacaaatcatgaatgactcaatcgtcagagttggagctggtgctaagtgggatgctgtctatgccaaactcggagctgttggtcgtgctgcagcgggcggtcgtattgggggggtaggggtttcgggcctaactcttgggggcggaatttcgtattttgggccgcgttatggctggacgtgcaacactgcggtagcctttgaggttgtcttggccgatggatctgtcgttgaggtggacgaagccaatgatccagagctactagccgggcttcggggaagcggcaataatctgggcatcgtcaccagaatcgacttcaagacatttgaacaaggccttctatggcacggttctatctactctcctttggcggacatagcagcgcacgctgaggtgttcgccgatatcacccaacctgctaactatgacgagaacgcttctttcttgttcggattcggatactctaagtcgcagaatctgtctgtgcttatccatgagttggtttatactaagccggtggagaacccgagctactatcaaggtttcattgacttaccttcagtttacaacgcctcctccattgttagtgcggaggagcttgccatccagggagctgccttacttcctattggacaagcacgttatctgtacacgacgaccactttcttgccgacccaagcaatgacgcaggccgcgttttccatttggaatgacgcagtgcaggacatgcgggatatcaaaggattgagttggtccatatcattagagccgatcccccagagtctgtacaagggccgcgcagtaaaaaacgtacttgggttgggagaccgcacagacactctcgtagtatgcctatcgacccaggcatggcaggaccctgcggacgatgaccgcatcaaggctgcatcaaccgcgtatgtgacagccgttgagaaagcagcgcaggacctcgacgcatttgacccgtacagatatctcaattatgcggcccgatggcaggacccgattagtagttacggctcagcaagcgtccagcggctgaaaaaactccaagaacgggttgatccgcatggcgtcttcactcggcgtgttcccggcggcttcaaagttccagcgtag

SEQ ID NO: 39251 - protein, 480 aa, Muscodor strobelii
  misc_feature: SGI Peptide ID NO. 573651
  misc_feature (49)..(188): Pfam Id: PF01565 Pfam Desc: FAD binding domain
  misc_feature (18)..(480): NCBI GI: 154323027 Blast Desc: BC1G_00856 [Botryotinia fuckeliana B05.10] gi|150848190|gb|EDN23383.1| BC1G_00856 [Botryotinia fuckeliana B05.10]
  misc_feature (1)..(480): NCBI GI: 242764988 Blast Desc: conserved [Talaromyces stipitatus ATCC 10500] gi|218724079|gb|EED23496.1| conserved [Talaromyces stipitatus ATCC 10500]
  misc_feature (12)..(480): NCBI GI: 212538417 Blast Desc: conserved [Penicillium marneffei ATCC 18224] gi|210069106|gb|EEA23197.1| conserved [Penicillium marneffei ATCC 18224]
  misc_feature (5)..(480): NCBI GI: 159129835 Blast Desc: oxidoreductase, FAD-binding, [Aspergillus fumigatus A1163]
  misc_feature (5)..(479): NCBI GI: 119481753 Blast Desc: oxidoreductase, FAD-binding, [Neosartorya fischeri NRRL 181] gi|119409059|gb|EAW19008.1| oxidoreductase, FAD-binding, [Neosartorya fischeri NRRL 181]
  misc_feature (5)..(480): NCBI GI: 71002198 Blast Desc: oxidoreductase, FAD-binding [Aspergillus fumigatus Af293] gi|66853418|gb|EAL93742.1| oxidoreductase, FAD-binding, [Aspergillus fumigatus Af293]
  misc_feature (11)..(479): NCBI GI: 121716172 Blast Desc: oxidoreductase, FAD-binding, [Aspergillus clavatus NRRL 1] gi|119403852|gb|EAW14269.1| oxidoreductase, FAD-binding, [Aspergillus clavatus NRRL 1]
  misc_feature (12)..(480): NCBI GI: 242764810 Blast Desc: oxidoreductase, FAD-binding, [Talaromyces stipitatus ATCC 10500] gi|218724043|gb|EED23460.1| oxidoreductase, FAD-binding, [Talaromyces stipitatus ATCC 10500]
  misc_feature (8)..(479): NCBI GI: 238498002 Blast Desc: oxidoreductase, FAD-binding, [Aspergillus flavus NRRL3357] gi|220693510|gb|EED49855.1| oxidoreductase, FAD-binding, [Aspergillus flavus NRRL3357]
  misc_feature (12)..(480): NCBI GI: 242764815 Blast Desc: oxidoreductase, FAD-binding, [Talaromyces stipitatus ATCC 10500] gi|218724044|gb|EED23461.1| oxidoreductase, FAD-binding, [Talaromyces stipitatus ATCC 10500]
  misc_feature: Useful for introducing or modulating the production of volatile compounds
MSSKSSIVRTCCQSLVTLLGPEKVAFSGSNAYNASVSSYFTNQAVTPPPLCVALPSTTAEVSQIISLLTSDPTTEQCDFAIRSGGHSTVPDAANAPGSVTIDLQSLNNIQIMNDSIVRVGAGAKWDAVYAKLGAVGRAAAGGRIGGVGVSGLTLGGGISYFGPRYGWTCNTAVAFEVVLADGSVVEVDEANDPELLAGLRGSGNNLGIVTRIDFKTFEQGLLWHGSIYSPLADIAAHAEVFADITQPANYDENASFLFGFGYSKSQNLSVLIHELVYTKPVENPSYYQGFIDLPSVYNASSIVSAEELAIQGAALLPIGQARYLYTTTTFLPTQAMTQAAFSIWNDAVQDMRDIKGLSWSISLEPIPQSLYKGRAVKNVLGLGDRTDTLVVCLSTQAWQDPADDDRIKAASTAYVTAVEKAAQDLDAFDPYRYLNYAARWQDPISSYGSASVQRLKKLQERVDPHGVFTRRVPGGFKVPA

SEQ ID NO: 39252 - DNA, 3126 bp, Muscodor strobelii
  misc_feature: SGI EST ID NO. CUFF.94583.2
  misc_feature: Variant of the nucleotide sequence at SEQ ID NO 39250
actgatcgcatgccaaggtcctaggactcagaagcagccgcagcaattgtacaacagttccttacgcacaccacgttcactgcttggatcctcgacattgacatgtcgtccaagagctcaatttgtcaatcattggtcaccctgctgggaccggaaaaggttgcattctccggaagcaatgcttacaatgcctctgtatcgtcctatttcaccaaccaagcggtgaccccgccaccactctgcgtagcattaccatctactacagctgaagtgtcgcagattatttccttgctcacatcagaccctaccactgagcaatgcgactttgccatccggtccggcggccactcaaccgtgcctgacgccgctaatgcgcccggcagtgtgaccatcgacctgcagtctctcaacaacatacaaatcatgaatgactcaatcgtcagagttggagctggtgctaagtgggatgctgtctatgccaaactcggagctgttggtcgtgctgcagcgggcggtcgtattgggggggtaggggtttcgggcctaactcttgggggcggaatttcgtattttgggccgcgttatggctggacgtgcaacactgcggtagcctttgaggttgtcttggccgatggatctgtcgttgaggtggacgaagccaatgatccagagctactagccgggcttcggggaagcggcaataatctgggcatcgtcaccagaatcgacttcaagacatttgaacaaggccttctatggcacggttctatctactctcctttggcggacatagcagcgcacgctgaggtgttcgccgatatcacccaacctgctaactatgacgagaacgcttctttcttgttcggattcggatactctaagtcgcagaatctgtctgtgcttatccatgagttggtttatactaagccggtggagaacccgagctactatcaaggtttcattgacttaccttcagtttacaacgcctcctccattgttagtgcggaggagcttgccatccagggagctgccttacttcctattggacaagcacgttatctgtacacgacgaccactttcttgccgacccaagcaatgacgcaggccgcgttttccatttggaatgacgcagtgcaggacatgcgggatatcaaaggattgagttggtccatatcattagagccgatcccccagagtctgtacaagggccgcgcagtaaaaaacgtacttgggttgggagaccgcacagacactctcgtagtatgcctatcgacccaggcatggcaggaccctgcggacgatgaccgcatcaaggctgcatcaaccgcgtatgtgacagccgttgagaaagcagcgcaggacctcgacgcatttgacccgtacagatatctcaattatgcggcccgatggcaggacccgattagtagttacggctcagcaagcgtccagcggctgaaaaaactccaagaacgggttgatccgcatggcgtcttcactcggcgtgttcccggcggcttcaaagttccagcgtagcatgagggcgcgtagtatcgttgaagagaggacagggattgggttgtcgcgcgactgactcctagcagaagagtgcatatttcgtaaccgggattcaatgtagcctattctactttcattaacacctgcctataaatctccactccttcgcatttctcctagcactgttgttcaatgctgcagtgacctgggaaaagtcgggcatttcatcatcatgtcggttgtcaaatcgaccattttcctgacaggggcaaacggtggtcttggcagagcattgattggccggatctctgcaagccctggctcggctcagtattattgtatctgtgctgttcgaaatagcgctgcggctaccgctctggacaagacactgcgcggcatgtctgcagaaacctgtccatcctacgagctgctcaagattgacttgtccgacttggcaagcgtgcgggagggtgctgccgctactaacgcaaagatcctatccggggagatccccccaatcaacgcactgatcctgagtgcgggacatcgcgaggccttgggtcagacttggactagcagtggcctagacacctcatttgcgagcaactacctaggccagtggcttctcactttgctgctgttgcagagcattgaccgcgaactgggtcgggttgtagtgattgggggttgggtgcatgaccctctggaccccggcaacaggctgaaccgcgcgtatttggacgcccagtggcaccaaatcatcagtggtgatgtgacagagagcgtggaagctattgccacggggaggtggagcgcgagccctaccacatcagatccgcccgacccgacgttacggcgccgccaagcttttcagtgtcatgatgattatcgaactccaacgtcgcctggaccaggatccgaggctgaataatatttgtttgctgggcgttgatcctggtatcatgcctaccaatatcgcgacaaagggccaacattgggtcgttaagcctgtttctcgctaattctacgtttagtggcttggttctcaccgaacggtgctttgcgatctccgtacaagtcagcaaacgatgtccttgccgcggcattgcagcgagagccaccaatcggggacaagcccaaagggttgtatctgaatggagccgtgctaaaacctatgagcctcgaggctcacgatgaggctaagcgaggagcagtatggaaggctagtgtgaaatatgcgcatttgacccaaggtgaaacaaatttggcggactgggagtaggtgacggtggcaggagtgcgggttgcatccgttggagagcgatgttttccttgctttatggttgggtagaccgtgcgccacgacgcgaagagttttactatatccgtgctgatgaatgttgccttaaatttcatcgtagtatcgtcgatgatacctttcatgtcggttggttttgatgcagctgaagcttgcgtgttgcttggtcgcatgatacgatggcacagccgacatggaactaattaccatagccttcgtgcccgcagatacaggtagtgtacctaatagagttgaccaagtgatatgactcaggtcacaaattaggctctgtg

SEQ ID NO: 39253 - DNA, 762 bp, Muscodor strobelii
  misc_feature: SGI cDNA ID NO. 573652
  misc_feature: Elevated expression when VOC is produced
  misc_feature: Encodes the peptide sequence at SEQ ID NO 39254
atgtcggttgtcaaatcgaccattttcctgacaggggcaaacggtggtcttggcagagcattgattggccggatctctgcaagccctggctcggctcagtattattgtatctgtgctgttcgaaatagcgctgcggctaccgctctggacaagacactgcgcggcatgtctgcagaaacctgtccatcctacgagctgctcaagattgacttgtccgacttggcaagcgtgcgggagggtgctgccgctactaacgcaaagatcctatccggggagatccccccaatcaacgcactgatcctgagtgcgggacatcgcgaggccttgggtcagacttggactagcagtggcctagacacctcatttgcgagcaactacctaggccagtggcttctcactttgctgctgttgcagagcattgaccgcgaactgggtcgggttgtagtgattgggggttgggtgcatgaccctctggaccccggcaacaggctgaaccgcgcgtatttggacgcccagtggcaccaaatcatcagtggtgatgtgacagagagcgtggaagctattgccacggggaggtggagcgcgagccctaccacatcagatccgcccgacccgacgttacggcgccgccaagcttttcagtgtcatgatgatgtgcgacatctggttctaacccagcacgggaagccagcgaacttacacgtgctgaccagctatctagtatcgaactccaacgtcgcctggaccaggatccgaggctga

SEQ ID NO: 39254 - protein, 253 aa, Muscodor strobelii
  misc_feature: SGI Peptide ID NO. 573652
  misc_feature (2)..(196): NCBI GI: 242765007 Blast Desc: short-chain dehydrogenase, [Talaromyces stipitatus ATCC 10500] gi|218724083|gb|EED23500.1| short-chain dehydrogenase, [Talaromyces stipitatus ATCC 10500]
  misc_feature (2)..(196): NCBI GI: 212538423 Blast Desc: short-chain dehydrogenase, [Penicillium marneffei ATCC 18224] gi|210069109|gb|EEA23200.1| short-chain dehydrogenase, [Penicillium marneffei ATCC 18224]
  misc_feature (5)..(195): NCBI GI: 212528992 Blast Desc: short-chain dehydrogenase, [Penicillium marneffei ATCC 18224] gi|210074051|gb|EEA28138.1| short-chain dehydrogenase, [Penicillium marneffei ATCC 18224]
  misc_feature (5)..(195): NCBI GI: 242764805 Blast Desc: short-chain dehydrogenase, [Talaromyces stipitatus ATCC 10500] gi|218724042|gb|EED23459.1| short-chain dehydrogenase, [Talaromyces stipitatus ATCC 10500]
  misc_feature (3)..(194): NCBI GI: 39942728 Blast Desc: MGG_03444 [Magnaporthe grisea 70-15] gi|145010010|gb|EDJ94666.1| MGG_03444 [Magnaporthe grisea 70-15]
  misc_feature (3)..(212): NCBI GI: 238840352 Blast Desc: conserved [Microsporum canis CBS 113480]
  misc_feature (1)..(198): NCBI GI: 46108216 Blast Desc: FG00990.1 [Gibberella zeae PH-1]
  misc_feature (1)..(194): NCBI GI: 256735183 Blast Desc: NECHADRAFT_74766 [Nectria haematococca mpVI 77-13-4]
  misc_feature (7)..(160): NCBI GI: 145246160 Blast Desc: An12g02470 [Aspergillus niger] gi|134080042|emb|CAK41089.1| protein product [Aspergillus niger]
  misc_feature (7)..(163): NCBI GI: 238842886 Blast Desc: oxidoreductase [Microsporum canis CBS 113480]
  misc_feature: Useful for introducing or modulating the production of volatile compounds
MSVVKSTIFLTGANGGLGRALIGRISASPGSAQYYCICAVRNSAAATALDKTLRGMSAETCPSYELLKIDLSDLASVREGAAATNAKILSGEIPPINALILSAGHREALGQTWTSSGLDTSFASNYLGQWLLTLLLLQSIDRELGRVVVIGGWVHDPLDPGNRLNRAYLDAQWHQIISGDVTESVEAIATGRWSASPTTSDPPDPTLRRRQAFQCHDDVRHLVLTQHGKPANLHVLTSYLVSNSNVAWTRIRG

SEQ ID NO: 39255 - DNA, 3126 bp, Muscodor strobelii; identical to SEQ ID NO: 39252
  misc_feature: SGI EST ID NO. CUFF.94583.2
  misc_feature: Variant of the nucleotide sequence at SEQ ID NO 39253

SEQ ID NO: 39256 - DNA, 1419 bp, Muscodor strobelii
  misc_feature: SGI cDNA ID NO. 573653
  misc_feature: Elevated expression when VOC is produced
  misc_feature: Encodes the peptide sequence at SEQ ID NO 39257
atggcgtggctttctttcgtgattccaaccttctgttggctcgagctaaacagagaacaggtcggccagggcactgaaccatttgctttgacagtttttggcgagacgttctatgtggttgcgaacgcgaaacagtccgcagacgtgtatcgcgatgttgaatctttgtcttttgatggatttgttcagtccctcatgaagaagaatggtagcgacgcaaagactatcaattcaatctttgcgccactcccaaaggaaaaatcgggctttccgaatcccgagggcttgtttctcggcgctctggcagggaagatacatacccagcaactccatcctggaccgaacatgatgaatcttcagagagtaggcggcgattggataaactcgcgtcttcggctggatgccctcgccaaagattgtgcttatgcgtcagtcactagtccgggacgtgtcgaagtgcccttgtatcattggacctcggattacttcgtgcggttgggacagcatgtgtactttggcgatccgctgcataagatagacccgggctacagctccgcgttcattgtttttgacgaggtcatctggaagatgttatatcagtatccagacatattttgccgtgatatgacccgaccacgcgaccagatgttagaatccatgaagagatactttcagatacccaagagtcagaggcaggaccatgctgcctggattgtcaacgccatggaggacgaaatgcgtgctgcgggcatggacgacaagaacgttgccattatggttttccatttgtacctcggtctcaacacgaatgcccgaaagacatccttttggctcttgacacatctcttgcaccacccagagtatctcgaggcgtttcgagcagaaacagcaccagcgttccgaggcgatgagctctttgaccttaattacatccaggatgcaaccaagtgtcccactgtggacgcggtctggaacgagacactgcggttggcaggttgggcagcgtcggtgcgccgtgtgacgtgtgataccgtcatcggaggcaagcgacttcgaacaggaaatcgtgtgatggtagcgcatcgcctgctccacttcgatgacgaaattttcggcgcggacgttatggcctggcgacctgaaagatggctcgagacacgtggcctgaagcttcaacagagccaatcgtggcgcccatttggcggtgggaagacaaagtgcagtggcagattcttggccaggtacttcgtaacgtctttcacagcaacgcttctccgacgcttcgacattcaagctgtcggcgatctacccacgccagagccagatgttggcagaccagtactcggcattatatcggtgaaagaaggccaggattattctgtatcacttaccccccggttaaagacgactataacgtaa

SEQ ID NO: 39257 - protein, 472 aa, Muscodor strobelii
  misc_feature: SGI Peptide ID NO. 573653
  misc_feature (9)..(461): Pfam Id: PF00067 Pfam Desc: Cytochrome P450
  misc_feature (274)..(461): Pfam Id: PF00067 Pfam Desc: Cytochrome P450
  misc_feature (18)..(468): NCBI GI: 212538425 Blast Desc: cytochrome p450, [Penicillium marneffei ATCC 18224] gi|210069110|gb|EEA23201.1| cytochrome p450, [Penicillium marneffei ATCC 18224]
  misc_feature (18)..(470): NCBI GI: 242765012 Blast Desc: cytochrome P450, [Talaromyces stipitatus ATCC 10500] gi|218724084|gb|EED23501.1| cytochrome P450, [Talaromyces stipitatus ATCC 10500]
  misc_feature (26)..(466): NCBI GI: 71002190 Blast Desc: cytochrome p450 [Aspergillus fumigatus Af293] gi|66853414|gb|EAL93738.1| cytochrome p450, [Aspergillus fumigatus Af293] gi|159129831|gb|EDP54945.1| cytochrome p450,
  misc_feature (26)..(466): NCBI GI: 119481745 Blast Desc: Cytochrome P450 oxidoreductase, [Neosartorya fischeri NRRL 181] gi|119409055|gb|EAW19004.1| Cytochrome P450 oxidoreductase, [Neosartorya fischeri NRRL 181]
  misc_feature (22)..(470): NCBI GI: 242764825 Blast Desc: cytochrome p450, [Talaromyces stipitatus ATCC 10500] gi|218724046|gb|EED23463.1| cytochrome p450, [Talaromyces stipitatus ATCC 10500]
  misc_feature (12)..(466): NCBI GI: 212528988 Blast Desc: cytochrome P450, [Penicillium marneffei ATCC 18224] gi|210074049|gb|EEA28136.1| cytochrome P450, [Penicillium marneffei ATCC 18224]
  misc_feature (6)..(466): NCBI GI: 238845687 Blast Desc: conserved [Microsporum canis CBS 113480]
  misc_feature (26)..(466): NCBI GI: 238845708 Blast Desc: conserved [Microsporum canis CBS 113480]
  misc_feature (18)..(463): NCBI GI: 156041148 Blast Desc: SS1G_11553 [Sclerotinia sclerotiorum 1980] gi|154695936|gb|EDN95674.1| SS1G_11553 [Sclerotinia sclerotiorum 1980]
  misc_feature (14)..(466): NCBI GI: 171693809 Blast Desc: protein product [Podospora anserina] gi|170946853|emb|CAP73657.1| protein product [Podospora anserina]
  misc_feature (187)..(451): SWISSPROT Homolog: EC 1.14.13.17 Cholesterol 7-alpha-monooxygenase
  misc_feature: Useful for introducing or modulating the production of volatile compounds
MAWLSFVIPTFCWLELNREQVGQGTEPFALTVFGETFYVVANAKQSADVYRDVESLSFDGFVQSLMKKNGSDAKTINSIFAPLPKEKSGFPNPEGLFLGALAGKIHTQQLHPGPNMMNLQRVGGDWINSRLRLDALAKDCAYASVTSPGRVEVPLYHWTSDYFVRLGQHVYFGDPLHKIDPGYSSAFIVFDEVIWKMLYQYPDIFCRDMTRPRDQMLESMKRYFQIPKSQRQDHAAWIVNAMEDEMRAAGMDDKNVAIMVFHLYLGLNTNARKTSFWLLTHLLHHPEYLEAFRAETAPAFRGDELFDLNYIQDATKCPTVDAVWNETLRLAGWAASVRRVTCDTVIGGKRLRTGNRVMVAHRLLHFDDEIFGADVMAWRPERWLETRGLKLQQSQSWRPFGGGKTKCSGRFLARYFVTSFTATLLRRFDIQAVGDLPTPEPDVGRPVLGIISVKEGQDYSVSLTPRLKTTIT

SEQ ID NO: 39258 - DNA, 2027 bp, Muscodor strobelii
  misc_feature: SGI EST ID NO. CUFF.94495.2
  misc_feature: Variant of the nucleotide sequence at SEQ ID NO 39256
cgcaacttgagtgtggtgagtatcttcggctggctatagattatctatcaagacctcatatattcatactgtgacgagcgggagacttttcacgttctgagtgccggagtgtattgacatcttcatcttgtcttcattcttctaggaatcaatcttgcactctctattggacgcattgatacagtgacaaggttgcccaattctcaaccaattttctcaatttgataacacaagtattattgttgcgatgacgccttataatggttttgtaactactcgtcaagtaactaccattcttcaccacgatagggtcgcaacattcttcatagtcgctgcgctttcgtcgtggctggcgtggagactctggagatttacaatccaacccagacttcgtccagatgagcccaaagagtccccatacttgataccatgtaaggctattgtcgcaaaccgttttgatcgtttcttctgaccaagtacctcgcatagtcataggtaggctggcctttactcatggccgctagatagatattaatcccagtccggtgacttaggccatggcgtggctttctttcgtgattccaaccttctgttggctcgagctaaagaacaggtcggccagggcactgaaccatttgctttgacagtttttggcgagacgttctatgtggttgcgaacgcgaaacagtccgcagacgtgtatcgcgatgttgaatctttgtcttttgatggatttgttcagtccctcatgaagaagaatggtagcgacgcaaagactatcaattcaatctttgcgccactcccaaaggaaaaatcgggctttccgaatcccgagggcttgtttctcggcgctctggcagggaagatacatacccagcaactccatcctggaccgaacatgatgaatcttcagagagtaggcggcgattggataaactcgcgtcttcggctggatgccctcgccaaagattgtgcttatgcgtcagtcactagtccgggacgtgtcgaagtgcccttgtatcattggacctcggattacttcgtgcggttgggacagcatgtgtactttggcgatccgctgcataagatagacccgggctacagctccgcgttcattgtttttgacgaggtcatctggaagatgttatatcagtatccagacatattttgccgtgatatgacccgaccacgcgaccagatgttagaatccatgaagagatactttcagatacccaagagtcagaggcaggaccatgctgcctggattgtcaacgccatggaggacgaaatgcgtgctgcgggcatggacgacaagaacgttgccattatggttttccatttgtacctcggtctcaacacgaatgcccgaaagacatccttttggctcttgacacatctcttgcaccacccagagtatctcgaggcgtttcgagcagaaacagcaccagcgttccgaggcgatgagctctttgaccttaattacatccaggatgcaaccaagtgtcccactgtggacgcggtctggaacgagacactgcggttggcaggttgggcagcgtcggtgcgccgtgtgacgtgtgataccgtcatcggaggcaagcgacttcgaacaggaaatcgtgtgatggtagcgcatcgcctgctccacttcgatgacgaaattttcggcgcggacgttatggcctggcgacctgaaagatggctcgagacacgtggcctgaagcttcaacagagccaatcgtggcgcccatttggcggtgggaagacaaagtgcagtggcagattcttggccaggtacttcgtaacgtctttcacagcaacgcttctccgacgcttcgacattcaagctgtcggcgatctacccacgccagagccagatgttggcagaccagtactcggcattatatcggtgaaagaaggccaggattattctgtatcacttaccccccggttaaagacgactataacgtaaaatgtagataattccttatttaaacgatatttgtggaccatagcatataacgtta

SEQ ID NO: 39259 - DNA, 1266 bp, Muscodor strobelii
  misc_feature: SGI cDNA ID NO. 573654
  misc_feature: Encodes the peptide sequence at SEQ ID NO 39260
atggcagagaatcatttacgcatagccattattggcggaggccttgcgggtgccagtcttgcaaatgcactcatcaacatttcacatctagacgttcatctcttcgaagccgacactgagttttctgagcgcggtgcggctatttcaattgctgacaatgccctggctgctttagaatgcattataccttccgcgaagtccacacttatagataaagcgggcgcaatgccaatgaactcagttcgtgcacttataggttgcggatcaaatgcggggtccttaattttcgaggctggaggcgataataaattggctgtccatcgtggatccttgcttcgagaactgcttgcgccattacctcctgcaaatctccatactggcaagaagctcagaaatctagaccgtatccgtggaatcacaggcgaagttgtgcgagttacatttgaggatggggaatctcgtgagtttgatgctgtgattggtgccgatggtgtctttagtgctgttcgacgatacattctagaggactccccaaatgaatgggctccttctcccgctggcttttgggactgcagaaatctcgtctcttttgagaaagctaaagcttgtcttggcgacgagtattttcacgagcactgtcaatatggttggataggggagggagcttttctcatgcatgacgttgtcgaaaatggggatctcgtccaatgtgttatatcaggtgttgaagcagatcctcccacggacagccgagtgcgaactttattcagaaaggacttggaagctgcattggccggctggcagggtggaccggtcatagatggtatgatggatctcattctcgatcaaccagaaccaaagcagtattcacaatgggagcataaatcaacattaacgtacgccaatggccaaatgtgcatgattggagacgccgctcacgcagcgactccctggcaaggagccggtgttggccaggctttcgaagacgctgtgattctagaagctcttctctggaaatcgtttacagcagaagggctaagggcagcatttacagcattcgacattgttaggcggccaaggtgccagcgggtcgtcgagtctagccgacgaacaggggaaattgtttgtggaaagagtcaagctggcttagacctaaacaagctgagggcggaattaagtcctagatggaggtttatacttgattttaacctaccggcacatatagaagaggctttggatatgctgaagatattaacaaaagggtga

SEQ ID NO: 39260 - protein, 421 aa, Muscodor strobelii
  misc_feature: SGI Peptide ID NO. 573654
  misc_feature (5)..(368): Pfam Id: PF01494 Pfam Desc: FAD binding domain
  misc_feature (7)..(41): Pfam Id: PF01266 Pfam Desc: FAD dependent oxidoreductase
  misc_feature (6)..(415): NCBI GI: 225557710 Blast Desc: salicylate hydroxylase [Ajellomyces capsulatus G186AR]
  misc_feature (6)..(415): NCBI GI: 240274173 Blast Desc: salicylate hydroxylase [Ajellomyces capsulatus H143]
  misc_feature (15)..(415): NCBI GI: 154288340 Blast Desc: [Ajellomyces capsulatus NAm1] gi|150408606|gb|EDN04147.1| [Ajellomyces capsulatus NAm1]
  misc_feature (24)..(419): NCBI GI: 169610297 Blast Desc: SNOG_08247 [Phaeosphaeria nodorum SN15] gi|160702028|gb|EAT84523.2| SNOG_08247 [Phaeosphaeria nodorum SN15]
  misc_feature (6)..(412): NCBI GI: 171682930 Blast Desc: protein product [Podospora anserina] gi|170941424|emb|CAP67075.1| protein product [Podospora anserina]
  misc_feature (1)..(382): NCBI GI: 239609275 Blast Desc: FAD binding domain-containing protein [Ajellomyces dermatitidis ER-3]
  misc_feature (6)..(417): NCBI GI: 46137629 Blast Desc: FG10330.1 [Gibberella zeae PH-1]
  misc_feature (6)..(415): NCBI GI: 145251856 Blast Desc: An16g01280 [Aspergillus niger] gi|134082981|emb|CAK42745.1| protein product [Aspergillus niger]
  misc_feature (6)..(411): NCBI GI: 145229657 Blast Desc: An01g07130 [Aspergillus niger] gi|134055246|emb|CAK43832.1| protein product [Aspergillus niger]
  misc_feature (8)..(416): NCBI GI: 189194379 Blast Desc: mannitol 1-phosphate dehydrogenase [Pyrenophora tritici-repentis Pt-1C-BFP] gi|187979092|gb|EDU45718.1| mannitol 1-phosphate dehydrogenase [Pyrenophora tritici-repentis
  misc_feature (28)..(411): SWISSPROT Homolog: EC 1.14.13.1 Salicylate 1-monooxygenase
MAENHLRIAIIGGGLAGASLANALINISHLDVHLFEADTEFSERGAAISIADNALAALECIIPSAKSTLIDKAGAMPMNSVRALIGCGSNAGSLIFEAGGDNKLAVHRGSLLRELLAPLPPANLHTGKKLRNLDRIRGITGEVVRVTFEDGESREFDAVIGADGVFSAVRRYILEDSPNEWAPSPAGFWDCRNLVSFEKAKACLGDEYFHEHCQYGWIGEGAFLMHDVVENGDLVQCVISGVEADPPTDSRVRTLFRKDLEAALAGWQGGPVIDGMMDLILDQPEPKQYSQWEHKSTLTYANGQMCMIGDAAHAATPWQGAGVGQAFEDAVILEALLWKSFTAEGLRAAFTAFDIVRRPRCQRVVESSRRTGEIVCGKSQAGLDLNKLRAELSPRWRFILDFNLPAHIEEALDMLKILTKG

SEQ ID NO: 39261 - DNA, 272 bp, Muscodor strobelii
  misc_feature: SGI EST ID NO. CUFF.94483.0
  misc_feature: Variant of the nucleotide sequence at SEQ ID NO 39259
agccattattggcggaggccttgcgggtgccagtcttgcaaatgcactcatcaacatttcacatctagacgttcatctcttcgaagccgacactgagttttctgagcgcggtgcggctatttcaattgctgacaatgccctggctgctttagaatgcattataccttccgcgaagtccacacttatagataaagcgggcgcaatgccaatgaactcagttcgtgcacttataggttgcggatcaaatgcggggtccttaattttcgaggctg

SEQ ID NO: 39262 - DNA, 2280 bp, Muscodor strobelii
  misc_feature: SGI cDNA ID NO. 573655
  misc_feature: Encodes the peptide sequence at SEQ ID NO 39263
atgcggtcgcccgccttccccccgaggcgaccctcgcacttcatccgctacgtcttcccgactatactattggtgggcctcttctactacctatcgagaggcccgggcccgatacctgcctcgcattcgggcaacaatgaagtcatcgcggagaaccgggtcaagttagaagagtctgtccaaaaccacccgccgacactggacacacctgtcaagatagatcccgatacccatgccggtgaggagttcgaaaagcccatatgggagaaccctaatgtcgtacacgacgaggccgagaatgggataaagcttggcgcacagccagactccgacaagacgagtgatgggacccagaagacgactaccggcgcttccgacggggtgaagaccggatccggcaaatctgatgatggaacgaagggatcgcagagtgggaagactaccactggatcatctgacaagggcaaatctggaactggcaaatccgatgacgagtctgagaaaagcacgagtgagaagacgagcagcgggtcgagtaaggttagcgaggatagcgcattatcagaagacgatgaagatgccgccgacactgcgggcaaccatcccatcgacgaattgatcagaacagcagacaagaagtttgacgagattatggccaaggaatccacaactctcaaacaagccgccgcagcctaccgcgagcgacgtggccgacacccgccccccggcttcaatgagtggtatctgttcgccaaagaccaggaatccgtcgtagtcgaggatttcttcgatcagatctaccacgatctgcatccattctggggtctcgatccgaccgtcatccgaaaggaatcatgggacttcgagatgaccatcaacatccggaatggcaatgcgagcgcccagagtgattggttctggactcagatctggctcaagatgatcaagaccatcgagcacttgctaccggatatggaccttgcgctgaatgccatggacgagccgagggttgtcgtgccgtgggaagagatgaatacttatgtcaagaaggctgatgcttcgcggaagattgttccttatgaggaggttgtgtccactttccagaaactgccggcgattgggaagtcgtctaagaaaccggctactaggaagaagcagtgggaagaagacacacccttctggatgatagcccgccgcggttgtcccccagacagcccagcacgtcgcatgcccgtacaaaagtccttcgaccaaacgcccgccatcgaatctaagtgggcgctcccacaccaatacaaaggctacgtctccaacttctcactctcaaccgagttctgtcaccagcccgacttgcagggcctagaaggcatattcattcaccccctctccacgcgctcaacacgtcttttctggccactcttcggcggcagcaagctggcgacaaacaatgagatcctcctcccagcgcccatgtactggaacgaggaagaccgcttcacgggaggagccgacaaaggcgtaccctgggaatccaagatttcacctctgatctggcgtggtgtcgcaactggtggaagaaaccaagagaagaattggcgagggtttcagcgccatcggtttgtcgccatgaacaatggcacgaaaatcatgctcgcggaggaagacctcgagaaaccggtaaattttgcgttgccggatgatacttatggaatcaagtccaggaaggagaacagaatggctgagtgggtcaatagctgggctgatgtgggcttcacggatctgatgtgtgatccggataacgcaataccatccgacgataagtactgtgcttacacggatccgcatttcgaggttattcccggtgtcgatctcgccgagcaattcgactacaaatacctccccgacattgacgggaactccttctccggccgctatctaggatttctccgcagcacgggtgtacccatcaaaagtacattatggcaggaatggcatgattccaggttagtagaatggagacactttgtgccaatggacaaccgatttggcgactattatggcattatggagtatttcctggggtataagggacctggtggaaatgcaaaaagtcacgataaagaggcgaagagaatcgcgatgcaagggaaggagtgggcggagaaggtgctgaggaaggaggatatgcaggtttatgtgctgagactactcctcgagtacgcgaggattagtagtgatgaccgagaggttatggggtgggttggtgatttggggagctaa

SEQ ID NO: 39263 - protein, 759 aa, Muscodor strobelii
  misc_feature: SGI Peptide ID NO. 573655
  misc_feature (199)..(757): NCBI GI: 85093771 Blast Desc: NCU02336 [Neurospora crassa OR74A] gi|28921214|gb|EAA30526.1| conserved [Neurospora crassa OR74A]
  misc_feature (177)..(756): NCBI GI: 256729025 Blast Desc: NECHADRAFT_100333 [Nectria haematococca mpVI 77-13-4]
  misc_feature (182)..(756): NCBI GI: 46138903 Blast Desc: FG10966.1 [Gibberella zeae PH-1]
  misc_feature (201)..(757): NCBI GI: 39942008 Blast Desc: MGG_10853 [Magnaporthe grisea 70-15] gi|145022933|gb|EDK06628.1| MGG_10853 [Magnaporthe grisea 70-15]
  misc_feature (168)..(757): NCBI GI: 154313380 Blast Desc: BC1G_05387 [Botryotinia fuckeliana B05.10] gi|150849456|gb|EDN24649.1| BC1G_05387 [Botryotinia fuckeliana B05.10]
  misc_feature (201)..(757): NCBI GI: 116179472 Blast Desc: CHGG_00364 [Chaetomium globosum CBS 148.51] gi|88184661|gb|EAQ92129.1| CHGG_00364 [Chaetomium globosum CBS 148.51]
  misc_feature (201)..(722): NCBI GI: 261354706 Blast Desc: conserved [Verticillium albo-atrum VaMs.102]
  misc_feature (198)..(757): NCBI GI: 116196360 Blast Desc: CHGG_04778 [Chaetomium globosum CBS 148.51] gi|88180691|gb|EAQ88159.1| CHGG_04778 [Chaetomium globosum CBS 148.51]
  misc_feature (193)..(757): NCBI GI: 119479795 Blast Desc: NFIA_079710 [Neosartorya fischeri NRRL 181] gi|119408080|gb|EAW18029.1| conserved [Neosartorya fischeri NRRL 181]
  misc_feature (196)..(757): NCBI GI: 115401162 Blast Desc: [Aspergillus terreus NIH2624] gi|114190110|gb|EAU31810.1| [Aspergillus terreus NIH2624]
MRSPAFPPRRPSHFIRYVFPTILLVGLFYYLSRGPGPIPASHSGNNEVIAENRVKLEESVQNHPPTLDTPVKIDPDTHAGEEFEKPIWENPNVVHDEAENGIKLGAQPDSDKTSDGTQKTTTGASDGVKTGSGKSDDGTKGSQSGKTTTGSSDKGKSGTGKSDDESEKSTSEKTSSGSSKVSEDSALSEDDEDAADTAGNHPIDELIRTADKKFDEIMAKESTTLKQAAAAYRERRGRHPPPGFNEWYLFAKDQESVVVEDFFDQIYHDLHPFWGLDPTVIRKESWDFEMTINIRNGNASAQSDWFWTQIWLKMIKTIEHLLPDMDLALNAMDEPRVVVPWEEMNTYVKKADASRKIVPYEEVVSTFQKLPAIGKSSKKPATRKKQWEEDTPFWMIARRGCPPDSPARRMPVQKSFDQTPAIESKWALPHQYKGYVSNFSLSTEFCHQPDLQGLEGIFIHPLSTRSTRLFWPLFGGSKLATNNEILLPAPMYWNEEDRFTGGADKGVPWESKISPLIWRGVATGGRNQEKNWRGFQRHRFVAMNNGTKIMLAEEDLEKPVNFALPDDTYGIKSRKENRMAEWVNSWADVGFTDLMCDPDNAIPSDDKYCAYTDPHFEVIPGVDLAEQFDYKYLPDIDGNSFSGRYLGFLRSTGVPIKSTLWQEWHDSRLVEWRHFVPMDNRFGDYYGIMEYFLGYKGPGGNAKSHDKEAKRIAMQGKEWAEKVLRKEDMQVYVLRLLLEYARISSDDREVMGWVGDLGS

SEQ ID NO: 39264 - DNA, 5158 bp, Muscodor strobelii
  misc_feature: SGI EST ID NO. CUFF.94797.0
  misc_feature: Variant of the nucleotide sequence at SEQ ID NO 39262
gttcaatcggtgacaaacggcaaaatccctggagatctccgggcgcaggcgttggaacgactttaggtagctgacttgccttgtcaagctagtgcgacaggcaggttccgagcattcttacctgcagcgactgggagtacggggaagagcttgaccacttaaggccaggtatcaccaattgtcaccaaatcccaagacgtggatttttatcacgatcgtcctgagtgcgcctgggcttcccgtcatcccagatcctggccagtccaagattgaagtccagccgtcgtcttcgaaagccaagagttgtcatttgttcttgtcttgtttcaaattattccctactatcaacccacatagactttgtagattctcctccgcgttattcaatagtctagatcgtacattattagctcggctatctaaattagctcgcctcgttagcctcgttcttcttgacttcggcctgcacgcgtctcgacccgtcccctcaaggttctcacgcccaacttctacgaaaacccaattctccggcccgtcgaaacagcaaacggattgaagctctaccattgacttcggtgcccagacctcgtccgactctcttgcgccaacggctttctctccccgagcattcctccactgccacccacgggcgatcaatcgcgacgaccagcccgcccttgttctcctcgcgcctctcctcccggccgtcgagcgacagtatcgtcgctagggcggtcggtgctgctgtcttgcacgatgcgcacgatgcggtcgcccgccttccccccgaggcgaccctcgcacttcatccgctacgtcttcccgactatactattggtgggcctcttctactacctatcgagaggcccgggcccgatacctgcctcgcattcgggcaacaatgaagtcatcgcggagaaccgggtcaagttagaagagtctgtccaaaaccacccgccgacactggacacacctgtcaagatagatcccgatacccatgccggtgaggagttcgaaaagcccatatgggagaaccctaatgtcgtacacgacgaggccgagaatgggataaagcttggcgcacagccagactccgacaagacgagtgatgggacccagaagacgactaccggcgcttccgacggggtgaagaccggatccggcaaatctgatgatggaacgaagggatcgcagagtgggaagactaccactggatcatctgacaagggcaaatctggaactggcaaatccgatgacgagtctgagaaaagcacgagtgagaagacgagcagcgggtcgagtaaggttagcgaggatagcgcattatcagaagacgatgaagatgccgccgacactgcgggcaaccatcccatcgacgaattgatcagaacagcagacaagaagtttgacgagattatggccaaggaatccacaactctcaaacaagccgccgcagcctaccgcgagcgacgtggccgacacccgccccccggcttcaatgagtggtatctgttcgccaaagaccaggaatccgtcgtagtcgaggatttcttcgatcagatctaccacgatctgcatccattctggggtctcgatccgaccgtcatccgaaaggaatcatgggacttcgagatgaccatcaacatccggaatggcaatgcgagcgcccagagtgattggttctggactcagatctggctcaagatgatcaagaccatcgagcacttgctaccggatatggaccttgcgctgaatgccatggacgagccgagggttgtcgtgccgtgggaagagatgaatacttatgtcaagaaggctgatgcttcgcggaagattgttccttatgaggaggttgtgtccactttccagaaactgccggcgattgggaagtcgtctaagaaaccggctactaggaagaagcagtgggaagaagacacacccttctggatgatagcccgccgcggttgtcccccagacagcccagcacgtcgcatgcccgtacaaaagtccttcgaccaaacgcccgccatcgaatctaagtgggcgctcccacaccaatacaaaggctacgtctccaacttctcactctcaaccgagttctgtcaccagcccgacttgcagggcctagaaggcatattcattcaccccctctccacgcgctcaacacgtcttttctggccactcttcggcggcagcaagctggcgacaaacaatgagatcctcctcccagcgcccatgtactggaacgaggaagaccgcttcacgggaggagccgacaaaggcgtaccctgggaatccaagatttcacctctgatctggcgtggtgtcgcaactggtggaagaaaccaagagaagaattggcgagggtttcagcgccatcggtttgtcgccatgaacaatggcacgaaaatcatgctcgcggaggaagacctcgagaaaccggtaaattttgcgttgccggatgatacttatggaatcaagtccaggaaggagaacagaatggctgagtgggtcaatagctgggctgatgtgggcttcacggatctgatgtgtgatccggataacgcaataccatccgacgataagtactgtgcttacacggatccgcatttcgaggttattcccggtgtcgatctcgccgagcaattcgactacaaatacctccccgacattgacgggaactccttctccggccgctatctaggatttctccgcagcacgggtgtacccatcaaaagtacattatggcaggaatggcatgattccaggttagtagaatggagacactttgtgccaatggacaaccgatttggcgactattatggcattatggagtatttcctggggtataagggacctggtggaaatgcaaaaagtcacgataaagaggcgaagagaatcgcgatgcaagggaaggagtgggcggagaaggtgctgaggaaggaggatatgcaggtttatgtgctgagactactcctcgagtacgcgaggattagtagtgatgaccgagaggttatggggtgggttggtgatttggggagctaagtggagagcgttggcgtagtggtgagtttgaaaagggggttggggtgtatataggagttggaaacataagggatggatgggctgtataatatggttattaagtataagtatcataggtggcgttggtgggcatgacataacattgaagacattttttatgaggttaagagatgtgttgttttgcttgcttgcatgatttgatagaagtagtaacatctattgtgcgtattgcttgttcacgatagccctctggagacaacttgatacaaaatcatgaattatttgccagcgcataggtgtaacctactactcatccgtctgcgtgacatcgagattctcaagcagagttgacttgacaccatccagccatctcgtgacgaaatctgcttcatagaaagcctcattatagcatacactgatatgtagcactcctttccaggtccaagtatgtacgtacagctgtggggtcagtatttgaaccgcctcccagagccctagcacctcaacatcaccatacctcacattcaccagatggtcaagcacacccagattgctgaggctgggctctgtggtgggtgtggcagcagacatcatcctagatgatttctcaacaagcggcacccgaacatacatgagatcactctcggtcgggtcgaatgactgtccgtacaggggctggagggccgccgctatagatgtccagttacggttcatgcagtcgacgacaaccggcaggccaacaagacgaagggatgccgcatgcaccggtccattgaagggaggtggacagtacttccgcagattgattggcggccaggacttgtactcagttccgctgcctggagcctggtatcggatggtctcaagaatgatggatgcatgaatagctgccgtgagccgaatcttgcgagctcgacatgcggctaatgctgaacataacgcacggggaggcacagtcgtctcgatgcgtaaagtgtcgctcggaagcgtcgcgccagctctgagaggtaagcctaccgatggtgtgcctgccatcataggggcgaaaagcgtatctgctcgatgtgaccaggttcgctcaatagcgtcgggcatgttcataacaacatcaagcgagggcgcaaggcggggaccttcgtcactatcgagtgtgcaacatgtagagggatcgctgagcaatgcgaggtattcgtgcagtagcatcataacacctatgccgtcccaccgccaatgtgacgacaccagtgcgaggtcgccggtgcatggcacccagtggcaagttgcgctacgacgacccagcttcagcttgcgcgagaacacttcatcgaaggtctttgcgtcctcctcgacaaaaaaggttgcatcggcccatgtcttgagcgcgtcgccgctgttcactgccgtgtagatcttctgatggtcgactagctcgactgcaacgtccgggtggagtagccgtagattaccccaggctgaccggagtcggtggactgcgttagggcccggaagagcgagccgggccgtggccactactaaccaaggctcacggcccagggtttggccagccgctgcgatagcttggaaaagtttgtcgtggcagtctaggggacggtgccagtggctgggtttttgccgagtccaggacattacgccaatggagctgtgtacgtgctgcaaaaattccgttcggcgatgaccacttctggaggggttggagcaggccggagggcatcagctacgttataatatcatacggtaaaggcaatggaaggacaatggaagggatcaagcaatcaatccgtcggtgtttctgaattgcccccaaagaggttgaaaccggccagctggccagatctataggcctgattcacaggtagaggtcccattgttctggtatgccggtcccccccggtgaatggtgttgaacacagtgttgccatgcgtaaagtcatgcgcggtgtggatcaagaatcagtaggtgttggtgatctttgcgtcttaaaatctcatcagcgggttgacactcaatatgaaatcaacgcgggaccaacaggagtcagcctgcttttaacatttacgccgtgtccagagcgatggaggctcctatctctcc

SEQ ID NO: 39265 - DNA, 1098 bp, Muscodor strobelii
  misc_feature: SGI cDNA ID NO. 573656
  misc_feature: Encodes the peptide sequence at SEQ ID NO 39266
atgatagcccgccgcggttgtcccccagacagcccagcacgtcgcatgcccgtacaaaagtccttcgaccaaacgcccgccatcgaatctaagtgggcgctcccacaccaatacaaaggctacgtctccaacttctcactctcaaccgagttctgtcaccagcccgacttgcagggcctagaaggcatattcattcaccccctctccacgcgctcaacacgtcttttctggccactcttcggcggcagcaagctggcgacaaacaatgagatcctcctcccagcgcccatgtactggaacgaggaagaccgcttcacgggaggagccgacaaaggcgtaccctgggaatccaagatttcacctctgatctggcgtggtgtcgcaactggtggaagaaaccaagagaagaattggcgagggtttcagcgccatcggtttgtcgccatgaacaatggcacgaaaatcatgctcgcggaggaagacctcgagaaaccggtaaattttgcgttgccggatgatacttatggaatcaagtccaggaaggagaacagaatggctgagtgggtcaatagctgggctgatgtgggcttcacggatctgatgtgtgatccggataacgcaataccatccgacgataagtactgtgcttacacggatccgcatttcgaggttattcccggtgtcgatctcgccgagcaattcgactacaaatacctccccgacattgacgggaactccttctccggccgctatctaggatttctccgcagcacgggtgtacccatcaaaagtacattatggcaggaatggcatgattccaggttagtagaatggagacactttgtgccaatggacaaccgatttggcgactattatggcattatggagtatttcctggggtataagggacctggtggaaatgcaaaaagtcacgataaagaggcgaagagaatcgcgatgcaagggaaggagtgggcggagaaggtgctgaggaaggaggatatgcaggtttatgtgctgagactactcctcgagtacgcgaggattagtagtgatgaccgagaggttatggggtgggttggtgatttggggagctaa

SEQ ID NO: 39266 - protein, 365 aa, Muscodor strobelii
  misc_feature: SGI Peptide ID NO. 573656
  misc_feature (2)..(363): NCBI GI: 85093771 Blast Desc: NCU02336 [Neurospora crassa OR74A] gi|28921214|gb|EAA30526.1| conserved [Neurospora crassa OR74A]
  misc_feature (2)..(363): NCBI GI: 154313380 Blast Desc: BC1G_05387 [Botryotinia fuckeliana B05.10] gi|150849456|gb|EDN24649.1| BC1G_05387 [Botryotinia fuckeliana B05.10]
  misc_feature (2)..(362): NCBI GI: 256729025 Blast Desc: NECHADRAFT_100333 [Nectria haematococca mpVI 77-13-4]
  misc_feature (2)..(362): NCBI GI: 46138903 Blast Desc: FG10966.1 [Gibberella zeae PH-1]
  misc_feature (1)..(363): NCBI GI: 116179472 Blast Desc: CHGG_00364 [Chaetomium globosum CBS 148.51] gi|88184661|gb|EAQ92129.1| CHGG_00364 [Chaetomium globosum CBS 148.51]
  misc_feature (2)..(363): NCBI GI: 39942008 Blast Desc: MGG_10853 [Magnaporthe grisea 70-15] gi|145022933|gb|EDK06628.1| MGG_10853 [Magnaporthe grisea 70-15]
  misc_feature (2)..(328): NCBI GI: 261354706 Blast Desc: conserved [Verticillium albo-atrum VaMs.102]
  misc_feature (72)..(363): NCBI GI: 156042946 Blast Desc: SS1G_11272 [Sclerotinia sclerotiorum 1980] gi|154695657|gb|EDN95395.1| SS1G_11272 [Sclerotinia sclerotiorum 1980]
  misc_feature (2)..(363): NCBI GI: 119479795 Blast Desc: NFIA_079710 [Neosartorya fischeri NRRL 181] gi|119408080|gb|EAW18029.1| conserved [Neosartorya fischeri NRRL 181]
  misc_feature (2)..(363): NCBI GI: 70998312 Blast Desc: capsular associated protein [Aspergillus fumigatus Af293] gi|66851514|gb|EAL91840.1| capsular associated protein, [Aspergillus fumigatus Af293] gi|159126387|gb|EDP51503.1| A1163]
MIARRGCPPDSPARRMPVQKSFDQTPAIESKWALPHQYKGYVSNFSLSTEFCHQPDLQGLEGIFIHPLSTRSTRLFWPLFGGSKLATNNEILLPAPMYWNEEDRFTGGADKGVPWESKISPLIWRGVATGGRNQEKNWRGFQRHRFVAMNNGTKIMLAEEDLEKPVNFALPDDTYGIKSRKENRMAEWVNSWADVGFTDLMCDPDNAIPSDDKYCAYTDPHFEVIPGVDLAEQFDYKYLPDIDGNSFSGRYLGFLRSTGVPIKSTLWQEWHDSRLVEWRHFVPMDNRFGDYYGIMEYFLGYKGPGGNAKSHDKEAKRIAMQGKEWAEKVLRKEDMQVYVLRLLLEYARISSDDREVMGWVGDLGS

SEQ ID NO: 39267 - DNA, 4432 bp, Muscodor strobelii
  misc_feature: SGI EST ID NO. CUFF.94797.1
  misc_feature: Variant of the nucleotide sequence at SEQ ID NO 39265
cttccccccgaggcgaccctcgcacttcatccgctacgtcttcccgactatactattggtgggcctcttctactacctatcgagaggcccgggcccgatacctgcctcgcattcgggcaacaatgaagtcatcgcggagaaccgggtcaagttagaagagtctgtccaaaaccacccgccgacactggacacacctgtcaagatagatcccgatacccatgccggtgaggagttcgaaaagcccatatgggagaaccctaatgtcgtacacgacgaggccgagaatgggataaagcttggcgcacagccagactccgacaagacgagtgatgggacccagaagacgactaccggcgcttccgacggggtgaagaccggatccggcaaatctgatgatggaacgaagggatcgcagagtgggaagactaccactggatcatctgacaagggcaaatctggaactggcaaatccgatgacgagtctgagaaaagcacgagtgagaagacgagcagcgggtcgagtaaggttagcgaggatagcgcattatcagaagacgatgaagatgccgccgacactgcgggcaaccatcccatcgacgaattgatcagaacagcagacaagaagtttgacgagattatggccaaggaatccacaactctcaaacaagccgccgcagcctaccgcgagcgacgtggccgacacccgccccccggcttcaatgagtggtatctgttcgccaaagaccaggaatccgtcgtagtcgaggatttcttcgatcagatctaccacgatctgcatccattctggggtctcgatccgaccgtcatccgaaaggaatcatgggacttcgagatgaccatcaacatccggaatggcaatgcgagcgcccagagtgattggttctggactcagatctggctcaagatgatcaagaccatcgagcacttgctaccggatatggaccttgcgctgaatgccatggacgagccgagggttgtcgtgccgtgggaagagatgaatacttatgtcaagaaggctgatgcttcgcggaagattgttccttatgaggaggttgtgtccactttccagaaactgccggcgattgggaagtcgtctaagaaaccggctactaggaagaagcagtgggaagaagacagtaaagcgatgttcatattcgatctcaagctttcatatgctaacgactcatagcacccttctggatgatagcccgccgcggttgtcccccagacagcccagcacgtcgcatgcccgtacaaaagtccttcgaccaaacgcccgccatcgaatctaagtgggcgctcccacaccaatacaaaggctacgtctccaacttctcactctcaaccgagttctgtcaccagcccgacttgcagggcctagaaggcatattcattcaccccctctccacgcgctcaacacgtcttttctggccactcttcggcggcagcaagctggcgacaaacaatgagatcctcctcccagcgcccatgtactggaacgaggaagaccgcttcacgggaggagccgacaaaggcgtaccctgggaatccaagatttcacctctgatctggcgtggtgtcgcaactggtggaagaaaccaagagaagaattggcgagggtttcagcgccatcggtttgtcgccatgaacaatggcacgaaaatcatgctcgcggaggaagacctcgagaaaccggtaaattttgcgttgccggatgatacttatggaatcaagtccaggaaggagaacagaatggctgagtgggtcaatagctgggctgatgtgggcttcacggatctgatgtgtgatccggataacgcaataccatccgacgataagtactgtgcttacacggatccgcatttcgaggttattcccggtgtcgatctcgccgagcaattcgactacaaatacctccccgacattgacgggaactccttctccggccgctatctaggatttctccgcagcacgggtgtacccatcaaaagtacattatggcaggaatggcatgattccaggttagtagaatggagacactttgtgccaatggacaaccgatttggcgactattatggcattatggagtatttcctggggtataagggacctggtggaaatgcaaaaagtcacgataaagaggcgaagagaatcgcgatgcaagggaaggagtgggcggagaaggtgctgaggaaggaggatatgcaggtttatgtgctgagactactcctcgagtacgcgaggattagtagtgatgaccgagaggttatggggtgggttggtgatttggggagctaagtggagagcgttggcgtagtggtgagtttgaaaagggggttggggtgtatataggagttggaaacataagggatggatgggctgtataatatggttattaagtataagtatcataggtggcgttggtgggcatgacataacattgaagacattttttatgaggttaagagatgtgttgttttgcttgcttgcatgatttgatagaagtagtaacatctattgtgcgtattgcttgttcacgatagccctctggagacaacttgatacaaaatcatgaattatttgccagcgcataggtgtaacctactactcatccgtctgcgtgacatcgagattctcaagcagagttgacttgacaccatccagccatctcgtgacgaaatctgcttcatagaaagcctcattatagcatacactgatatgtagcactcctttccaggtccaagtatgtacgtacagctgtggggtcagtatttgaaccgcctcccagagccctagcacctcaacatcaccatacctcacattcaccagatggtcaagcacacccagattgctgaggctgggctctgtggtgggtgtggcagcagacatcatcctagatgatttctcaacaagcggcacccgaacatacatgagatcactctcggtcgggtcgaatgactgtccgtacaggggctggagggccgccgctatagatgtccagttacggttcatgcagtcgacgacaaccggcaggccaacaagacgaagggatgccgcatgcaccggtccattgaagggaggtggacagtacttccgcagattgattggcggccaggacttgtactcagttccgctgcctggagcctggtatcggatggtctcaagaatgatggatgcatgaatagctgccgtgagccgaatcttgcgagctcgacatgcggctaatgctgaacataacgcacggggaggcacagtcgtctcgatgcgtaaagtgtcgctcggaagcgtcgcgccagctctgagaggtaagcctaccgatggtgtgcctgccatcataggggcgaaaagcgtatctgctcgatgtgaccaggttcgctcaatagcgtcgggcatgttcataacaacatcaagcgagggcgcaaggcggggaccttcgtcactatcgagtgtgcaacatgtagagggatcgctgagcaatgcgaggtattcgtgcagtagcatcataacacctatgccgtcccaccgccaatgtgacgacaccagtgcgaggtcgccggtgcatggcacccagtggcaagttgcgctacgacgacccagcttcagcttgcgcgagaacacttcatcgaaggtctttgcgtcctcctcgacaaaaaaggttgcatcggcccatgtcttgagcgcgtcgccgctgttcactgccgtgtagatcttctgatggtcgactagctcgactgcaacgtccgggtggagtagccgtagattaccccaggctgaccggagtcggtggactgcgttagggcccggaagagcgagccgggccgtggccactactaaccaaggctcacggcccagggtttggccagccgctgcgatagcttggaaaagtttgtcgtggcagtctaggggacggtgccagtggctgggtttttgccgagtccaggacattacgccaatggagctgtgtacgtgctgcaaaaattccgttcggcgatgaccacttctggaggggttggagcaggccggagggcatcagctacgttataatatcatacggtaaaggcaatggaaggacaatggaagggatcaagcaatcaatccgtcggtgtttctgaattgcccccaaagaggttgaaaccggccagctggccagatctataggcctgattcacaggtagaggtcccattgttctggtatgccggtcccccccggtgaatggtgttgaacacagtgttgccatgcgtaaagtcatgcgcggtgtggatcaagaatcagtaggtgttggtgatctttgcgtcttaaaatctcatcagcgggttgacactcaatatgaaatcaacgcgggaccaacaggagtcagcctgcttttaacatttacgccgtgtccagagcgatggaggctcctatctctcc

SEQ ID NO: 39268 - DNA, 1341 bp, Muscodor strobelii
  misc_feature: SGI cDNA ID NO. 573657
  misc_feature: Elevated expression when VOC is produced
  misc_feature: Encodes the peptide sequence at SEQ ID NO 39269
atgtcctggactcggcaaaaacccagccactggcaccgtcccctagactgccacgacaaacttttccaagctatcgcagcggctggccaaaccctgggccgtgagccttggttagtagtggccacggcccggctcgctcttccgggccctaacgcagtccaccgactccggtcagcctggggtaatctacggctactccacccggacgttgcagtcgagctagtcgaccatcagaagatctacacggcagtgaacagcggcgacgcgctcaagacatgggccgatgcaaccttttttgtcgaggaggacgcaaagaccttcgatgaagtgttctcgcgcaagctgaagctgggtcgtcgtagcgcaacttgccactgggtgccatgcaccggcgacctcgcactggtgtcgtcacattggcggtgggacggcataggtgttatgatgctactgcacgaatacctcgcattgctcagcgatccctctacatgttgcacactcgatagtgacgaaggtccccgccttgcgccctcgcttgatgttgttatgaacatgcccgacgctattgagcgaacctggtcacatcgagcagatacgcttttcgcccctatgatggcaggcacaccatcggtaggcttacctctcagagctggcgcgacgcttccgagcgacactttacgcatcgagacgactgtgcctccccgtgcgttatgttcagcattagccgcatgtcgagctcgcaagattcggctcacggcagctattcatgcatccatcattcttgagaccatccgataccaggctccaggcagcggaactgagtacaagtcctggccgccaatcaatctgcggaagtactgtccacctcccttcaatggaccggtgcatgcggcatcccttcgtcttgttggcctgccggttgtcgtcgactgcatgaaccgtaactggacatctatagcggcggccctccagcccctgtacggacagtcattcgacccgaccgagagtgatctcatgtatgttcgggtgccgcttgttgagaaatcatctaggatgatgtctgctgccacacccaccacagagcccagcctcagcaatctgggtgtgcttgaccatctggtgaatgtgaggtatggtgatgttgaggtgctagggctctgggaggcggttcaaatactgaccccacagctgtacgtacatacttggacctggaaaggagtgctacatatcagtgtatgctataatgaggctttctatgaagcagatttcgtcacgagatggctggatggtgtcaagtcaactctgcttgagaatctcgatgtcacgcagacggatgagtag

SEQ ID NO: 39269 - protein, 446 aa, Muscodor strobelii
  misc_feature: SGI Peptide ID NO. 573657
  misc_feature (1)..(446): NCBI GI: 145250867 Blast Desc: An15g04120 [Aspergillus niger] gi|134082471|emb|CAK97279.1| protein product [Aspergillus niger]
  misc_feature (13)..(441): NCBI GI: 256722744 Blast Desc: NECHADRAFT_87220 [Nectria haematococca mpVI 77-13-4]
  misc_feature (1)..(428): NCBI GI: 261361310 Blast Desc: conserved [Verticillium albo-atrum VaMs.102]
  misc_feature (1)..(441): NCBI GI: 115390216 Blast Desc: [Aspergillus terreus NIH2624] gi|114195009|gb|EAU36709.1| [Aspergillus terreus NIH2624]
  misc_feature (1)..(443): NCBI GI: 145230698 Blast Desc: An01g12050 [Aspergillus niger] gi|134055732|emb|CAK44105.1| protein product [Aspergillus niger]
  misc_feature (2)..(442): NCBI GI: 212539205 Blast Desc: conserved [Penicillium marneffei ATCC 18224] gi|210069500|gb|EEA23591.1| conserved [Penicillium marneffei ATCC 18224]
  misc_feature (1)..(439): NCBI GI: 238497125 Blast Desc: conserved [Aspergillus flavus NRRL3357] gi|220694678|gb|EED51022.1| conserved [Aspergillus flavus NRRL3357]
  misc_feature (1)..(441): NCBI GI: 242797779 Blast Desc: conserved [Talaromyces stipitatus ATCC 10500] gi|218716377|gb|EED15798.1| conserved [Talaromyces stipitatus ATCC 10500]
  misc_feature (1)..(441): NCBI GI: 212542155 Blast Desc: conserved [Penicillium marneffei ATCC 18224] gi|210066139|gb|EEA20232.1| conserved [Penicillium marneffei ATCC 18224]
  misc_feature (1)..(435): NCBI GI: 242760823 Blast Desc: conserved [Talaromyces stipitatus ATCC 10500] gi|218723262|gb|EED22679.1| conserved [Talaromyces stipitatus ATCC 10500]
  misc_feature: Useful for introducing or modulating the production of volatile compounds
MSWTRQKPSHWHRPLDCHDKLFQAIAAAGQTLGREPWLVVATARLALPGPNAVHRLRSAWGNLRLLHPDVAVELVDHQKIYTAVNSGDALKTWADATFFVEEDAKTFDEVFSRKLKLGRRSATCHWVPCTGDLALVSSHWRWDGIGVMMLLHEYLALLSDPSTCCTLDSDEGPRLAPSLDVVMNMPDAIERTWSHRADTLFAPMMAGTPSVGLPLRAGATLPSDTLRIETTVPPRALCSALAACRARKIRLTAAIHASIILETIRYQAPGSGTEYKSWPPINLRKYCPPPFNGPVHAASLRLVGLPVVVDCMNRNWTSIAAALQPLYGQSFDPTESDLMYVRVPLVEKSSRMMSAATPTTEPSLSNLGVLDHLVNVRYGDVEVLGLWEAVQILTPQLYVHTWTWKGVLHISVCYNEAFYEADFVTRWLDGVKSTLLENLDVTQTDE

SEQ ID NO: 39270 - DNA, 4432 bp, Muscodor strobelii
  misc_feature: SGI EST ID NO. CUFF.94797.1
  misc_feature: Variant of the nucleotide sequence at SEQ ID NO 39268
ggagagataggagcctccatcgctctggacacggcgtaaatgttaaaagcaggctgactcctgttggtcccgcgttgatttcatattgagtgtcaacccgctgatgagattttaagacgcaaagatcaccaacacctactgattcttgatccacaccgcgcatgactttacgcatggcaacactgtgttcaacaccattcaccgggggggaccggcataccagaacaatgggacctctacctgtgaatcaggcctatagatctggccagctggccggtttcaacctctttgggggcaattcagaaacaccgacggattgattgcttgatcccttccattgtccttccattgcctttaccgtatgatattataacgtagctgatgccctccggcctgctccaacccctccagaagtggtcatcgccgaacggaatttttgcagcacgtacacagctccattggcgtaatgtcctggactcggcaaaaacccagccactggcaccgtcccctagactgccacgacaaacttttccaagctatcgcagcggctggccaaaccctgggccgtgagccttggttagtagtggccacggcccggctcgctcttccgggccctaacgcagtccaccgactccggtcagcctggggtaatctacggctactccacccggacgttgcagtcgagctagtcgaccatcagaagatctacacggcagtgaacagcggcgacgcgctcaagacatgggccgatgcaaccttttttgtcgaggaggacgcaaagaccttcgatgaagtgttctcgcgcaagctgaagctgggtcgtcgtagcgcaacttgccactgggtgccatgcaccggcgacctcgcactggtgtcgtcacattggcggtgggacggcataggtgttatgatgctactgcacgaatacctcgcattgctcagcgatccctctacatgttgcacactcgatagtgacgaaggtccccgccttgcgccctcgcttgatgttgttatgaacatgcccgacgctattgagcgaacctggtcacatcgagcagatacgcttttcgcccctatgatggcaggcacaccatcggtaggcttacctctcagagctggcgcgacgcttccgagcgacactttacgcatcgagacgactgtgcctccccgtgcgttatgttcagcattagccgcatgtcgagctcgcaagattcggctcacggcagctattcatgcatccatcattcttgagaccatccgataccaggctccaggcagcggaactgagtacaagtcctggccgccaatcaatctgcggaagtactgtccacctcccttcaatggaccggtgcatgcggcatcccttcgtcttgttggcctgccggttgtcgtcgactgcatgaaccgtaactggacatctatagcggcggccctccagcccctgtacggacagtcattcgacccgaccgagagtgatctcatgtatgttcgggtgccgcttgttgagaaatcatctaggatgatgtctgctgccacacccaccacagagcccagcctcagcaatctgggtgtgcttgaccatctggtgaatgtgaggtatggtgatgttgaggtgctagggctctgggaggcggttcaaatactgaccccacagctgtacgtacatacttggacctggaaaggagtgctacatatcagtgtatgctataatgaggctttctatgaagcagatttcgtcacgagatggctggatggtgtcaagtcaactctgcttgagaatctcgatgtcacgcagacggatgagtagtaggttacacctatgcgctggcaaataattcatgattttgtatcaagttgtctccagagggctatcgtgaacaagcaatacgcacaatagatgttactacttctatcaaatcatgcaagcaagcaaaacaacacatctcttaacctcataaaaaatgtcttcaatgttatgtcatgcccaccaacgccacctatgatacttatacttaataaccatattatacagcccatccatcccttatgtttccaactcctatatacaccccaacccccttttcaaactcaccactacgccaacgctctccacttagctccccaaatcaccaacccaccccataacctctcggtcatcactactaatcctcgcgtactcgaggagtagtctcagcacataaacctgcatatcctccttcctcagcaccttctccgcccactccttcccttgcatcgcgattctcttcgcctctttatcgtgactttttgcatttccaccaggtcccttataccccaggaaatactccataatgccataatagtcgccaaatcggttgtccattggcacaaagtgtctccattctactaacctggaatcatgccattcctgccataatgtacttttgatgggtacacccgtgctgcggagaaatcctagatagcggccggagaaggagttcccgtcaatgtcggggaggtatttgtagtcgaattgctcggcgagatcgacaccgggaataacctcgaaatgcggatccgtgtaagcacagtacttatcgtcggatggtattgcgttatccggatcacacatcagatccgtgaagcccacatcagcccagctattgacccactcagccattctgttctccttcctggacttgattccataagtatcatccggcaacgcaaaatttaccggtttctcgaggtcttcctccgcgagcatgattttcgtgccattgttcatggcgacaaaccgatggcgctgaaaccctcgccaattcttctcttggtttcttccaccagttgcgacaccacgccagatcagaggtgaaatcttggattcccagggtacgcctttgtcggctcctcccgtgaagcggtcttcctcgttccagtacatgggcgctgggaggaggatctcattgtttgtcgccagcttgctgccgccgaagagtggccagaaaagacgtgttgagcgcgtggagagggggtgaatgaatatgccttctaggccctgcaagtcgggctggtgacagaactcggttgagagtgagaagttggagacgtagcctttgtattggtgtgggagcgcccacttagattcgatggcgggcgtttggtcgaaggacttttgtacgggcatgcgacgtgctgggctgtctgggggacaaccgcggcgggctatcatccagaagggtgctatgagtcgttagcatatgaaagcttgagatcgaatatgaacatcgctttactgtcttcttcccactgcttcttcctagtagccggtttcttagacgacttcccaatcgccggcagtttctggaaagtggacacaacctcctcataaggaacaatcttccgcgaagcatcagccttcttgacataagtattcatctcttcccacggcacgacaaccctcggctcgtccatggcattcagcgcaaggtccatatccggtagcaagtgctcgatggtcttgatcatcttgagccagatctgagtccagaaccaatcactctgggcgctcgcattgccattccggatgttgatggtcatctcgaagtcccatgattcctttcggatgacggtcggatcgagaccccagaatggatgcagatcgtggtagatctgatcgaagaaatcctcgactacgacggattcctggtctttggcgaacagataccactcattgaagccggggggcgggtgtcggccacgtcgctcgcggtaggctgcggcggcttgtttgagagttgtggattccttggccataatctcgtcaaacttcttgtctgctgttctgatcaattcgtcgatgggatggttgcccgcagtgtcggcggcatcttcatcgtcttctgataatgcgctatcctcgctaaccttactcgacccgctgctcgtcttctcactcgtgcttttctcagactcgtcatcggatttgccagttccagatttgcccttgtcagatgatccagtggtagtcttcccactctgcgatcccttcgttccatcatcagatttgccggatccggtcttcaccccgtcggaagcgccggtagtcgtcttctgggtcccatcactcgtcttgtcggagtctggctgtgcgccaagctttatcccattctcggcctcgtcgtgtacgacattagggttctcccatatgggcttttcgaactcctcaccggcatgggtatcgggatctatcttgacaggtgtgtccagtgtcggcgggtggttttggacagactcttctaacttgacccggttctccgcgatgacttcattgttgcccgaatgcgaggcaggtatcgggcccgggcctctcgataggtagtagaagaggcccaccaatagtatagtcgggaagacgtagcggatgaagtgcgagggtcgcctcggggggaag

SEQ ID NO: 39271 - DNA, 951 bp, Muscodor strobelii
  misc_feature: SGI cDNA ID NO. 573658
  misc_feature: Elevated expression when VOC is produced
  misc_feature: Encodes the peptide sequence at SEQ ID NO 39272
atgcagaaacagacttggttgatcacaggctgctcaagcggctttggagagcagttcgtccggcaactgatcgcgcaaggcgaccaagtcatcgctaccggtcgcgacgcagacactcgactatcccatatcaaggacactggcgccacaatcatagacctcgatgtcacgatttcgcaagccgaaatgaacaaaaaatttcaacaagcactagacgcctatggctccgtcgacgtcattgtccacaacgctggcttcatccaatgcggacctttggaggaccttacgcaagaggagctccaactctcgtttgatacccacgtccacggtcctctgaacctgacccgagccgctctgccttacttccgcgagcgaaagtccggatggctagtctacatgtcctcacaagccggcttcgttggcgagccgggagcaacaggctactgtgccagcaaatttgcactagaaggggcggtggaatgcctggccaaggagctcgcctggctagcacccggtatcaagccattaatcatccagtccggtctcttcaacacccacgtgctgaagaagatccaccacgccgactcacgggtggcatactggaagcaacttaacgacgccgcccgcatccgcggcgagggaaacgataagcgtgcccttggaaaccccgtcgagttggtcgccaaggtgatccagctggttaaaggtactggcattgctgaggaccgagaaattcctctccgtgttccgtttgggagtgatgggttagggttcatgcgtgagaaagcgaaatccctggtggctacgtatgatgagtgggagagtgttgctaagagtactgatccggagggtgtgaatgagcctatgccggatattcctaaccgccgattaaatactctatctgctgtaattaagcagggtgtagttggagttttgcaagtagaatattga

SEQ ID NO: 39272 - protein, 316 aa, Muscodor strobelii
  misc_feature: SGI Peptide ID NO. 573658
  misc_feature (4)..(167): Pfam Id: PF00106 Pfam Desc: short chain dehydrogenase
  misc_feature (5)..(171): Pfam Id: PF08659 Pfam Desc: KR domain
  misc_feature (5)..(150): Pfam Id: PF08659 Pfam Desc: KR domain
  misc_feature (2)..(272): NCBI GI: 145250873 Blast Desc: An15g04150 [Aspergillus niger] gi|134082474|emb|CAK97282.1| protein product [Aspergillus niger]
  misc_feature (5)..(281): NCBI GI: 46115898 Blast Desc: FG03791.1 [Gibberella zeae PH-1]
  misc_feature (5)..(281): NCBI GI: 256722682 Blast Desc: NECHADRAFT_53052 [Nectria haematococca mpVI 77-13-4]
  misc_feature (1)..(281): NCBI GI: 242801488 Blast Desc: hydroxybutyrate dehydrogenase, [Talaromyces stipitatus ATCC 10500] gi|218717123|gb|EED16544.1| hydroxybutyrate dehydrogenase, [Talaromyces stipitatus ATCC 10500]
  misc_feature (4)..(281): NCBI GI: 119474277 Blast Desc: short-chain oxidoreductase, [Neosartorya fischeri NRRL 181] gi|119407167|gb|EAW17117.1| short-chain oxidoreductase, [Neosartorya fischeri NRRL 181]
  misc_feature (4)..(283): NCBI GI: 121711988 Blast Desc: short-chain oxidoreductase, [Aspergillus clavatus NRRL 1] gi|119401761|gb|EAW12183.1| short-chain oxidoreductase, [Aspergillus clavatus NRRL 1]
  misc_feature (6)..(281): NCBI GI: 67904782 Blast Desc: AN9378.2 [Aspergillus nidulans FGSC A4] gi|40747289|gb|EAA66445.1| AN9378.2 [Aspergillus nidulans FGSC A4] gi|259488220|tpe|CBF87502.1| TPA: conserved [Aspergillus FGSC
  misc_feature (1)..(281): NCBI GI: 261194551 Blast Desc: short-chain oxidoreductase [Ajellomyces dermatitidis SLH14081] gi|239588218|gb|EEQ70861.1| short-chain oxidoreductase [Ajellomyces dermatitidis SLH14081] gi|239613502|gb|EEQ90489.1|
  misc_feature (1)..(281): NCBI GI: 256731864 Blast Desc: NECHADRAFT_41660 [Nectria haematococca mpVI 77-13-4]
  misc_feature (1)..(285): NCBI GI: 119183427 Blast Desc: CIMG_06649 [Coccidioides immitis RS]
  misc_feature (1)..(191): SWISSPROT Homolog: EC 1.1.1.62 Estradiol 17-beta-dehydrogenase
  misc_feature: Useful for introducing or modulating the production of volatile compounds
MQKQTWLITGCSSGFGEQFVRQLIAQGDQVIATGRDADTRLSHIKDTGATIIDLDVTISQAEMNKKFQQALDAYGSVDVIVHNAGFIQCGPLEDLTQEELQLSFDTHVHGPLNLTRAALPYFRERKSGWLVYMSSQAGFVGEPGATGYCASKFALEGAVECLAKELAWLAPGIKPLIIQSGLFNTHVLKKIHHADSRVAYWKQLNDAARIRGEGNDKRALGNPVELVAKVIQLVKGTGIAEDREIPLRVPFGSDGLGFMREKAKSLVATYDEWESVAKSTDPEGVNEPMPDIPNRRLNTLSAVIKQGVVGVLQVEY

SEQ ID NO: 39273 - DNA, 1394 bp, Muscodor strobelii
  misc_feature: SGI EST ID NO. CUFF.94498.0
  misc_feature: Variant of the nucleotide sequence at SEQ ID NO 39271
ccacgatgcagccaacggaggtatgtgccccatcctcgctcacgtaatatctttgaatctcggtcttcaaacaaccccaggcaagaacagccgtctagaagaggttatctacctagcaaatattgactagcttatgcttacccccttcacaatgcagaaacagacttggttgatcacaggctgctcaagcggctttggagagcagttcgtccggcaactgatcgcgcaaggcgaccaagtcatcgctaccggtcgcgacgcagacactcgactatcccatatcaaggacactggcgccacaatcatagacctcgatgtcacgatttcgcaagccgaaatgaacaaaaaatttcaacaagcactagacgcctatggctccgtcgacgtcattgtccacaacgctggcttcatccaatgcggacctttggaggaccttacgcaagaggagctccaactctcgtttgatacccacgtccacggtcctctgaacctgacccgagccgctctgccttacttccgcgagcgaaagtccggatggctagtctacatgtcctcacaagccggcttcgttggcgagccgggagcaacaggctactgtgccagcaaatttgcactagaaggggcggtggaatgcctggccaaggagctcgcctggctagcacccggtatcaagccattaatcatccagtccggtctcttcaacacccacgtgctgaagaagatccaccacgccgactcacgggtggcatactggaagcaacttaacgacgccgcccgcatccgcggcgagggaaacgataagcgtgcccttggaaaccccgtcgagttggtcgccaaggtgatccagctggttaaaggtactggcattgctgaggaccgagaaattcctctccgtgttccgtttgggagtgatgggttagggttcatgcgtgagaaagcgaaatccctggtggctacgtatgatgagtgggagagtgttgctaagagtactgatccggagggtgtgaatgagcctatgccggatattcctaaccgccgattaaatactctatctgctgtaattaagcagggtgtagttggagttttgcaagtagaatattgattacagtaagcgtttcgctgatgatctaacactaagtatctgggttcgattctgagcagggcagtggacagtgaggttctgtcaaaatgctcccttttttcgcccatagagaacggttccaacctggcacatgactaaggggcgcgattctgatcaagggacggatcactctattgacagaatgcaatgagatagttggacaatacgtcattgccaatggcccaggggctccccttcaacacagtccagttcttcctcgataaattgcttcagcgtctgcttcatatcttca

SEQ ID NO: 39274 - DNA, 645 bp, Muscodor strobelii
  misc_feature: SGI cDNA ID NO. 573659
  misc_feature: Encodes the peptide sequence at SEQ ID NO 39275
atgctatcagacttttggatttccttgcgctttaatgaacatgagcctcaacccaaaagacggccaaacagtctgcttgatgaagttcagccggactacgttattaggcgtgcaggagctggtggaaaaggatcaccggagagattcaagacagtagatcgggataccgcttgctattacactcgcgccgctcttgccattccgacaattacaagattcgtgttagtttcgttcattggatgccggtttcaaaaggcgccctgggctaccgaagcaaaccggcagcagtatctcgcctcgacccgaaatccctttcagcgatattacgaggcaaagctcgtcgcagatcagggcttgcacgaggcagggaagaagagagatgacttcatcgccatttctgtccgccctggtcacttgactatggagccagcggggaaagttactcttggcaagatatgtggtccggaagggctctctagtcaggcttctccggctacagtgactgcttcggtgctcgaaacggaagtcaagagttgtcggctagatatgttggacgggcatgaagatatgaagcagacgctgaagcaatttatcgaggaagaactggactgtgttgaaggggagcccctgggccattggcaatga

SEQ ID NO: 39275 - protein, 214 aa, Muscodor strobelii
  misc_feature: SGI Peptide ID NO. 573659
  misc_feature (21)..(210): NCBI GI: 256726795 Blast Desc: NECHADRAFT_66155 [Nectria haematococca mpVI 77-13-4]
  misc_feature (19)..(210): NCBI GI: 256734786 Blast Desc: NECHADRAFT_75398 [Nectria haematococca mpVI 77-13-4]
  misc_feature (19)..(210): NCBI GI: 46107776 Blast Desc: FG00771.1 [Gibberella zeae PH-1]
  misc_feature (32)..(210): NCBI GI: 171680002 Blast Desc: protein product [Podospora anserina] gi|170939627|emb|CAP64854.1| protein product [Podospora anserina]
  misc_feature (25)..(210): NCBI GI: 116203825 Blast Desc: CHGG_09796 [Chaetomium globosum CBS 148.51] gi|88175924|gb|EAQ83392.1| CHGG_09796 [Chaetomium globosum CBS 148.51]
  misc_feature (24)..(212): NCBI GI: 189206097 Blast Desc: conserved [Pyrenophora tritici-repentis Pt-1C-BFP] gi|187975476|gb|EDU42102.1| conserved [Pyrenophora tritici-repentis Pt-1C-BFP]
  misc_feature (24)..(208): NCBI GI: 154292536 Blast Desc: BC1G_14906 [Botryotinia fuckeliana B05.10] gi|150846103|gb|EDN21296.1| BC1G_14906 [Botryotinia fuckeliana B05.10]
  misc_feature (25)..(210): NCBI GI: 46136357 Blast Desc: FG09694.1 [Gibberella zeae PH-1]
  misc_feature (25)..(210): NCBI GI: 259479828 Blast Desc: TPA: conserved [Aspergillus nidulans FGSC A4]
  misc_feature (25)..(210): NCBI GI: 67539638 Blast Desc: AN5989.2 [Aspergillus nidulans FGSC A4] gi|40738548|gb|EAA57738.1| AN5989.2 [Aspergillus nidulans FGSC A4]
MLSDFWISLRFNEHEPQPKRRPNSLLDEVQPDYVIRRAGAGGKGSPERFKTVDRDTACYYTRAALAIPTITRFVLVSFIGCRFQKAPWATEANRQQYLASTRNPFQRYYEAKLVADQGLHEAGKKRDDFIAISVRPGHLTMEPAGKVTLGKICGPEGLSSQASPATVTASVLETEVKSCRLDMLDGHEDMKQTLKQFIEEELDCVEGEPLGHWQ

SEQ ID NO: 39276 - DNA, 2502 bp, Muscodor strobelii
  misc_feature: SGI cDNA ID NO. 573660
  misc_feature: Elevated expression when VOC is produced
  misc_feature: Encodes the peptide sequence at SEQ ID NO 39277
atgcctcgccaacttcctcgaccacacagctgctcgcattgcgagaatctgacaatcagcgctgcgcctaaccccgcacccctcgatcagaaaatcaagaggtggaaagcgtttgcatcacaggacgccgttgagaaactagagagcacacccgaattgaaggagcatctcgagcaacaactagactcgcttgatcttatttgtaccgtgaactcgcgccaaatcgccgaatatgaagcgaatggatgtctattcttctcttatatcaatgaaaagacatcaggctctgatattgtcgagcctacagacggatatcctttgaagaactttcgcgagctgatgtacctgaacgccaagtcaaaagatgttctcaaaaatgagctacggttcctcgtttgcattgagcatcgaaagccttcagagttctcgtttcggtacttcgtaaacccttaccaaatgtatcacttggtacattttaagcgggctgatagcaacttcacgtctgaagactgggtcaagatcgatccattcagaatgattctcgactcgcaggatagagaggaagatgaattgcgctggataccgcagagaatcaacaatgatccaggatctactgcatatctctcttgtctcaaggagcagtacgacagcattgtagagacagcgtctagcgaaacagagactctgcccccattcacccccacgcggttgctttgctttcctacgcctggccaagaaactcgtgttcgaatagttaagacacgcgaactagcagagatgcacggcatcgacccggatcggaagctatcatatgcagcgctatcgtactgctggggtggagatcagaagctcaaactttgtaaggcgaacgatgcgctcctgtcgactggctgtgagatcgcttcccttccacgcacatttcaggacgcaatcaaggtagtttccaacttagggctttcgtacttatgggtcgacgcgctctgcatcgtacaagatgatgacgaagatagagagcgagagttggctatgatggcgaagatataccagagtgcttcatttaccgtcattgcttcgcgcgctgcatcggtggatgacggattccttggaccacgtttgcctttcaaggatgactgcagagttccgtttcgcttcaagctccgatctctctcggactctgactcctcgtcaccaaatgacggggtagaaacaaaaacatcccagtcttgtgtcatttgtttcccccaaatggacatgatcacgaacagtgaagaatgcagtgagcccgtcgatccagttttgacgcgagcgtggtgctttcaagagggcgcactatctaggaccatcgtcgaatttggtcaacttacaacccgcttcagatacgtgtgtctgagggctggaaagcccgcaatgatgcacgcaatggacggctggcacaaagaagaacgtactaataacatggttctgacgcccgagattctcgaagttatgagcaccagcaaaggggcactgatcgatctatggaggcatatcgtcaagacgtatagtgcactatcattaagccaccgccaagatcgcttgcctgccctctccgctgtagccgagacccttggtaattcccttggtggtgatagcaattatctcgcggggctatggcgtgaaactttaccgcaagctctgttatggacagtcaatgtggtgcagtcagaaagggacagtcggtcgccaaagggatcacaagcgcatgcaccatcgtggtcttgggctagcatgacgactgcaatcgatcacgtattggcgcctcttgttatggcccatggcaactcattcgatctagatcaaggagtgaagatcctatcatactcaccccagcttgctttacccaccgtcatatatggtgcggtaacccgtggcgagcttctagtacgcggtcgactgagacccgtgcgcttggttctcgacgatccgtattatcaaagatatgatgcagaccttacgctcatgacatcacaagcagatggtgtcaagttctctaaccaccgagagcgtaatactagagtattcacgggtgacggtcatcactcgatgacaagaggactacatcgtcttgaatatgaccaccccgaggaggcctaccgcgagcacatcctctgtactagggtgttcctggactataaagagatcgatacgaccgaaatgatagcggattcagaaggactctatctcatgccaatactctcgggtccaagcaaagacagagagctgcacatagacgaacaatgctggaatttccgtatgccgcagctacgatctatccttggattggtgttgcggaaggcttctgatggcacatacttgagagttggagtttttgagtttactaacgaacattccggtgacattcttgactcgcaaatgttggatttggaagaatccggggatctatacagagatcaacacgcctggatacaagcaggtgacgtggaagaatttacgatagtgtga

SEQ ID NO: 39277 - protein, 833 aa, Muscodor strobelii
  misc_feature: SGI Peptide ID NO. 573660
  misc_feature (271)..(441): Pfam Id: PF06985 Pfam Desc: Heterokaryon incompatibility protein (HET)
  misc_feature (271)..(357): Pfam Id: PF06985 Pfam Desc: Heterokaryon incompatibility protein (HET)
  misc_feature (8)..(648): NCBI GI: 256722445 Blast Desc: NECHADRAFT_77212 [Nectria haematococca mpVI 77-13-4]
  misc_feature (194)..(650): NCBI GI: 256720853 Blast Desc: NECHADRAFT_85575 [Nectria haematococca mpVI 77-13-4]
  misc_feature (194)..(590): NCBI GI: 85108981 Blast Desc: NCU08019 [Neurospora crassa OR74A] gi|28924300|gb|EAA33453.1| NCU08019 [Neurospora crassa OR74A]
  misc_feature (194)..(590): NCBI GI: 39979140 Blast Desc: related to tol protein [Neurospora crassa]
  misc_feature (261)..(673): NCBI GI: 171686078 Blast Desc: protein product [Podospora anserina] gi|170943000|emb|CAP68653.1| protein product [Podospora anserina]
  misc_feature (233)..(791): NCBI GI: 171677157 Blast Desc: protein product [Podospora anserina] gi|170936646|emb|CAP61305.1| protein product [Podospora anserina]
  misc_feature (230)..(648): NCBI GI: 171695492 Blast Desc: protein product [Podospora anserina] gi|170947988|emb|CAP60152.1| protein product [Podospora anserina]
  misc_feature (231)..(676): NCBI GI: 256720830 Blast Desc: NECHADRAFT_85535 [Nectria haematococca mpVI 77-13-4]
  misc_feature (247)..(590): NCBI GI: 256728256 Blast Desc: NECHADRAFT_87861 [Nectria haematococca mpVI 77-13-4]
  misc_feature (234)..(795): NCBI GI: 3777587 Blast Desc: TOL [Neurospora crassa]
  misc_feature: Useful for introducing or modulating the production of volatile compounds
MPRQLPRPHSCSHCENLTISAAPNPAPLDQKIKRWKAFASQDAVEKLESTPELKEHLEQQLDSLDLICTVNSRQIAEYEANGCLFFSYINEKTSGSDIVEPTDGYPLKNFRELMYLNAKSKDVLKNELRFLVCIEHRKPSEFSFRYFVNPYQMYHLVHFKRADSNFTSEDWVKIDPFRMILDSQDREEDELRWIPQRINNDPGSTAYLSCLKEQYDSIVETASSETETLPPFTPTRLLCFPTPGQETRVRIVKTRELAEMHGIDPDRKLSYAALSYCWGGDQKLKLCKANDALLSTGCEIASLPRTFQDAIKVVSNLGLSYLWVDALCIVQDDDEDRERELAMMAKIYQSASFTVIASRAASVDDGFLGPRLPFKDDCRVPFRFKLRSLSDSDSSSPNDGVETKTSQSCVICFPQMDMITNSEECSEPVDPVLTRAWCFQEGALSRTIVEFGQLTTRFRYVCLRAGKPAMMHAMDGWHKEERTNNMVLTPEILEVMSTSKGALIDLWRHIVKTYSALSLSHRQDRLPALSAVAETLGNSLGGDSNYLAGLWRETLPQALLWTVNVVQSERDSRSPKGSQAHAPSWSWASMTTAIDHVLAPLVMAHGNSFDLDQGVKILSYSPQLALPTVIYGAVTRGELLVRGRLRPVRLVLDDPYYQRYDADLTLMTSQADGVKFSNHRERNTRVFTGDGHHSMTRGLHRLEYDHPEEAYREHILCTRVFLDYKEIDTTEMIADSEGLYLMPILSGPSKDRELHIDEQCWNFRMPQLRSILGLVLRKASDGTYLRVGVFEFTNEHSGDILDSQMLDLEESGDLYRDQHAWIQAGDVEEFTIV

SEQ ID NO: 39278 - DNA, 2427 bp, Muscodor strobelii
  misc_feature: SGI EST ID NO. CUFF.94505.0
  misc_feature: Variant of the nucleotide sequence at SEQ ID NO 39276
actttcgcgagctgatgtacctgaacgccaagtcaaaagatgttctcaaaaatgagctacggttcctcgtttgcattgagcatcgaaagccttcagagttctcgtttcggtacttcgtaaacccttaccaaatgtatcacttggtacattttaagcgggctgatagcaacttcacgtctgaagactgggtcaagatcgatccattcagaatgattctcgactcgcaggatagagaggaagatgaattgcgctggataccgcagagaatcaacaatgatccaggatctactgcatatctctcttgtctcaaggagcagtacgacagcattgtagagacagcgtctagcgaaacagagactctgcccccattcacccccacgcggttgctttgctttcctacgcctggccaagaaactcgtgttcgaatagttaagacacgcgaactagcagagatgcacggcatcgacccggatcggaagctatcatatgcagcgctatcgtactgctggggtggagatcagaagctcaaactttgtaaggcgaacgatgcgctcctgtcgactggctgtgagatcgcttcccttccacgcacatttcaggacgcaatcaaggtagtttccaacttagggctttcgtacttatgggtcgacgcgctctgcatcgtacaagatgatgacgaagatagagagcgagagttggctatgatggcgaagatataccagagtgcttcatttaccgtcattgcttcgcgcgctgcatcggtggatgacggattccttggaccacgtttgcctttcaaggatgactgcagagttccgtttcgcttcaagctccgatctctctcggactctgactcctcgtcaccaaatgacggggtagaaacaaaaacatcccagtcttgtgtcatttgtttcccccaaatggacatgatcacgaacagtgaagaatgcagtgagcccgtcgatccagttttgacgcgagcgtggtgctttcaagagggcgcactatctaggaccatcgtcgaatttggtcaacttacaacccgcttcagatacgtgtgtctgagggctggaaagcccgcaatgatgcacgcaatggacggctggcacaaagaagaacgtactaataacatggttctgacgcccgagattctcgaagttatgagcaccagcaaaggggcactgatcgatctatggaggcatatcgtcaagacgtatagtgcactatcattaagccaccgccaagatcgcttgcctgccctctccgctgtagccgagacccttggtaattcccttggtggtgatagcaattatctcgcggggctatggcgtgaaactttaccgcaagctctgttatggacagtcaatgtggtgcagtcagaaagggacagtcggtcgccaaagggatcacaagcgcatgcaccatcgtggtcttgggctagcatgacgactgcaatcgatcacgtattggcgcctcttgttatggcccatggcaactcattcgatctagatcaaggagtgaagatcctatcatactcaccccagcttgctttacccaccgtcatatatggtgcggtaacccgtggcgagcttctagtacgcggtcgactgagacccgtgcgcttggttctcgacgatccgtattatcaaagatatgatgcagaccttacgctcatgacatcacaagcagatggtgtcaagttctctaaccaccgagagcgtaatactagagtattcacgggtgacggtcatcactcgatgacaagaggactacatcgtcttgaatatgaccaccccgaggaggcctaccgcgagcacatcctctgtactagggtgttcctggactataaagagatcgatacgaccgaaatgatagcggattcagaaggactctatctcatgccaatactctcgggtccaagcaaagacagagagctgcacatagacgaacaatgctggaatttccgtatgccgcagctacgatctatccttggattggtgttgcggaaggcttctgatggcacatacttgagagttggagtttttgagtttactaacgaacattccggtgacattcttgactcgcaaatgttggatttggaagaatccggggatctatacagagatcaacacgcctggatacaagcaggtgacgtggaagaatttacgatagtgtgaatcctagcggcccagaagcccgactacctactctaaaattaatctatacctcggctatgagcggcttgtttcacggttagctctagaagatgtcggatcaagcccaataattttgccctgctatgtgcgtcaggtgattacactttggagttcgagttgacatttagagctctgtcattactcggaccccatgacaaatacaatctatacataactgcgagtaaagtttcatgcgaaaggcacgtattcg

SEQ ID NO: 39279 - DNA, 843 bp, Muscodor strobelii
  misc_feature: SGI cDNA ID NO. 573661
  misc_feature: Encodes the peptide sequence at SEQ ID NO 39280
atggtggcgcatgcgagattgacacgatttttgatcctgtccgatacacatgatgatgctttccccggcaatactgcaaaggctgatgtcgtattgcactgcggtgacctaaccatgatcggcggtctcagtaactaccgcggcgctatcgaaaatatttcacgattagatgccgaactaaaactaatcatcgccgggaatcatgacgtttcgttggatcattcgtggtgggccaagaacttagacgaggatgatgatctcgaggagccaacgaaggcaagagccctctttagtgcagagaaacataactgtatctatcttctcgacgagggtacgcattctttcacgctgagcaacggtacttcctttactatttactgttcgccattcacgcccgagtttaatggatatgcattcgcatactctagagaagaggatcgcttcaatcatggcgaaaatcctattccagaaggcgtcgacattgtcatgacacatggccctccggcagcctcacaatctcctggggactctcgatgggaacttgataaagatttcgacgggaggcattgcggttgcccgactctattcaaggcagtggggcgcgcacgcccaaagctccactgttttgggcatattcatgaaggttatggagctcaggtcatcgactggaacacgaaccgtcgacgcgctccggagctataccgaaaccttaaggtcgccgactccactaataatgaaacgctgttcgtcaatgcagctattgcgacaaagacaccactgcctaataacaagccatggatcgtcgatatgaggctccacaacacgagaacagagaactcttag

SEQ ID NO: 39280 - protein, 280 aa, Muscodor strobelii
  misc_feature: SGI Peptide ID NO. 573661
  misc_feature (8)..(215): Pfam Id: PF00149 Pfam Desc: Calcineurin-like phosphoesterase
  misc_feature (5)..(272): NCBI GI: 189204081 Blast Desc: Ser/Thr protein phosphatase family protein [Pyrenophora tritici-repentis Pt-1C-BFP] gi|187985475|gb|EDU50963.1| Ser/Thr protein phosphatase family
  misc_feature (2)..(272): NCBI GI: 154313560 Blast Desc: BC1G_05477 [Botryotinia fuckeliana B05.10] gi|150849546|gb|EDN24739.1| BC1G_05477 [Botryotinia fuckeliana B05.10]
  misc_feature (8)..(272): NCBI GI: 169596148 Blast Desc: SNOG_00826 [Phaeosphaeria nodorum SN15] gi|160701240|gb|EAT92321.2| SNOG_00826 [Phaeosphaeria nodorum SN15]
  misc_feature (8)..(272): NCBI GI: 189200350 Blast Desc: ser/Thr protein phosphatase family protein [Pyrenophora tritici-repentis Pt-1C-BFP] gi|187983611|gb|EDU49099.1| ser/Thr protein phosphatase family
  misc_feature (8)..(272): NCBI GI: 239615369 Blast Desc: ser/Thr protein phosphatase [Ajellomyces dermatitidis ER-3]
  misc_feature (8)..(272): NCBI GI: 261190365 Blast Desc: ser/Thr protein phosphatase [Ajellomyces dermatitidis SLH14081] gi|239593039|gb|EEQ75620.1| ser/Thr protein phosphatase [Ajellomyces dermatitidis SLH14081]
  misc_feature (8)..(272): NCBI GI: 225557670 Blast Desc: serine/threonine phosphatase [Ajellomyces capsulatus G186AR]
  misc_feature (8)..(272): NCBI GI: 240278353 Blast Desc: serine/threonine protein phosphatase [Ajellomyces capsulatus H143]
  misc_feature (8)..(272): NCBI GI: 156062378 Blast Desc: SS1G_01305 [Sclerotinia sclerotiorum 1980] gi|154696641|gb|EDN96379.1| SS1G_01305 [Sclerotinia sclerotiorum 1980]
  misc_feature (8)..(272): NCBI GI: 226280376 Blast Desc: metallophosphoesterase domain-containing protein [Paracoccidioides brasiliensis Pb01]
MVAHARLTRFLILSDTHDDAFPGNTAKADVVLHCGDLTMIGGLSNYRGAIENISRLDAELKLIIAGNHDVSLDHSWWAKNLDEDDDLEEPTKARALFSAEKHNCIYLLDEGTHSFTLSNGTSFTIYCSPFTPEFNGYAFAYSREEDRFNHGENPIPEGVDIVMTHGPPAASQSPGDSRWELDKDFDGRHCGCPTLFKAVGRARPKLHCFGHIHEGYGAQVIDWNTNRRRAPELYRNLKVADSTNNETLFVNAAIATKTPLPNNKPWIVDMRLHNTRTENS

SEQ ID NO: 39281 - DNA, 552 bp, Muscodor strobelii
  misc_feature: SGI EST ID NO. CUFF.94510.0
  misc_feature: Variant of the nucleotide sequence at SEQ ID NO 39279
ctttcacgctgagcaacggtacttcctttactatttactgttcgccattcacgcccgagtttaatggatatgcattcgcatactctagagaagaggatcgcttcaatcatggcgaaaatcctattccagaaggcgtcgacattgtcatgacacatggccctccggcagcctcacaatctcctggggactctcgatgggaacttgataaagatttcgacgggaggcattgcggttgcccgactctattcaaggcagtggggcgcgcacgcccaaagctccactgttttgggcatattcatgaaggttatggagctcaggtcatcgactggaacacgaaccgtcgacgcgctccggagctataccgaaaccttaaggtcgccgactccactaataatgaaacgctgttcgtcaatgcagctattgcgacaaagacaccactgcctaataacaagccatggatcgtcgatatgaggctccacaacacgagaacagagaactcttagctctcccgaagcaacaagacagcctttttaccgtaccaggacattggag

SEQ ID NO: 39282 - DNA, 960 bp, Muscodor strobelii
  misc_feature: SGI cDNA ID NO. 573662
  misc_feature: Encodes the peptide sequence at SEQ ID NO 39283
atggcttggcttcctaatgtaccaggcctgaagcttcaccccttcgacaaatatagcgggcctctaaagattaaatttgaggaagagattggtacagggatacattcatttgtatggagagcgaagataaacggcgacacatacgctcttaaaatcttcaactggttccagccatggccaaaggactacggtgtcccattcgcgtatgatgatatagaaagctatttcttccccttctcgaacgagtgtcgcgcgtacggaagattgaaagaattcgggcaagggcatctcgccttcaaatgctatggctacttaaacatagaaggatccgactttgaatatctacgggagcactacaacgacttcgaaacgcatgaggtgaattggcagtatcatccggacgaggaagtatgccaggagaagtgtctcaaagctattgtcaaggagtttgtggatataccagaggatgtgcccaggatagatttgagtatgaatccgaagctttctcgcaaagcaatcagagacttgagaactcttcaccgtctagggatatgtgatctcgatataagggaggacaactatatgtttggaaggtatctagatttcagttgcgcgatgaccgcaccccatccgtaccttacccgaaaatacggcgatgatttcaaacctctgcgcgaggccaataatgatcggttcgcgatcgatgagcttatatacacatggaacgaggctcatactcgcgaacagcgaatatgggatgtgtgcgtgtcttctgactaccttgaacgattaagagaccgggatcgtggctcggaaccccagccgcgttaccaccccgcggatttcgactacgatgaggtacggaagatattcgatagaaaacaggaaaaagcggagagcaaagcgaagaaggcgaagacaaagaagaaaggaaaaaaaggcaagaagcagaaatcataa

SEQ ID NO: 39283 - protein, 319 aa, Muscodor strobelii
  misc_feature: SGI Peptide ID NO. 573662
  misc_feature (4)..(318): NCBI GI: 256724494 Blast Desc: NECHADRAFT_88133 [Nectria haematococca mpVI 77-13-4]
  misc_feature (4)..(278): NCBI GI: 116200502 Blast Desc: [Chaetomium globosum CBS 148.51] gi|88175510|gb|EAQ82978.1| [Chaetomium globosum CBS 148.51]
  misc_feature (4)..(316): NCBI GI: 256732290 Blast Desc: NECHADRAFT_93838 [Nectria haematococca mpVI 77-13-4]
  misc_feature (4)..(250): NCBI GI: 256725568 Blast Desc: NECHADRAFT_81415 [Nectria haematococca mpVI 77-13-4]
  misc_feature (4)..(213): NCBI GI: 171677145 Blast Desc: protein product [Podospora anserina] gi|170936640|emb|CAP61299.1| protein product [Podospora anserina]
  misc_feature (36)..(213): NCBI GI: 256730012 Blast Desc: NECHADRAFT_82569 [Nectria haematococca mpVI 77-13-4]
  misc_feature (11)..(215): NCBI GI: 116194212 Blast Desc: [Chaetomium globosum CBS 148.51] gi|88179617|gb|EAQ87085.1| [Chaetomium globosum CBS 148.51]
  misc_feature (35)..(215): NCBI GI: 46134137 Blast Desc: FG09208.1 [Gibberella zeae PH-1]
  misc_feature (11)..(215): NCBI GI: 116194294 Blast Desc: [Chaetomium globosum CBS 148.51] gi|88179658|gb|EAQ87126.1| [Chaetomium globosum CBS 148.51]
  misc_feature (4)..(210): NCBI GI: 256722232 Blast Desc: NECHADRAFT_52380 [Nectria haematococca mpVI 77-13-4]
MAWLPNVPGLKLHPFDKYSGPLKIKFEEEIGTGIHSFVWRAKINGDTYALKIFNWFQPWPKDYGVPFAYDDIESYFFPFSNECRAYGRLKEFGQGHLAFKCYGYLNIEGSDFEYLREHYNDFETHEVNWQYHPDEEVCQEKCLKAIVKEFVDIPEDVPRIDLSMNPKLSRKAIRDLRTLHRLGICDLDIREDNYMFGRYLDFSCAMTAPHPYLTRKYGDDFKPLREANNDRFAIDELIYTWNEAHTREQRIWDVCVSSDYLERLRDRDRGSEPQPRYHPADFDYDEVRKIFDRKQEKAESKAKKAKTKKKGKKGKKQKS

SEQ ID NO: 39284 - DNA, 2769 bp, Muscodor strobelii
  misc_feature: SGI cDNA ID NO. 573663
  misc_feature: Encodes the peptide sequence at SEQ ID NO 39285
atgtcttcccgacccgagttgaaggtcgacgatgagcatggcttcatcagatacttcaagtccctccccaaagttggcgatgagactgtcagaattttcgatcgaggtgactggtacacagcacacggtgaagatgctaacttcatcgcccggactgtatacaagactacctcggtcgtaagacaactgggcaaaaacgatgcgagcgggctgccatcagtcaccatgactatcaccgtcttccgacaattccttagagaagccctcttcaagctgggcaagcgaatcgagatatacgcaagcagcggtgcccgcatgaactggaaagttgtcaagcaagcatcacctggcaatctgcaagatgtcgaagatgaacttggaggccaattcgagtcggcacccatgatccttgctgtaaagatctcggccaaagccagcgaggcccgagctgtcggtgtatgcttcgcggatgccagtgtccgtgagctgggcgtgagcgagttcctcgacaacgacctatactccaacttcgaggcactactcatccagctgggtgtcaaggagtgtctagtgcagttcgacaaaacagacaaggagaaggatccagagctggctaagattcgacaaatcgtcgacaattgtggtgttgccctatctgagagacccgctggcgattttggagtgaaagacatcgagcaggatcttgcgcgactactcaaagacgaacgatccgcgacattgctaccccaaacagacctgaaacttgccatgggctcagcggccgctctgatcaagtacctgggtgttctacacgacacctcgaattttggccaataccagctgtaccaacacgatttgtctcagttcatgaaattagatgctgctgcactcaaggcattgaacttgatgccaggaccccgggacgggtcgaagaatatgagtgtgtatggtctgctcaatcactgcaggacgccagtcggcagccgactcttgtcacaatggttgaagcaaccccttatgaacagagaggagatcgtgaagcgccaacaacttgtcgaggcttttgttgaagatacagagcttcgacagactatgcaagaggaacacttgaaatcagtacccgatttataccgacttgccaaaagattccagcgcaacaaggccaatctcgaagatgtcgtgcgtgcttaccaagtcgtcatccgattgccgggctttctcggtactctagagggtgtgatggacgagaaatacaaggatcccctcgatgagacttacacgaacaagctgagaactctcagcgacgggttagggaagctggctgagatggttgagactaccgtagatctcgatgcgctcgataatcatgagttcatcatcaagccagagtttgacgacggcttacgaattgtcaggaagaagctcgataagctgcggtcgaacatggacaaggagtttcgcgacgtcgcaagagacctaaatcaagagcagggaaagaaaattttcctagagaatcaaaaggtacacggttggtgtatgcgattgacaagaaccgaagctggctgtattcgcaacaaagcgaagtatctggaatgttcaacgcagaaaagcggcgtcttcttcactacaaagacactgcagaattatagacgggaattcgatcagttgtcgcagacgtataacagaacccagagcagtctcgtcaacgaggtcgtcagtgtggccgcgtcatattgccctgttttggagcaacttgccggtgtacttgcacatctcgatgtcatcgtctcattcgcacattgcgctgtccatgcccctacatcctatgtacgaccaaccattcatcctcgcggacaggggtccacaatactaaaggaagctcggcacccatgtatggagatgcaagacgatgttcagttcatcacgaatgatgtcgatatgacgaggggcaaatcgtccttcctgattatcactggacccaacatgggtggtaaatccacgtacatccggcagattggagtcattgctctgatggcgcaaatcggctgtttcgtgccatgctccgaagcagaactcacaatcttcgattcgatcctcgcacgtgtcggcgccagcgattcgcagctcaagggtgtgtccacgttcatggccgaaatgttggagacggccaatatcctcaagagcgctacgaatgagtcgcttatcatcatcgatgaacttggtcgcggaacatctacttacgacggtttcggcctcgcgtgggctatttcagaacatatcgtgaaggagattggttgtttcgccatgttcgctacgcatttccacgagcttaccgcactagcggatcaatacgagcaggtttgcaatctgcatgtcactgcgcatatatcaggcacatcaaacagggagaatgagaagcgcgaagtgacgctgctatacaaagtcgagcccggtatttgtgatcagagtttcggtatccatgtagcagagctggtccgtttccccgacaaggttgtcaggatggcgaaacggaaagccgatgagcttgaggacttcacgacgaaacacgatactacgggtaccaagtatagcaagcaagatgtcgaggagggaagcgcgagactaaaggatgtgcttgtgcagtggaagaagaaagttgagggtggtagtatgagtagagaggagatggtgacgtgtatgagggagttggtcaagggcgacgacacgttgatggcaaatccattttttgaggctgtcaaagcgctttga

SEQ ID NO: 39285 - protein, 922 aa, Muscodor strobelii
  misc_feature: SGI Peptide ID NO. 573663
  misc_feature (13)..(123): Pfam Id: PF01624 Pfam Desc: MutS domain I
  misc_feature (134)..(280): Pfam Id: PF05188 Pfam Desc: MutS domain II
  misc_feature (287)..(604): Pfam Id: PF05192 Pfam Desc: MutS domain III
  misc_feature (463)..(559): Pfam Id: PF05190 Pfam Desc: MutS family domain IV
  misc_feature (609)..(852): Pfam Id: PF00488 Pfam Desc: MutS domain V
  misc_feature (2)..(882): NCBI GI: 254578468 Blast Desc: ZYRO0B06160p [Zygosaccharomyces rouxii] gi|238938110|emb|CAR26287.1| ZYRO0B06160p [Zygosaccharomyces rouxii]
  misc_feature (2)..(886): NCBI GI: 255712741 Blast Desc: KLTH0C09988p [Lachancea thermotolerans] gi|238934032|emb|CAR22215.1| KLTH0C09988p [Lachancea thermotolerans]
  misc_feature (1)..(922): NCBI GI: 85093179 Blast Desc: NCU02230 [Neurospora crassa OR74A] gi|3914053|sp|O13396.1|MSH2_NEUCR RecName: Full=DNA mismatch repair protein msh-2 gi|2606088|gb|AAB84225.1| DNA mismatch
  misc_feature (1)..(922): NCBI GI: 261354811 Blast Desc: DNA mismatch repair protein msh-2 [Verticillium albo-atrum VaMs.102]
  misc_feature (1)..(922): NCBI GI: 116203461 Blast Desc: DNA mismatch repair protein msh-2 [Chaetomium globosum CBS 148.51] gi|88175742|gb|EAQ83210.1| DNA mismatch repair protein msh-2 [Chaetomium globosum CBS 148.51]
  misc_feature (2)..(922): NCBI GI: 171679627 Blast Desc: protein product [Podospora anserina] gi|170939439|emb|CAP64667.1| protein product [Podospora anserina]
  misc_feature (1)..(922): NCBI GI: 145610825 Blast Desc: DNA mismatch repair protein msh-2 [Magnaporthe grisea 70-15] gi|145018176|gb|EDK02455.1| DNA mismatch repair protein msh-2 [Magnaporthe grisea 70-15]
  misc_feature (1)..(922): NCBI GI: 256732461 Blast Desc: [Nectria haematococca mpVI 77-13-4]
  misc_feature (1)..(922): NCBI GI: 46123905 Blast Desc: MSH2_NEUCR DNA mismatch repair protein MSH2 [Gibberella zeae PH-1]
  misc_feature (1)..(922): NCBI GI: 212528164 Blast Desc: DNA mismatch repair protein Msh2, [Penicillium marneffei ATCC 18224] gi|111380652|gb|ABH09703.1| MSH2-like protein [Penicillium marneffei] gi|210073637|gb|EEA27724.1| DNA
MSSRPELKVDDEHGFIRYFKSLPKVGDETVRIFDRGDWYTAHGEDANFIARTVYKTTSVVRQLGKNDASGLPSVTMTITVFRQFLREALFKLGKRIEIYASSGARMNWKVVKQASPGNLQDVEDELGGQFESAPMILAVKISAKASEARAVGVCFADASVRELGVSEFLDNDLYSNFEALLIQLGVKECLVQFDKTDKEKDPELAKIRQIVDNCGVALSERPAGDFGVKDIEQDLARLLKDERSATLLPQTDLKLAMGSAAALIKYLGVLHDTSNFGQYQLYQHDLSQFMKLDAAALKALNLMPGPRDGSKNMSVYGLLNHCRTPVGSRLLSQWLKQPLMNREEIVKRQQLVEAFVEDTELRQTMQEEHLKSVPDLYRLAKRFQRNKANLEDVVRAYQVVIRLPGFLGTLEGVMDEKYKDPLDETYTNKLRTLSDGLGKLAEMVETTVDLDALDNHEFIIKPEFDDGLRIVRKKLDKLRSNMDKEFRDVARDLNQEQGKKIFLENQKVHGWCMRLTRTEAGCIRNKAKYLECSTQKSGVFFTTKTLQNYRREFDQLSQTYNRTQSSLVNEVVSVAASYCPVLEQLAGVLAHLDVIVSFAHCAVHAPTSYVRPTIHPRGQGSTILKEARHPCMEMQDDVQFITNDVDMTRGKSSFLIITGPNMGGKSTYIRQIGVIALMAQIGCFVPCSEAELTIFDSILARVGASDSQLKGVSTFMAEMLETANILKSATNESLIIIDELGRGTSTYDGFGLAWAISEHIVKEIGCFAMFATHFHELTALADQYEQVCNLHVTAHISGTSNRENEKREVTLLYKVEPGICDQSFGIHVAELVRFPDKVVRMAKRKADELEDFTTKHDTTGTKYSKQDVEEGSARLKDVLVQWKKKVEGGSMSREEMVTCMRELVKGDDTLMANPFFEAVKAL

SEQ ID NO: 39286 - DNA, 5279 bp, Muscodor strobelii
  misc_feature: SGI EST ID NO. CUFF.94560.0
  misc_feature: Variant of the nucleotide sequence at SEQ ID NO 39284
gtaggcttcagatggacaattagcattaacgtcttcatcatgcttttgctctttgcatttcatgtgggctatctctaaatgacttcattatctcatgagtatagcagccagcaactcgaaagctcataattcgtcaacgcactgctagctaagcgcagcatcagaaggaggcacctcctcaatcttctctgcctcgagaggaggcgcagagaactcccgtcgatcaagggcattggtcttcagcccttcctcggcattatcgccatcaatctgcatcttgccttctcccttgtctacattcgccgtcgccgtatgatcattccctgtgaaagcactccgatcgtcggcttgagcctcttcgccaccatctttctcaaactcagatttcttcaagtcctcgatatgatcagcctcttcgtcgccgtcaactgcgatgctctctgcctcgtcatcgtttgccttcagcgtcccgccctttctcgtcggaatgacctccatgaaagctttgccccagtcacccgtctccagccacttgagcatgatctcaacaacgtggttcgtagcaaggacatgtctgctttggagcaccataaactctccaatgggtagtttggcggttctgacattcttctctctcgcgactttgtagcaaagacccttttccctattccggtcaatgatgccaccaataacgtatgatgtgttcggttcgagacgatcgagtgtgtacggggagtcggcggtgaggtagacgatggacttctcgacatcttcggcttcgggctcaggctttggtgcgttcttcagcttcttggggtttgagactgcgcttcccgtcattatcatagagtctccgtcctcctgctgcaggagagcaattttctcccctcccttgccgctctccatccactcctttgccttcttcgcagtctcgatgaagtcttgcttctcaaatatgaaattcttccagttggaatgctggttgtgcatgacattctcgtatctctctttcaagaagccgccgtacgagcttacgtacaagttgacggggtgtttcgcagtcctgttatcggagtaacatctcgtcacttgattcgcgagcgagacttgctcattgtcttgcatgtgtttctcgaactgacagtcgatgataatcgcgatgggcaccttgacgctattctgtggcttctgcttcttgacgagcccttcgagattgggctctctgccctcggcggctgcgacggtcttctcttcttcacggagggctcgcttgcgctccttacgttcgtgacgcttttccttccgcttcagggttcggtcggctctgttctcttcccgtatcctctgtctcttcagcttcctcatcttgttcttggagagtttgggttcatcggtgggatggacagcgtcattctcggcgttatcgccgtcttcgggatctccttcggcagaccgtttcgttccgcgttcgacatcggaggtgccagtgacttgcaagtcatggtctaggtcttgtcgcgcttgaatctctgacccctcggcggcggcgctctcgaggccaggcgcgtcggccacctccatagctgtcgtagtacgtgggtttcagacaattgagagcaattggaactagacgattggtgtttgatgcgctacagcacacggtgaggttgcgtacgacacgtgatggtgcagtgaaaatttggtgttacgggaagaacgatgagggaagcttgaaatggaagctacagtgggggaggttcgagaactctgcaggtctcgcccagtgcccctcttttgcggagaacgctgcagggaagagcttcccgcagcacaagcccacagctgcacactgccccgcacgttgaagctgccgggatttagcgcgtcccgtcgcgtcttccctgttaattgattttctgacatgacgcgattgctgtctgggttacctgattgtggtatcattttgtcgccttccatctcttcccaaaatcattgtatcgtcccaattctattcttctgagctgtactataaccttgagacgatacctatcgagagcatcgcgagacttgcatagcatccattctttccccaccgacccgagcggtcaccaattcatcgccaccatgtcttcccgacccgagttgaaggtcgacgatgagcatggcttcatcagatacttcaagtccctccccaaagttggcgatgagactgtcagaattttcgatcgaggtgactggtacacagcacacggtgaagatgctaacttcatcgcccggactgtatacaagactacctcggtcgtaagacaactgggcaaaaacgatgcgagcgggctgccatcagtcaccatgactatcaccgtcttccgacaattccttagagaagccctcttcaagctgggcaagcgaatcgagatatacgcaagcagcggtgcccgcatgaactggaaagttgtcaagcaagcatcacctggcaatctgcaagatgtcgaagatgaacttggaggccaattcgagtcggcacccatgatccttgctgtaaagatctcggccaaagccagcgaggcccgagctgtcggtgtatgcttcgcggatgccagtgtccgtgagctgggcgtgagcgagttcctcgacaacgacctatactccaacttcgaggcactactcatccagctgggtgtcaaggagtgtctagtgcagttcgacaaaacagacaaggagaaggatccagagctggctaagattcgacaaatcgtcgacaattgtggtgttgccctatctgagagacccgctggcgattttggagtgaaagacatcgagcaggatcttgcgcgactactcaaagacgaacgatccgcgacattgctaccccaaacagacctgaaacttgccatgggctcagcggccgctctgatcaagtacctgggtgttctacacgacacctcgaattttggccaataccagctgtaccaacacgatttgtctcagttcatgaaattagatgctgctgcactcaaggcattgaacttgatgccaggaccccgggacgggtcgaagaatatgagtgtgtatggtctgctcaatcactgcaggacgccagtcggcagccgactcttgtcacaatggttgaagcaaccccttatgaacagagaggagatcgtgaagcgccaacaacttgtcgaggcttttgttgaagatacagagcttcgacagactatgcaagaggaacacttgaaatcagtacccgatttataccgacttgccaaaagattccagcgcaacaaggccaatctcgaagatgtcgtgcgtgcttaccaagtcgtcatccgattgccgggctttctcggtactctagagggtgtgatggacgagaaatacaaggatcccctcgatgagacttacacgaacaagctgagaactctcagcgacgggttagggaagctggctgagatggttgagactaccgtagatctcgatgcgctcgataatcatgagttcatcatcaagccagagtttgacgacggcttacgaattgtcaggaagaagctcgataagctgcggtcgaacatggacaaggagtttcgcgacgtcgcaagagacctaaatcaagagcagggaaagaaaattttcctagagaatcaaaaggtacacggttggtgtatgcgattgacaagaaccgaagctggctgtattcgcaacaaagcgaagtatctggaatgttcaacgcagaaaagcggcgtcttcttcactacaaagacactgcagaattatagacgggaattcgatcagttgtcgcagacgtataacagaacccagagcagtctcgtcaacgaggtcgtcagtgtggccgcgtcatattgccctgttttggagcaacttgccggtgtacttgcacatctcgatgtcatcgtctcattcgcacattgcgctgtccatgcccctacatcctatgtacgaccaaccattcatcctcgcggacaggggtccacaatactaaaggaagctcggcacccatgtatggagatgcaagacgatgttcagttcatcacgaatgatgtcgatatgacgaggggcaaatcgtccttcctgattatcactggacccaacatgggtggtaaatccacgtacatccggcagattggagtcattgctctgatggcgcaaatcggctgtttcgtgccatgctccgaagcagaactcacaatcttcgattcgatcctcgcacgtgtcggcgccagcgattcgcagctcaagggtgtgtccacgttcatggccgaaatgttggagacggccaatatcctcaagagcgctacgaatgagtcgcttatcatcatcgatgaacttggtcgcggaacatctacttacgacggtttcggcctcgcgtgggctatttcagaacatatcgtgaaggagattggttgtttcgccatgttcgctacgcatttccacgagcttaccgcactagcggatcaatacgagcaggtttgcaatctgcatgtcactgcgcatatatcaggcacatcaaacagggagaatgagaagcgcgaagtgacgctgctatacaaagtcgagcccggtatttgtgatcagagtttcggtatccatgtagcagagctggtccgtttccccgacaaggttgtcaggatggcgaaacggaaagccgatgagcttgaggacttcacgacgaaacacgatactacgggtaccaagtatagcaagcaagatgtcgaggagggaagcgcgagactaaaggatgtgcttgtgcagtggaagaagaaagttgagggtggtagtatgagtagagaggagatggtgacgtgtatgagggagttggtcaagggcgacgacacgttgatggcaaatccattttttgaggctgtcaaagcgctttgagcgttttataaatttctgttcagctctggcgttgggggtataagggtaggaattgaggctttgggacaatttgcgactgggattgccggcgtgtaaaattttgtcagacggaagtctcatggcatcatgtcgagactggcgctgttgcgatagcttgtaattgtaattacattgagccttcaacgtacttggctggcatctttggaggggttcgtataatctgctcaccatctgtgaaatcgtactatatccaaagcttgctccttatgatttctgcttcttgcctttttttcctttcttctttgtcttcgccttcttcgctttgctctccgctttttcctgttttctatcgaatatcttccgtacctcatcgtagtcgaaatccg

SEQ ID NO: 39287 - DNA, 1437 bp, Muscodor strobelii
  misc_feature: SGI cDNA ID NO. 573664
  misc_feature: Encodes the peptide sequence at SEQ ID NO 39288
atggaggtggccgacgcgcctggcctcgagagcgccgccgccgaggggtcagagattcaagcgcgacaagacctagaccatgacttgcaagtcactggcacctccgatgtcgaacgcggaacgaaacggtctgccgaaggagatcccgaagacggcgataacgccgagaatgacgctgtccatcccaccgatgaacccaaactctccaagaacaagatgaggaagctgaagagacagaggatacgggaagagaacagagccgaccgaaccctgaagcggaaggaaaagcgtcacgaacgtaaggagcgcaagcgagccctccgtgaagaagagaagaccgtcgcagccgccgagggcagagagcccaatctcgaagggctcgtcaagaagcagaagccacagaatagcgtcaaggtgcccatcgcgattatcatcgactgtcagttcgagaaacacatgcaagacaatgagcaagtctcgctcgcgaatcaagtgacgagatgttactccgataacaggactgcgaaacaccccgtcaacttgtacgtaagctcgtacggcggcttcttgaaagagagatacgagaatgtcatgcacaaccagcattccaactggaagaatttcatatttgagaagcaagacttcatcgagactgcgaagaaggcaaaggagtggatggagagcggcaagggaggggagaaaattgctctcctgcagcaggaggacggagactctatgataatgacgggaagcgcagtctcaaaccccaagaagctgaagaacgcaccaaagcctgagcccgaagccgaagatgtcgagaagtccatcgtctacctcaccgccgactccccgtacacactcgatcgtctcgaaccgaacacatcatacgttattggtggcatcattgaccggaatagggaaaagggtctttgctacaaagtcgcgagagagaagaatgtcagaaccgccaaactacccattggagagtttatggtgctccaaagcagacatgtccttgctacgaaccacgttgttgagatcatgctcaagtggctggagacgggtgactggggcaaagctttcatggaggtcattccgacgagaaagggcgggacgctgaaggcaaacgatgacgaggcagagagcatcgcagttgacggcgacgaagaggctgatcatatcgaggacttgaagaaatctgagtttgagaaagatggtggcgaagaggctcaagccgacgatcggagtgctttcacagggaatgatcatacggcgacggcgaatgtagacaagggagaaggcaagatgcagattgatggcgataatgccgaggaagggctgaagaccaatgcccttgatcgacgggagttctctgcgcctcctctcgaggcagagaagattgaggaggtgcctccttctgatgctgcgcttagctag

SEQ ID NO: 39288 - protein, 478 aa, Muscodor strobelii
  misc_feature: SGI Peptide ID NO. 573664
  misc_feature (150)..(369): Pfam Id: PF01746 Pfam Desc: tRNA (Guanine-1)-methyltransferase
  misc_feature (273)..(369): Pfam Id: PF01746 Pfam Desc: tRNA (Guanine-1)-methyltransferase
  misc_feature (150)..(218): Pfam Id: PF01746 Pfam Desc: tRNA (Guanine-1)-methyltransferase
  misc_feature (53)..(384): NCBI GI: 116203463 Blast Desc: CHGG_09615 [Chaetomium globosum CBS 148.51] gi|88175743|gb|EAQ83211.1| CHGG_09615 [Chaetomium globosum CBS 148.51]
  misc_feature (56)..(380): NCBI GI: 39973947 Blast Desc: MGG_00880 [Magnaporthe grisea 70-15] gi|145018175|gb|EDK02454.1| MGG_00880 [Magnaporthe grisea 70-15]
  misc_feature (45)..(374): NCBI GI: 46123921 Blast Desc: FG06338.1 [Gibberella zeae PH-1] gi|83305932|sp|Q4I8X0.1|TRM10_GIBZE RecName: Full=tRNA (guanine-N(1)-)-methyltransferase; AltName: Full=tRNA 10
  misc_feature (64)..(389): NCBI GI: 256732912 Blast Desc: NECHADRAFT_4974 [Nectria haematococca mpVI 77-13-4]
  misc_feature (66)..(374): NCBI GI: 171679625 Blast Desc: protein product [Podospora anserina] gi|170939438|emb|CAP64666.1| protein product [Podospora anserina]
  misc_feature (51)..(375): NCBI GI: 85093183 Blast Desc: NCU02231 [Neurospora crassa OR74A] gi|28921090|gb|EAA30408.1| [Neurospora crassa OR74A]
  misc_feature (26)..(381): NCBI GI: 119492250 Blast Desc: tRNA m(1)G methyltransferase domain containing protein [Neosartorya fischeri NRRL 181] gi|119411724|gb|EAW21667.1| tRNA m(1)G methyltransferase domain containing protein [Neosartorya
  misc_feature (53)..(381): NCBI GI: 71000046 Blast Desc: tRNA m(1)G methyltransferase domain containing protein [Aspergillus fumigatus Af293] gi|74674137|sp|Q4WXA1.1|TRM10_ASPFU RecName: Full=tRNA (guanine-N(1)-)-methyltransferase; AltName: 10
  misc_feature (153)..(386): NCBI GI: 261354810 Blast Desc: tRNA (guanine-N(1)-)-methyltransferase [Verticillium albo-atrum VaMs.102]
  misc_feature (35)..(381): NCBI GI: 121705264 Blast Desc: tRNA m(1)G methyltransferase domain containing protein [Aspergillus clavatus NRRL 1] gi|119399041|gb|EAW09469.1| tRNA m(1)G methyltransferase domain containing protein [Aspergillus 1]
  misc_feature (45)..(374): SWISSPROT Homolog: EC 2.1.1.31 tRNA (guanine-N(1)-)-methyltransferase
MEVADAPGLESAAAEGSEIQARQDLDHDLQVTGTSDVERGTKRSAEGDPEDGDNAENDAVHPTDEPKLSKNKMRKLKRQRIREENRADRTLKRKEKRHERKERKRALREEEKTVAAAEGREPNLEGLVKKQKPQNSVKVPIAIIIDCQFEKHMQDNEQVSLANQVTRCYSDNRTAKHPVNLYVSSYGGFLKERYENVMHNQHSNWKNFIFEKQDFIETAKKAKEWMESGKGGEKIALLQQEDGDSMIMTGSAVSNPKKLKNAPKPEPEAEDVEKSIVYLTADSPYTLDRLEPNTSYVIGGIIDRNREKGLCYKVAREKNVRTAKLPIGEFMVLQSRHVLATNHVVEIMLKWLETGDWGKAFMEVIPTRKGGTLKANDDEAESIAVDGDEEADHIEDLKKSEFEKDGGEEAQADDRSAFTGNDHTATANVDKGEGKMQIDGDNAEEGLKTNALDRREFSAPPLEAEKIEEVPPSDAALS

SEQ ID NO: 39289 - DNA, 1236 bp, Muscodor strobelii
  misc_feature: SGI cDNA ID NO. 573665
  misc_feature: Encodes the peptide sequence at SEQ ID NO 39290
atgactgttcccatggcctctgagcgaggcacgaaacttgtcgatggagggcacaaaggactgccggaagggacgaattatgcatcgaagcaggcagagtacgacctaaaagctttactcggcacaatagttaccctgtccaagccactgggaacacgggagacagaccttgaacagacaaacgccactttatcccatatccacaagagtttagtccaagagaaatggaaagagcttgaggtcaagttccagatccaccaacagcacatgcatgtccaattctcgcagtggattgttttgcaattccagaattacccgtctagtaacctcgacgcaatactcagtttggtgtatcactcacgactaaatgggtttgatccgcacaaaagcatgtgtcttaagttcattgccaacatgtgtggctgctcggtctggcggctgtgccttcatttcaacgacggtctattgatggaagagtccatgaaagccatatggtctgatctcaaaaaggcggcgctgtatgttggcgccatagagtactggttcggagagatctatcgccaggcggcaacacgactcgaagtccacgtagcaagcattactcgctacaggatcttgaaggaggacattctagccatagtccagagaatcacggaagagagtgcaagtgaaccggaatcaaagatcgttacgcttaaagtaccaggtctagagcgcttcatgcagaaaaaggaggcttcggaagttgctacttctcgaggagtcgacggcaaagcaagctctagcactgccaaagtgatacgcgtgctgacggatgatgacaaggctgtgaacccaaagaatcaagcaaaatctgatcgaagtcttcacggaaccaagaaccctggcactggctcctcctgggatttcgtggtccgatatcaacaagcgaagaacgagctcttagacaatgagaaacaattgtcccgtcaacttgagattcagaagacccagcgtgaggcagcattaaataattgtcgcacttacactcagcagaccaatgccgtaggaggcgttcaatgggacaaaatacaaggctgcctggatactgctaaagactacgagaagacaataaacaaaacgactgaccgactcgaaatacgaaaagccaaacgtcgtcgccttgacgacctaattacccagcgcaatagtttgtctcagcagctacgcaagaatcatgaggagatcgagaaatag

SEQ ID NO: 39290 - protein, 411 aa, Muscodor strobelii
  misc_feature: SGI Peptide ID NO. 573665
MTVPMASERGTKLVDGGHKGLPEGTNYASKQAEYDLKALLGTIVTLSKPLGTRETDLEQTNATLSHIHKSLVQEKWKELEVKFQIHQQHMHVQFSQWIVLQFQNYPSSNLDAILSLVYHSRLNGFDPHKSMCLKFIANMCGCSVWRLCLHFNDGLLMEESMKAIWSDLKKAALYVGAIEYWFGEIYRQAATRLEVHVASITRYRILKEDILAIVQRITEESASEPESKIVTLKVPGLERFMQKKEASEVATSRGVDGKASSSTAKVIRVLTDDDKAVNPKNQAKSDRSLHGTKNPGTGSSWDFVVRYQQAKNELLDNEKQLSRQLEIQKTQREAALNNCRTYTQQTNAVGGVQWDKIQGCLDTAKDYEKTINKTTDRLEIRKAKRRRLDDLITQRNSLSQQLRKNHEEIEK

SEQ ID NO: 39291 - DNA, 288 bp, Muscodor strobelii
  misc_feature: SGI EST ID NO. CUFF.94544.0
  misc_feature: Variant of the nucleotide sequence at SEQ ID NO 39289
cccagcgtgaggcagcattaaataattgtcgcacttacactcagcagaccaatgccgtaggaggcgttcaatgggacaaaatacaaggctgcctggatactgctaaagactacgagaagacaataaacaaaacgactgaccgactcgaaatacgaaaagccaaacgtcgtcgccttgacgacctaattacccagcgcaatagtttgtctcagcagctacgcaagaatcatgaggagatcgagaaatagttggagagtgaggagggtccctcaggggcgtagtcagttg

SEQ ID NO: 39292 - DNA, 1167 bp, Muscodor strobelii
  misc_feature: SGI cDNA ID NO. 573666
  misc_feature: Encodes the peptide sequence at SEQ ID NO 39293
atggcgccaagtgcccctgcaacgatgcaagacgcggctcaaggtccaatcgccactgaagaaagcctacagggaggcagtgcgggagagtctcccaaggcactggtggcgttattccagtcaatcttggctacacacaaggcttatcaagcgcgtgaagcagatgtactcagggacgggaaggacccggtccgggaccagagattttgcaggttcagaggagacatcgcccgtcaatggaaactgctcagcgatcgatggactttgatctcagaagatatgaactgtccatttccgcaatgggtagaggatcagtgcgaagacctctccgacgctgagtttgacagtctgcttgcagtcatctataagaaaagaaacgaaaatctgacaattactggcaagaccctgaatgacatcacgaaagtctgcaggtgctcaatatggcgaatacatctccacctagactacaaagtgttgctcaacccggaaattgcgaccatcttcccaatttttttccgaatgcaaatcgagctaccgtatcgtgttcttttcgaagcgttctacaggcaaaccgctgcccgtcgacgcctttacctctcgggcatcgagagtgcaaacatcaccaggaacgacataatgcacacaacacacgccgcagttgagaattgcttgagactcttcaataccgagaaggcccacagagatcatcgacgatccgaaatcgatacctctccactggtagtttgcgtcgtagacaggaacgacaacgaaaggagaaataatatcgagaaagccggttcagatcaaaaagaagtcaagtctcatgccgacaaagatctagacgccgccaccgtattagacagactcgacaaatctactgaccattgctacagacgaggagcgcgagatgagacctgggacacattctctacatggacgggagactccaatgctaaagacggcgttccttggaattcaattaacagcaacctcgagactctcagagagaaagaggctgatgtcaagcaggcagcggagcagttggaggatagtcgggcaaaacgccggcggatggaggaaaggattgagcctcacgaggaggcactgaattgcatcatagatgtcatgaaggaaatcgaaggtgccgtcaaagcatctaaggagtag

SEQ ID NO: 39293 - protein, 388 aa, Muscodor strobelii
  misc_feature: SGI Peptide ID NO. 573666
MAPSAPATMQDAAQGPIATEESLQGGSAGESPKALVALFQSILATHKAYQAREADVLRDGKDPVRDQRFCRFRGDIARQWKLLSDRWTLISEDMNCPFPQWVEDQCEDLSDAEFDSLLAVIYKKRNENLTITGKTLNDITKVCRCSIWRIHLHLDYKVLLNPEIATIFPIFFRMQIELPYRVLFEAFYRQTAARRRLYLSGIESANITRNDIMHTTHAAVENCLRLFNTEKAHRDHRRSEIDTSPLVVCVVDRNDNERRNNIEKAGSDQKEVKSHADKDLDAATVLDRLDKSTDHCYRRGARDETWDTFSTWTGDSNAKDGVPWNSINSNLETLREKEADVKQAAEQLEDSRAKRRRMEERIEPHEEALNCIIDVMKEIEGAVKASKE

SEQ ID NO: 39294 - DNA, 483 bp, Muscodor strobelii
  misc_feature: SGI cDNA ID NO. 573667
  misc_feature: Encodes the peptide sequence at SEQ ID NO 39295
atgaacacgcacccgaccagccggcagacaaggagtaccgtgtttatcttgatgcaaaggatcgagtcgacctttccccgatcgaccagcgtcctgttcgaagtctatgaagtcagaaaaatgatggtggatgtcgctcgtatgcagtctgaagcacttcagaaggaggccaagcgaaaacgggcattggacagtaagagacgcgagtgggatacagcgtgggacgactaccgaagtagtgtcatgatggccgatcctggcagcggggtgcggttcaaagacttgcaaacgcagttcggtgttgctgagagacctgactatgaagtcaaggcatgcgaggccagtctgcagaagattggcctcaaacgacgtcggactaagggcttgatgaagctacaggacaagtgcattcagaaattcattggtggaatcagggaagttgaggatcccatgggtgatgcctttgccgaggagcgaagataa

SEQ ID NO: 39295 - protein, 160 aa, Muscodor strobelii
  misc_feature: SGI Peptide ID NO. 573667
MNTHPTSRQTRSTVFILMQRIESTFPRSTSVLFEVYEVRKMMVDVARMQSEALQKEAKRKRALDSKRREWDTAWDDYRSSVMMADPGSGVRFKDLQTQFGVAERPDYEVKACEASLQKIGLKRRRTKGLMKLQDKCIQKFIGGIREVEDPMGDAFAEERR

SEQ ID NO: 39296 - DNA, 529 bp, Muscodor strobelii
  misc_feature: SGI EST ID NO. CUFF.94553.0
  misc_feature: Variant of the nucleotide sequence at SEQ ID NO 39294
ggaagaagtcaatcgatccaaggatagtgtcgaagatctactgaagaacatcaatccagccgattatatgcgcattggaatctacgacggaacaagccattcatcagacaaacccacgcctacaaatgatatttctagagtagaccatgatcaagatgaacacgcacccgaccagccggcagacaaggagtaccgtgtttatcttgatgcaaaggatcgagtcgacctttccccgatcgaccagcgtcctgttcgaagtctatgaagtcagaaaaatgatggtggatgtcgctcgtatgcagtctgaagcacttcagaaggaggccaagcgaaaacgggcattggacagtaagagacgcgagtgggatacagcgtgggacgactaccgaagtagtgtcatgatggccgatcctggcagcggggtgcggttcaaagacttgcaaacgcagttcggtgttgctgagagacctgactatgaagtcaaggcatgcgaggccagtctgcagaagattggcctcaaacgacgtcg

SEQ ID NO: 39297 - DNA, 1449 bp, Muscodor strobelii
  misc_feature: SGI cDNA ID NO. 573668
  misc_feature: Encodes the peptide sequence at SEQ ID NO 39298
atgtccattcattcatcctcaaccatatcactcatcgttccaagccctattgagccactctttcctgcaacactcatcggcgaatcaacatctctcactcacgctctcggtcacgataccgcatctccaaccatgccgaagtataagcatgttatcgcgcaactgcgcgaagactacgatgccctcgtctacgctcgagagcagggagacaacgacaacggcgtccgcaacggccctcgcgaagctgacgttctcgcacagtggacagaactctcggtcaggtatagatctcttaaaggagtcagatggtcgcgcccgtttcctttgggaatcgagagttcgttcacgcaggacccggagtatcttgacaagcttcttgcacttgtctaccgtcgagagcttctcggtcttacactagaacaatccagtctcgtaaaatccgttgcgcatgccttcaaatgctctatctggcgcctgttcctgtacttccagcctgcggtgttcggaaaaacgctcgcgggtgatgtcattgagttccgtgcccagcacgccacacaagatgcacgggtcttcttcatgagtgcgtatctttgttgtgcctctcgccatagacgtcatgtcgcagacatccagcgtggagacgtagaggccagagatatcagaatggcgacggacagaaaccacatcggttcagccctcagtctttacggagatttgagtgcagactctatcgccggggctgacctaaccgaagacgatattcagcaatcgattgagagcgacgagacacccgagaccaccacccctaagaacccctccagcccgactatcaccgcaagtaatactggtgatgaaaatgaatccagagctatcggacaagccaacggcaccgaaatagtccgccatgacggtgatgagaatgagcatagtgagtctgccacaggcaaatttgacggacatcctcgtattaatccaactacagtcagggtctctatcaagctagaggaagccaacgaaacaacaaaccagaacaatttcgagcatgacatcactcatatccagaaggatctggataacatccgccggttcccacagcttctcaaactcagaaacgatctgaaggtcgaagagaacgaatgtgccacggctcttggcaatagtaagagagaacgagatgatatctgggccaagtttacaacgtgggtaaacggtgttgattcgtctgttggtgtttcgattgatgacttccataccaaaaccacagtcgtgagcaacgcagggcaagccacgaaagatgcggaggagagattggaagagactcgtaccaagagacgtcgagttgaggaaacgatcaaaccccacgaagagaatgttcgtaggctcgccaaagacttcaaacggcttcaagacaatatgaaacttctcaatgaagataattctggacattaa

SEQ ID NO: 39298 - protein, 482 aa, Muscodor strobelii
  misc_feature: SGI Peptide ID NO. 573668
MSIHSSSTISLIVPSPIEPLFPATLIGESTSLTHALGHDTASPTMPKYKHVIAQLREDYDALVYAREQGDNDNGVRNGPREADVLAQWTELSVRYRSLKGVRWSRPFPLGIESSFTQDPEYLDKLLALVYRRELLGLTLEQSSLVKSVAHAFKCSIWRLFLYFQPAVFGKTLAGDVIEFRAQHATQDARVFFMSAYLCCASRHRRHVADIQRGDVEARDIRMATDRNHIGSALSLYGDLSADSIAGADLTEDDIQQSIESDETPETTTPKNPSSPTITASNTGDENESRAIGQANGTEIVRHDGDENEHSESATGKFDGHPRINPTTVRVSIKLEEANETTNQNNFEHDITHIQKDLDNIRRFPQLLKLRNDLKVEENECATALGNSKRERDDIWAKFTTWVNGVDSSVGVSIDDFHTKTTVVSNAGQATKDAEERLEETRTKRRRVEETIKPHEENVRRLAKDFKRLQDNMKLLNEDNSGH

SEQ ID NO: 39299 - DNA, 894 bp, Muscodor strobelii
  misc_feature: SGI cDNA ID NO. 573669
  misc_feature: Encodes the peptide sequence at SEQ ID NO 39300
atgccagtcaaaacagtcctcgtcaccggttgcggtgaagcgggcattggctctgcacttgcgatcgaattccacctgcgcgggcatcgggttttcgcaacgggtgtctcggaagccaagataacacatctggtcaatatcggaattgagggttttgcgctcgatgtgacgtcagcgcaatctatcgagagtgctgtatcgcgaatcgcagaaacagccgggggcaagcttaatattttggtcaacaatgcaggtataatgcatatactgcccttcgccgacacggacattgaagaggtgagaaaggttatggaagtcaattttttgggcgtctttgctacgacgagagcctttcttccgcttctgattgaggcagcgaagcacgggcagggcgactctatagtagctagtcttggcagcgtgaaccaagtgttccatcctccattactaggcgcgtacaatgcatcaaaggccgcagtcgaaacatggggcgcgagcatacgaactgaacttgcgcctctaggcgtacgggtcattacactgaagaccgggagcatcagatcagatttgtttaaaaatgccccacctaccgttctaccagccgacagtttctatcggcctgccaaggagtatattgaagggcgaaagatgctggaagagggccaatttgtagatgcggatgcgtacgcaaaaaccgttgtcgacaaacttttacgaaaaactgtaaggcacgtcatttgggcgggcggcctcagcacgatcgggtggcttttaagttggtttggatgggaaggcatgatgctcgtcaagaaggagacggagaccagatattctgctttggacaaaatggggtttatacacttaggtgtcattgccgcatattaccgcacataa

SEQ ID NO: 39300 - protein, 297 aa, Muscodor strobelii
  misc_feature: SGI Peptide ID NO. 573669
  misc_feature (4)..(172): Pfam Id: PF00106 Pfam Desc: short chain dehydrogenase
  misc_feature (4)..(249): NCBI GI: 256726696 Blast Desc: NECHADRAFT_75956 [Nectria haematococca mpVI 77-13-4]
  misc_feature (1)..(263): NCBI GI: 145254010 Blast Desc: An18g00230 [Aspergillus niger] gi|134084069|emb|CAK43099.1| protein product [Aspergillus niger]
  misc_feature (1)..(263): NCBI GI: 119467458 Blast Desc: short-chain dehydrogenase/reductase, [Neosartorya fischeri NRRL 181] gi|119405687|gb|EAW15638.1| short-chain dehydrogenase/reductase, [Neosartorya fischeri NRRL 181]
  misc_feature (1)..(263): NCBI GI: 146324313 Blast Desc: short-chain dehydrogenase/reductase [Aspergillus fumigatus Af293] gi|129556254|gb|EAL85701.2| short-chain dehydrogenase/reductase, [Aspergillus fumigatus Af293] fumigatus
  misc_feature (1)..(284): NCBI GI: 154317593 Blast Desc: BC1G_03148 [Botryotinia fuckeliana B05.10] gi|150844322|gb|EDN19515.1| BC1G_03148 [Botryotinia fuckeliana B05.10]
  misc_feature (1)..(261): NCBI GI: 156049501 Blast Desc: SS1G_08457 [Sclerotinia sclerotiorum 1980] gi|154692856|gb|EDN92594.1| SS1G_08457 [Sclerotinia sclerotiorum 1980]
  misc_feature (4)..(263): NCBI GI: 256723231 Blast Desc: NECHADRAFT_86494 [Nectria haematococca mpVI 77-13-4]
  misc_feature (3)..(258): NCBI GI: 169768462 Blast Desc: [Aspergillus oryzae RIB40] gi|238497766|ref|XP_002380118.1| estradiol 17 beta-dehydrogenase, [Aspergillus flavus NRRL3357] gi|83766559|dbj|BAE56699.1| protein
  misc_feature (1)..(259): NCBI GI: 242774205 Blast Desc: short-chain dehydrogenase/reductase, [Talaromyces stipitatus ATCC 10500] gi|218722013|gb|EED21431.1| short-chain dehydrogenase/reductase, [Talaromyces stipitatus ATCC 10500]
  misc_feature (4)..(267): NCBI GI: 212538923 Blast Desc: short-chain dehydrogenase, [Penicillium marneffei ATCC 18224] gi|210069359|gb|EEA23450.1| short-chain dehydrogenase, [Penicillium marneffei ATCC 18224]
  misc_feature (1)..(261): SWISSPROT Homolog: EC 1.1.1.101 Acylglycerone-phosphate reductase
MPVKTVLVTGCGEAGIGSALAIEFHLRGHRVFATGVSEAKITHLVNIGIEGFALDVTSAQSIESAVSRIAETAGGKLNILVNNAGIMHILPFADTDIEEVRKVMEVNFLGVFATTRAFLPLLIEAAKHGQGDSIVASLGSVNQVFHPPLLGAYNASKAAVETWGASIRTELAPLGVRVITLKTGSIRSDLFKNAPPTVLPADSFYRPAKEYIEGRKMLEEGQFVDADAYAKTVVDKLLRKTVRHVIWAGGLSTIGWLLSWFGWEGMMLVKKETETRYSALDKMGFIHLGVIAAYYRT

SEQ ID NO: 39301 - DNA, 707 bp, Muscodor strobelii
  misc_feature: SGI EST ID NO. CUFF.94574.0
  misc_feature: Variant of the nucleotide sequence at SEQ ID NO 39299
ctttcttccgcttctgattgaggcagcgaagcacgggcagggcgactctatagtagctagtcttggcagcgtgaaccaagtgttccatcctccattactaggcgcgtacaatgcatcaaaggccgcagtcgaaacatggggcgcgagcatacgaactgaacttgcgcctctaggcgtacgggtcattacactgaagaccgggagcatcagatcagatttgtttaaaaatgccccacctaccgttctaccagccgacagtttctatcggcctgccaaggagtatattgaagggcgaaagatgctggaagagggccaatttgtagatgcggatgcgtacgcaaaaaccgttgtcgacaaacttttacgaaaaactgtaaggcacgtcatttgggcgggcggcctcagcacgatcgggtggcttttaagttggtttggatgggaaggcatgatggacggctacttatcaaggatgcaccaatttgataaagtgcgcccttaatatcgatgactttcgctgttgactgaactgttgaccaatagctcgtcaagaaggagacggagaccagatattctgctttggacaaaatggggtttatacacttaggtgtcattgccgcatattaccgcacataaggaaacacgtgtgcctctccactagttaaccacaacaaatattatttcatttggcaaaaagtaacataagtcat

SEQ ID NO: 39302 - DNA, 1719 bp, Muscodor strobelii
  misc_feature: SGI cDNA ID NO. 573670
  misc_feature: Elevated expression when VOC is produced
  misc_feature: Encodes the peptide sequence at SEQ ID NO 39303
atgagttggccctggcagtttgtcgatctcgacgatgcacagaagaaagcacgacgccatgctatggatcgctatgcattggtcgcacagctctcggccctagctcctgttatcgtgttcttggtatatcgcgcgacgaaatggtcaatagctaaggcaactggatccagtcacgggtcgtactctgctttgcctggttcgcccgtgtctaaacagcggcgattgagcaccgctgggtcatggacagcgaaatggcgcaagctcgcatggtggctcggcgatgaaatcgttatcatgggttggaactggggtccgagggatcaaatgattggaggggccatatggggactctggctggccattctttccgtaagaggcacgggaaatgactaccttcatctcacaaagcgattgggcatcgtcggtgtgtctcaactcccagtgcagtatctaatgtcactcaagagtttgaatccatttgccccgatcttcaactcatcgcacgaggagattaaccggtggcatcgcactctcggtcgcgtcatttatgtgctgctgagtcttcacgcatccttatatttcaacttctactggcagaacaacctactcgggcagaagattacaagcctcgttccggtgctggggtttaccgctgctttctcgatgcagttgctgtctggaaccgctctctcagtcgtccgacaatattcataccgtgttttcttcattactcatctgatagtggcacttgcgctgccgccaattgtctacttccatgcccatcactcgtccttttacgtgtgggaagctatcattgtcttcatcgctgacattgcgagccgcagaatcggcactattgtcgctgacacagaagttgagcttatacccggtactgatcttctgaaacttacagggagcataccaagtgacaaggtcgacaaatttgcaaagaatccaggatcacacgtctacctcagcgtccctcctgcctcgcggccggacaagaacccggtcgctgcagctcacctgatctttgaatgcactttcaaccccttctctgtggccgcggtagatgatgcatctgggagcttgacgctggtcgcgcggcaacataacggtcccatgaccacagcgttctctcacttcgctaggaacgtagatggcgaagcaaaggtcaaacttgcattcgacgggccgtatggatgtgcaaagcgcttccccaatctcgccggtcccgactttgatcgtgttctactagtagctggaggcgttggcgcgacattcgtccttccgctctatcgctggatcctgagtgagaatccatctgcacgggtccagatggtatgggctgtcagaggagcaggtgaagccacgtggcctgtaatcgagaatggaaagggaattgtagatgatgacaacgttcagctatttctcacgggcgatatacttacaagcggaaatgctcgaggggattcgcgaggcagcgttgatgaggtggagcttcgggcaatgagcgggcaacggcagcctgtatctagtgcaaggagaccggatttacaaaacatcgtcgacggcgtcttcaaacagggactcgaagagcgagtggccgttctagtatgtgggcctgatgccatggcacgcgagctcagagcgcatgttggtacttgggtgaacaaaggcagatatgtgtggtggcataatgagagttttgcatggtag

SEQ ID NO: 39303 - protein, 572 aa, Muscodor strobelii
  misc_feature: SGI Peptide ID NO. 573670
  misc_feature (138)..(256): Pfam Id: PF01794 Pfam Desc: Ferric reductase like transmembrane component
  misc_feature (414)..(554): Pfam Id: PF08030 Pfam Desc: Ferric reductase NAD binding domain
  misc_feature (516)..(554): Pfam Id: PF08030 Pfam Desc: Ferric reductase NAD binding domain
  misc_feature (414)..(453): Pfam Id: PF08030 Pfam Desc: Ferric reductase NAD binding domain
  misc_feature (1)..(572): NCBI GI: 256735340 Blast Desc: NECHADRAFT_75061 [Nectria haematococca mpVI 77-13-4]
  misc_feature (1)..(572): NCBI GI: 46105412 Blast Desc: FG00334.1 [Gibberella zeae PH-1]
  misc_feature (1)..(572): NCBI GI: 85094620 Blast Desc: NCU02278 [Neurospora crassa OR74A] gi|28921379|gb|EAA30686.1| [Neurospora crassa OR74A] gi|40804609|emb|CAF05869.1| related to ferric reductase crassa]
  misc_feature (3)..(572): NCBI GI: 171679535 Blast Desc: protein product [Podospora anserina] gi|170939393|emb|CAP64621.1| protein product [Podospora anserina]
  misc_feature (5)..(572): NCBI GI: 116203557 Blast Desc: CHGG_09662 [Chaetomium globosum CBS 148.51] gi|88175790|gb|EAQ83258.1| CHGG_09662 [Chaetomium globosum CBS 148.51]
  misc_feature (1)..(572): NCBI GI: 156039489 Blast Desc: SS1G_11881 [Sclerotinia sclerotiorum 1980] gi|154697618|gb|EDN97356.1| SS1G_11881 [Sclerotinia sclerotiorum 1980]
  misc_feature (1)..(572): NCBI GI: 121711992 Blast Desc: metalloreductase, [Aspergillus clavatus NRRL 1] gi|119401763|gb|EAW12185.1| metalloreductase, [Aspergillus clavatus NRRL 1]
  misc_feature (1)..(572): NCBI GI: 154291489 Blast Desc: BC1G_15265 [Botryotinia fuckeliana B05.10] gi|150846763|gb|EDN21956.1| BC1G_15265 [Botryotinia fuckeliana B05.10]
  misc_feature (1)..(571): NCBI GI: 255955155 Blast Desc: Pc21g13060 [Penicillium chrysogenum Wisconsin 54-1255] gi|211590041|emb|CAP96203.1| Pc21g13060 [Penicillium chrysogenum Wisconsin 54-1255]
  misc_feature (1)..(572): NCBI GI: 70986252 Blast Desc: metalloreductase Fre8 [Aspergillus fumigatus Af293] gi|66846249|gb|EAL86582.1| metalloreductase Fre8, [Aspergillus fumigatus Af293]
  misc_feature (137)..(555): SWISSPROT Homolog: EC 1.16.1.7 Ferric-chelate reductase
  misc_feature: Useful for introducing or modulating the production of volatile compounds
MSWPWQFVDLDDAQKKARRHAMDRYALVAQLSALAPVIVFLVYRATKWSIAKATGSSHGSYSALPGSPVSKQRRLSTAGSWTAKWRKLAWWLGDEIVIMGWNWGPRDQMIGGAIWGLWLAILSVRGTGNDYLHLTKRLGIVGVSQLPVQYLMSLKSLNPFAPIFNSSHEEINRWHRTLGRVIYVLLSLHASLYFNFYWQNNLLGQKITSLVPVLGFTAAFSMQLLSGTALSVVRQYSYRVFFITHLIVALALPPIVYFHAHHSSFYVWEAIIVFIADIASRRIGTIVADTEVELIPGTDLLKLTGSIPSDKVDKFAKNPGSHVYLSVPPASRPDKNPVAAAHLIFECTFNPFSVAAVDDASGSLTLVARQHNGPMTTAFSHFARNVDGEAKVKLAFDGPYGCAKRFPNLAGPDFDRVLLVAGGVGATFVLPLYRWILSENPSARVQMVWAVRGAGEATWPVIENGKGIVDDDNVQLFLTGDILTSGNARGDSRGSVDEVELRAMSGQRQPVSSARRPDLQNIVDGVFKQGLEERVAVLVCGPDAMARELRAHVGTWVNKGRYVWWHNESFAW

SEQ ID NO: 39304 - DNA, 1957 bp, Muscodor strobelii
  misc_feature: SGI EST ID NO. CUFF.94631.0
  misc_feature: Variant of the nucleotide sequence at SEQ ID NO 39302
ctcattctcaagtttgtgaatacataaattctcacatttaacaatttagaaaaccccaatctgttatgcactcaagcatttgagaagcttaaatctccaacggttggtcaatttccgaccagtcacgtttgagcaggagggtgataagctcaacaccactgccccgccagacttgcggcaactgaacagcagaacatgagttggccctggcagtttgtcgatctcgacgatgcacagaagaaagcacgacgccatgctatggatcgctatgcattggtcgcacagctctcggccctagctcctgttatcgtgttcttggtatatcgcgcgacgaaatggtcaatagctaaggcaactggatccagtcacgggtcgtactctgctttgcctggttcgcccgtgtctaaacagcggcgattgagcaccgctgggtcatggacagcgaaatggcgcaagctcgcatggtggctcggcgatgaaatcgttatcatgggttggaactggggtccgagggatcaaatgattggaggggccatatggggactctggctggccattctttccgtaagaggcacgggaaatgactaccttcatctcacaaagcgattgggcatcgtcggtgtgtctcaactcccagtgcagtatctaatgtcactcaagagtttgaatccatttgccccgatcttcaactcatcgcacgaggagattaaccggtggcatcgcactctcggtcgcgtcatttatgtgctgctgagtcttcacgcatccttatatttcaacttctactggcagaacaacctactcgggcagaagattacaagcctcgttccggtgctggggtttaccgctgctttctcgatgcagttgctgtctggaaccgctctctcagtcgtccgacaatattcataccgtgttttcttcattactcatctgatagtggcacttgcgctgccgccaattgtctacttccatgcccatcactcgtccttttacgtgtgggaagctatcattgtcttcatcgctgacattgcgagccgcagaatcggcactattgtcgctgacacagaagttgagcttatacccggtactgatcttctgaaacttacagggagcataccaagtgacaaggtcgacaaatttgcaaagaatccaggatcacacgtctacctcagcgtccctcctgcctcgcggccggacaagaacccggtcgctgcagctcacctgatctttgaatgcactttcaaccccttctctgtggccgcggtagatgatgcatctgggagcttgacgctggtcgcgcggcaacataacggtcccatgaccacagcgttctctcacttcgctaggaacgtagatggcgaagcaaaggtcaaacttgcattcgacgggccgtatggatgtgcaaagcgcttccccaatctcgccggtcccgactttgatcgtgttctactagtagctggaggcgttggcgcgacattcgtccttccgctctatcgctggatcctgagtgagaatccatctgcacgggtccagatggtatgggctgtcagaggagcaggtgaagccacgtggcctgtaatcgagaatggaaagggaattgtagatgatgacaacgttcagctatttctcacgggcgatatacttacaagcggaaatgctcgaggggattcgcgaggcagcgttgatgaggtggagcttcgggcaatgagcgggcaacggcagcctgtatctagtgcaaggagaccggatttacaaaacatcgtcgacggcgtcttcaaacagggactcgaagagcgagtggccgttctagtatgtgggcctgatgccatggcacgcgagctcagagcgcatgttggtacttgggtgaacaaaggcagatatgtgtggtggcataatgagagttttgcatggtagacgatagaacctagacaaggaattcaaaaagctctgcttcttg

SEQ ID NO: 39305 - DNA, 1368 bp, Muscodor strobelii
  misc_feature: SGI cDNA ID NO. 573671
  misc_feature: Encodes the peptide sequence at SEQ ID NO 39306
atgctcgacatctactccctcggtaccgtcgccttgctccttcgagcagttcaggccattccggtactgactcaacaagtctgccgtggtgttgatatagacacttcaacaaatccggctctgactgctccaaccctcgtgacacgaaccattgtcgctcgagctcctcccgcgtctttcaccgctcttccgaacgtagggcctggtggttcttcttaccatgactcagcacactttcgtgtctacgccgcggatctcacagctgccgacaaggccctgtcgatgcttgaaagcgtatactcgtgttttgtcgacactttgggttggcgctctactggcttgtcgtttaatgacaacaccgatgcagacggcccatggaacaaggtgaacatctacagtgtggcaagtctccctggggccgcaggtgtcatgcactcagacgccgcgacaggcatggcctggctcgaagtccagaatgcatacctcactgtacctggtgtcactgttcatgagttcggacacggattgcattatcatcagaagacatgggttgaccagacacgcaccggcgcatggtgggaaacactcgccaactgggtcgctgacacgttacaaacatcgcctctgtgcgcgagtgcaaggactcaatggggccagccaacggcgaccaccagcgaaatcaacgtcatcaagacgattggggactcattccaagtcatcgttgatggaactgtcgacagtgggaactactatgaagcttggcctttcttgacatacatcacgaataacccagacgggtttacaggtctaggatccggtgttatgagacagcttcaggttcaatatagtcccaactctaatgagacgccgcttcacacacttcaaagagtgtccactggggctacagttgccaagattgtcggaaggtattgggctcgtatggcgtatgtcgacattggccacactcaggcacagaacgtcttcttcagtcaacggagccggatcaactatgccaacgtagatacagtcagtactggcaactatcgcgtcaaaaccgctcgcaggccacgttatatgggttccaatatcatcccactgaagaatccctctggtacagtgacggtcaagatcacgactagcggccagctcacctcgcatttggtggtcaggaacacgtcaagtaacgttgtgcgctatgttgagcttacaaacggtcagggtagcgttactgttgcaagtggtgaggaggcaagcctcgttgttgcaaatacgcctgctacgctcattttgtttgatcctttctctttgggctcggatgtgaacacaggcgttgattattcgttcaccttatcgggggcaacggcatag

SEQ ID NO: 39306 - protein, 455 aa, Muscodor strobelii
  misc_feature: SGI Peptide ID NO. 573671
  misc_feature (51)..(454): NCBI GI: 256724133 Blast Desc: NECHADRAFT_51482 [Nectria haematococca mpVI 77-13-4]
  misc_feature (53)..(454): NCBI GI: 256724785 Blast Desc: NECHADRAFT_84435 [Nectria haematococca mpVI 77-13-4]
  misc_feature (55)..(454): NCBI GI: 256729529 Blast Desc: NECHADRAFT_95849 [Nectria haematococca mpVI 77-13-4]
  misc_feature (55)..(454): NCBI GI: 169782536 Blast Desc: [Aspergillus oryzae RIB40] gi|83774474|dbj|BAE64597.1| protein product [Aspergillus oryzae]
  misc_feature (55)..(454): NCBI GI: 238492157 Blast Desc: conserved [Aspergillus flavus NRRL3357] gi|220695809|gb|EED52151.1| conserved [Aspergillus flavus NRRL3357]
  misc_feature (60)..(454): NCBI GI: 46126365 Blast Desc: FG07560.1 [Gibberella zeae PH-1]
  misc_feature (54)..(454): NCBI GI: 171685344 Blast Desc: protein product [Podospora anserina] gi|170942633|emb|CAP68285.1| protein product [Podospora anserina]
  misc_feature (38)..(454): NCBI GI: 255931985 Blast Desc: Pc12g07140 [Penicillium chrysogenum Wisconsin 54-1255] gi|211582168|emb|CAP80341.1| Pc12g07140 [Penicillium chrysogenum Wisconsin 54-1255]
  misc_feature (55)..(455): NCBI GI: 256724123 Blast Desc: NECHADRAFT_51559 [Nectria haematococca mpVI 77-13-4]
  misc_feature (60)..(439): NCBI GI: 67525603 Blast Desc: AN3259.2 [Aspergillus nidulans FGSC A4] gi|40743978|gb|EAA63160.1| AN3259.2 [Aspergillus nidulans FGSC A4] gi|259485774|tpe|CBF83081.1| TPA: conserved [Aspergillus FGSC
MLDIYSLGTVALLLRAVQAIPVLTQQVCRGVDIDTSTNPALTAPTLVTRTIVARAPPASFTALPNVGPGGSSYHDSAHFRVYAADLTAADKALSMLESVYSCFVDTLGWRSTGLSFNDNTDADGPWNKVNIYSVASLPGAAGVMHSDAATGMAWLEVQNAYLTVPGVTVHEFGHGLHYHQKTWVDQTRTGAWWETLANWVADTLQTSPLCASARTQWGQPTATTSEINVIKTIGDSFQVIVDGTVDSGNYYEAWPFLTYITNNPDGFTGLGSGVMRQLQVQYSPNSNETPLHTLQRVSTGATVAKIVGRYWARMAYVDIGHTQAQNVFFSQRSRINYANVDTVSTGNYRVKTARRPRYMGSNIIPLKNPSGTVTVKITTSGQLTSHLVVRNTSSNVVRYVELTNGQGSVTVASGEEASLVVANTPATLILFDPFSLGSDVNTGVDYSFTLSGATA

SEQ ID NO: 39307 - DNA, 1262 bp, Muscodor strobelii
  misc_feature: SGI EST ID NO. CUFF.94592.0
  misc_feature: Variant of the nucleotide sequence at SEQ ID NO 39305
ggtggttcttcttaccatgactcagcacactttcgtgtctacgccgcggatctcacagctgccgacaaggccctgtcgatgcttgaaagcgtatactcgtgttttgtcgacactttgggttggcgctctactggcttgtcgtttaatgacaacaccgatgcagacggcccatggaacaaggtgaacatctacagtgtggcaagtctccctggggccgcaggtgtcatgcactcagacgccgcgacaggcatggcctggctcgaagtccagaatgcatacctcactgtacctggtgtcactgttcatgagttcggacacggattgcattatcatcagaagacatgggttgaccagacacgcaccggcgcatggtgggaaacactcgccaactgggtcgctgacacgttacaaacatcgcctctgtgcgcgagtgcaaggactcaatggggccagccaacggcgaccaccagcgaaatcaacgtcatcaagacgattggggactcattccaagtcatcgttgatggaactgtcgacagtgggaactactatgaagcttggcctttcttgacatacatcacgaataacccagacgggtttacaggtctaggatccggtgttatgagacagcttcaggttcaatatagtcccaactctaatgagacgccgcttcacacacttcaaagagtgtccactggggctacagttgccaagattgtcggaaggtattgggctcgtatggcgtatgtcgacattggccacactcaggcacagaacgtcttcttcagtcaacggagccggatcaactatgccaacgtagatacagtcagtactggcaactatcgcgtcaaaaccgctcgcaggccacgttatatgggttccaatatcatcccactgaagaatccctctggtacagtgacggtcaagatcacgactagcggccagctcacctcgcatttggtggtcaggaacacgtcaagtaacgttgtgcgctatgttgagcttacaaacggtcagggtagcgttactgttgcaagtggtgaggaggcaagcctcgttgttgcaaatacgcctgctacgctcattttgtttgatcctttctctttgggctcggatgtgaacacaggcgttgattattcgttcaccttatcgggggcaacggcataggaattggaaagtctcttacccgtttctatgtatcataacacactatagttgatgcatatgatgtcctttgggcacatcctgaaataattaaaatctcc

SEQ ID NO: 39308 - DNA, 1302 bp, Muscodor strobelii
  misc_feature: SGI cDNA ID NO. 573672
  misc_feature: Elevated expression when VOC is produced
  misc_feature: Encodes the peptide sequence at SEQ ID NO 39309
atgcagcttctgcggcatcttctgctcttcaccccgtttgtggcggcccgtaacattgaccgacgtggcagagaggtttatgatggatacaaggtccttcgagttgccacccctggtggctttgaagatctggaggcacagctggactcgcttgatgccattgatttgacccacaaccacggtcacgatgagctcgctcacctagacattgccatcccagcggaaaacgtagaagcgctgtctgctctcaattactcctacgaggtgacaacagaggacctcggagaggcgatcgctctcgagggcgagcttgagccattccctggcttggaatctgacaatcgagtcgcaaaggtaggcgctgcggctgcattgcccagcctcacctggttcaatgcataccacgcatacgcggaccatttgaccttcctgagttcccttcaagccgcattcccatcgaactcggagctattcactgccggcacatcgttcgaaggacgagcgattcagggcattcacctctggggaagcggtggcaaaggctccaagcccgcaatctactggcatggtaatgtgcatgctcgcgagtggatcacgtccatgtcggtcgagtatctcacatatcagctgattaacaactatgccaacgacacaaccgtcagctctgtgctgaataactatgacttccacattattcccattgtcaacccagatgggttcgtctacactcagactagcacgcgtttgtggaggaagaaccgtcagacacgatctagtaccaccgctgtcggtactgatatcaaccgaaactggccatatcagtggtcgggctctggatcgtccacaagccccagctcagagacataccgcggtgtcgcagcaggtgatacccctgagggcactggactccgaaaatacggagacgctttgtacgctggaaagggcatcaagttctacattgactttcacagttacggccaatacgtgttgacgccgtacggatactcttgctcggctacagcttcgaaccaagccacccagaacagtcttgcttcacgtctcggcactgccatcgctcaggcctatggcacccggtacacgacaggtcctacctgtagcaccctatacgccgtgaatggtggaagcaatgattatttcactgacgtgtcaaaggcccaatatgcctgggcaattgaaatgagggatactggtacctacggcttcactctgcccgctagccagatcctacccaatagcattgagcagtggaacggacaaaagttcttgttcgctaatttttaa

SEQ ID NO: 39309 - protein, 433 aa, Muscodor strobelii
  misc_feature: SGI Peptide ID NO. 573672
  misc_feature (140)..(425): Pfam Id: PF00246 Pfam Desc: Zinc carboxypeptidase
  misc_feature (27)..(432): NCBI GI: 171680620 Blast Desc: protein product [Podospora anserina] gi|170939937|emb|CAP65163.1| protein product [Podospora anserina]
  misc_feature (27)..(433): NCBI GI: 256725475 Blast Desc: NECHADRAFT_45775 [Nectria haematococca mpVI 77-13-4]
  misc_feature (3)..(432): NCBI GI: 189198842 Blast Desc: carboxypeptidase B precursor [Pyrenophora tritici-repentis Pt-1C-BFP] gi|187982857|gb|EDU48345.1| carboxypeptidase B precursor [Pyrenophora tritici-repentis
  misc_feature (27)..(425): NCBI GI: 46139469 Blast Desc: FG11249.1 [Gibberella zeae PH-1]
  misc_feature (1)..(425): NCBI GI: 169608684 Blast Desc: SNOG_07428 [Phaeosphaeria nodorum SN15] gi|111063774|gb|EAT84894.1| SNOG_07428 [Phaeosphaeria nodorum SN15]
  misc_feature (27)..(425): NCBI GI: 261360601 Blast Desc: zinc carboxypeptidase A [Verticillium albo-atrum VaMs.102]
  misc_feature (1)..(433): NCBI GI: 85091739 Blast Desc: NCU07536 [Neurospora crassa OR74A] gi|28920446|gb|EAA29813.1| NCU07536 [Neurospora crassa OR74A]
  misc_feature (27)..(430): NCBI GI: 261358037 Blast Desc: zinc carboxypeptidase A [Verticillium albo-atrum VaMs.102]
  misc_feature (21)..(433): NCBI GI: 261354126 Blast Desc: carboxypeptidase B [Verticillium albo-atrum VaMs.102]
  misc_feature (26)..(433): NCBI GI: 39948750 Blast Desc: MGG_08711 [Magnaporthe grisea 70-15] gi|145009256|gb|EDJ93967.1| MGG_08711 [Magnaporthe grisea 70-15]
  misc_feature (131)..(427): SWISSPROT Homolog: EC 3.4.17.15 Carboxypeptidase A2
  misc_feature: Useful for introducing or modulating the production of volatile compounds
MQLLRHLLLFTPFVAARNIDRRGREVYDGYKVLRVATPGGFEDLEAQLDSLDAIDLTHNHGHDELAHLDIAIPAENVEALSALNYSYEVTTEDLGEAIALEGELEPFPGLESDNRVAKVGAAAALPSLTWFNAYHAYADHLTFLSSLQAAFPSNSELFTAGTSFEGRAIQGIHLWGSGGKGSKPAIYWHGNVHAREWITSMSVEYLTYQLINNYANDTTVSSVLNNYDFHIIPIVNPDGFVYTQTSTRLWRKNRQTRSSTTAVGTDINRNWPYQWSGSGSSTSPSSETYRGVAAGDTPEGTGLRKYGDALYAGKGIKFYIDFHSYGQYVLTPYGYSCSATASNQATQNSLASRLGTAIAQAYGTRYTTGPTCSTLYAVNGGSNDYFTDVSKAQYAWAIEMRDTGTYGFTLPASQILPNSIEQWNGQKFLFANF

SEQ ID NO: 39310 - DNA, 3531 bp, Muscodor strobelii
  misc_feature: SGI EST ID NO. CUFF.94620.0
  misc_feature: Variant of the nucleotide sequence at SEQ ID NO 39308
cataatgaatatggcgaatgtgatccgaatgtaatcgcagatgaattactacgagatgtgccgagtaccatttgcgcacggggtctgagttgagtgcccatcaaaaataacgtggaagtgtccattctgcatgactgaaagaatttggcggcgagtcgaggaggccaagaagtcatgctttgcttcttaggctagacatatttcatcttttcagtagagtctgcgcgtggagcagatctcaagtagaacattcaaacttcttgctggctagctagctgcattgaattcaggtgaagagcagattgggtaccagtggctttaaaatggcgccgttgccctccatggtttgttcccgtcccgggttcttcccggacaataatctcggtctatactgctaatacattcttgttatcgccttctgttatatcaccaagtcatttcgaattcaaatgccgacgcacagagttaataccttcgatcgcaccgatattcaagttactaggtaggttgtctcgactccaacatcaagtgcacaatgccccagggcgtattctgcgccacactttgctgattacataaggttccaacggaggaggctggtgtgatagtggacctccggattgagagacccactggccaagatattttccaagttcaaatcgcatcggcggagatctagacctgcactagcaccgcgaacgttcatttaacaatttacttgccgcccgtcccccacgaagtcttccataccttccggaaattcgaggcagcaaaagaaccgagaggcatagatgggactacgagctattgttgcgtttgattatctgcatagcaagccgaatcctcaatagttcctactccagacccgcgttaaatgtgaagctgaacaagtgattattgtaggctccgccgagaagctgtgcccattctagcattattcttgttgaactactaagtcatgtgcgacatatgacaccaaccaaggcggaaatccactatcagtgtcacacctcgtgatgcgatgagaaacggatggtagtagatatgcaaccgaggtgttctagaattttcttacctatgggtcacggaattgacaaacaatcgcaatctgaacttcctagaagggcaggacagcatgttgacatctcatcaattgccctatacctgtgtcagtttaattaggcagcgtcaggtcgaactaagaataaaggcacgcatttgccgagcttgcgatggccttggcatgattccagtgtccataaaaggcagctccaaatcttgggtaggccaaaagctttgccaagatgaagtgcgaaaggcgacaatcgacaaataaactcgtcgctggaggtgatttcattcgtgcgcttcccgttctcgtatacagggatgatagggtaactctggatcgatactttggtgtgcatagctatacaaaatacgtctcacaggatagcctgcgagtatcactattggtaccaacacatttcgagtagcataattggctgtcgatcacagcggggtagaagagtaataatggctgccgacagacaacgttatcgtcgttttatcccggatctgcaggtccctacctcacaccctgccccaaatagccagccgcgagcatctgaggatatgcacatgcacgtcaggacctgctggatccggctgatagaccgcgtatcggcgaagcgctcgccatatctactatagatgatgatgatgatcgtctgttttgtccgggaggcacgagcgggatagatctataaattcgccattcgagaacttgtccgtccagccgcaacttggatctcccctctttcgtctcctcaggctagcgtcccatcctttcacgatgcagcttctgcggcatcttctgctcttcaccccgtttgtggcggcccgtaacattgaccgacgtggcagagaggtttatgatggatacaaggtccttcgagttgccacccctggtggctttgaagatctggaggcacagctggactcgcttgatgccattgatttgacccacaaccacggtcacgatgagctcgctcacctagacattgccatcccagcggaaaacgtagaagcgctgtctgctctcaattactcctacgaggtgacaacagaggacctcggagaggcgatcgctctcgagggcgagcttgagccattccctggcttggaatctgacaatcgagtcgcaaaggtaggcgctgcggctgcattgcccagcctcacctggttcaatgcataccacgcatacgcggaccatttgaccttcctgagttcccttcaagccgcattcccatcgaactcggagctattcactgccggcacatcgttcgaaggacgagcgattcagggcattcacctctggggaagcggtggcaaaggctccaagcccgcaatctactggcatggtaatgtgcatgctcgcgagtggatcacgtccatgtcggtcgagtatctcacatatcagctgattaacaactatgccaacgacacaaccgtcagctctgtgctgaataactatgacttccacattattcccattgtcaacccagatgggttcgtctacactcagactagcacgcgtttgtggaggaagaaccgtcagacacgatctagtaccaccgctgtcggtactgatatcaaccgaaactggccatatcagtggtcgggctctggatcgtccacaagccccagctcagagacataccgcggtgtcgcagcaggtgatacccctgagggcactggactccgaaaatacggagacgctttgtacgctggaaagggcatcaagttctacattgactttcacagttacggccaatacgtgttgacgccgtacggatactcttgctcggctacagcttcgaaccaagccacccagaacagtcttgcttcacgtctcggcactgccatcgctcaggcctatggcacccggtacacgacaggtcctacctgtagcaccctatacgccgtgaatggtggaagcaatgattatttcactgacgtgtcaaaggcccaatatgcctgggcaattgaaatgagggatactggtacctacggcttcactctgcccgctagccagatcctacccaatagcattgagcagtggaacggacaaaagttcttgttcgctaatttttaagattggcatggtcggatatcgtgtgagtcagaggagataggagagcttttaggctgggcagatatgtcctttgccagtatcatggcagatgcgtagtgaaatggtgggcatacagaaaacgagaccttatcacagcggtaaggttagatacacacaatgccacatacccacttccgcacttatgtttcttctgtggcctagacgtgacgagttccttggtgatcatttgttacctcatcactgtttcgagccgatttgtgtaaaacttgtcattctgaggatgaggacgagagaatgcctatttcctggatgcatccgtctccctttagacaattgggtcctagagagatgctatgaagtcatcaggctaccgc

SEQ ID NO: 39311 - DNA, 1590 bp, Muscodor strobelii
  misc_feature: SGI cDNA ID NO. 573673
  misc_feature: Encodes the peptide sequence at SEQ ID NO 39312
atggaggtcctagatggtgtcgcccgcgcggcctttatctgggacattcatcaaattgagctccagcccgagcatccctttctagtgttctcgagagcacttgttgactcattggatcgtgaaggccagggcttccttatcagccaggtaacggccaggttggggtaccctgctgagttcattcctcacggcaccagtccgaatatcatatacctgggccacagaaacagtcttgccccgcacccgaacgcgctcagtaccgcaatgcatacacccaacttgcaactcaaatggcaatccacgactacccctacaaatcctccccatagcattgctcatggacaaacccttgtccatcaacagctgcctgtccaccgacaacccttcgcgcacgaacctcccaccagatactcgacaaagcgagagggcgacgaatctcaagatggtatcgacaatgaaggaaagctcaagaaggcaaagaaccagcacttagtgttccgagacttggtaagagggtttctcacggaggtaaatcctggtgttaccttcaatgagatatccaaggacgccagtatttggtgggagaatttgagcagcgaccagaagaagcctttcaaacatgtggctgatggtctcgcggcagagcgcaagacgacaatgctcaaccagcaagcaagtattggtggcagactgggccaagtacagacgaggagggatttgcaggacgagagaagacgaccggctaaaaagaggagactgcatcacgaaccagcctgggacgcagccgaaactgatctattggccctcaatcccatgtctgttggcacgaggccattcaaccagaccacgcgaacgaacgcggaaggcttcgagtaccacaaggaagcaactcaatcacaacaggctaccagaaggactatagtccagacgccaacccctggtccaattccaagtctagagaacgacagtctcgcgacgaatgcgattgtcactcgtcgtgctgctgattttgggttggatcgtgatacacaggcttcaatcgcaaccgtcaattctcgcaccccttcctattctgctcagcaaggacgagatgatcctcgccaataccgtcgatcttactacgatcccaccacgggtgagaaccgggttcaaccaattgccggcagcacatattctatcctggacgcccaaagtccctctgctgtccaaaagcctcatagtagcgacgtagaaaatcaaagtactcagatcgcgccatcctacgagtctgctggcccaattgttgaaagtctcttggatgagaatatgctcgatccacagctccttgagtctcagcttttctccaatgtgtctcaggaatccgagcacatagtttaccctcgagagactacggagaatatcagaacaacgacttcggcccaggctaggaacgatacattgatgatgcttgacaatcttggggacggactcattccaaccacagagaacgataccaaccccgatccttcgcatatcaaccgtactgcatttcgcgatagcagttctgccgcgtccgctgattttagcttggttgacacaagcgaacgctag

SEQ ID NO: 39312 - protein, 529 aa, Muscodor strobelii
  misc_feature: SGI Peptide ID NO. 573673
MEVLDGVARAAFIWDIHQIELQPEHPFLVFSRALVDSLDREGQGFLISQVTARLGYPAEFIPHGTSPNIIYLGHRNSLAPHPNALSTAMHTPNLQLKWQSTTTPTNPPHSIAHGQTLVHQQLPVHRQPFAHEPPTRYSTKREGDESQDGIDNEGKLKKAKNQHLVFRDLVRGFLTEVNPGVTFNEISKDASIWWENLSSDQKKPFKHVADGLAAERKTTMLNQQASIGGRLGQVQTRRDLQDERRRPAKKRRLHHEPAWDAAETDLLALNPMSVGTRPFNQTTRTNAEGFEYHKEATQSQQATRRTIVQTPTPGPIPSLENDSLATNAIVTRRAADFGLDRDTQASIATVNSRTPSYSAQQGRDDPRQYRRSYYDPTTGENRVQPIAGSTYSILDAQSPSAVQKPHSSDVENQSTQIAPSYESAGPIVESLLDENMLDPQLLESQLFSNVSQESEHIVYPRETTENIRTTTSAQARNDTLMMLDNLGDGLIPTTENDTNPDPSHINRTAFRDSSSAASADFSLVDTSER

SEQ ID NO: 39313 - DNA, 1176 bp, Muscodor strobelii
  misc_feature: SGI cDNA ID NO. 573674
  misc_feature: Encodes the peptide sequence at SEQ ID NO 39314
atggtgcggagttcaatagacgtcaacggcagtgggaccgtcagtacactaactcccaaagtctcggttcaggctctaatggaaagttcgagagcgcggctcagagtgcctagttcagatacctcgcatgttcgaggaaagaatatcaacgcctttgaagacacgagcaataactgcgccaatactcccgtcgattcagatcgacgcgttgggcagaacgtcgccgaggggctcgtagctggacaaaccaatgaaccaaccaaaaatgaggccctctcgtgtcacttgagcatgcacgtacttcaggacaccggcaggaatgattcttggggtcccgtcgtttcccaatgtcccaaaacggctgaaaatagggttaggcgtgtttctcagcccatccattccctccacgcaggggtcgacaggatgaagcatagccagggatactgctttgatcaagtcatgggtatatttggacaaggaactgtaagcaagtcgatcagttcgatactccctacacactctagcattccgactatggacagcattcccgagtctcgaatccttactacgatcagcaatcagagccattccatacctttcacatcggagattactcaacataatggctcacctagctttacggcccacgaacactttgacaacgacgtatcacgagttagctcgggtgccacacctgctgctgctacacttagtacaattgatgatccagtcgcccaagctaacgctactccagcttctattgggatcaacacgctcacccatgggtctcctgataagcttgccagccagctatcacatgagcgtcctttgagtcaacgcaatcttccgtcatgggctgagcccaatagttcagagcttgaagatgtcatccgtccgagaaggctcatgtccgaagttactgaattatacgataatttatccagctcagatgagccgcattacgtagccgacgacactttcgggtctatgaagccgattcaagacgtggccgcttctttcgaccacgcgatgactgaagatgaagacagtacagagcacgctgtcgagcatgttgagtctgaagttcctcgttcatttgacgagctcttcgatgctattatggaaagccgtaagacatctgtggaagaccatcctgataatatggagatcgagtag

SEQ ID NO: 39314 - protein, 391 aa, Muscodor strobelii
  misc_feature: SGI Peptide ID NO. 573674
MVRSSIDVNGSGTVSTLTPKVSVQALMESSRARLRVPSSDTSHVRGKNINAFEDTSNNCANTPVDSDRRVGQNVAEGLVAGQTNEPTKNEALSCHLSMHVLQDTGRNDSWGPVVSQCPKTAENRVRRVSQPIHSLHAGVDRMKHSQGYCFDQVMGIFGQGTVSKSISSILPTHSSIPTMDSIPESRILTTISNQSHSIPFTSEITQHNGSPSFTAHEHFDNDVSRVSSGATPAAATLSTIDDPVAQANATPASIGINTLTHGSPDKLASQLSHERPLSQRNLPSWAEPNSSELEDVIRPRRLMSEVTELYDNLSSSDEPHYVADDTFGSMKPIQDVAASFDHAMTEDEDSTEHAVEHVESEVPRSFDELFDAIMESRKTSVEDHPDNMEIE

SEQ ID NO: 39315 - DNA, 510 bp, Muscodor strobelii
  misc_feature: SGI EST ID NO. CUFF.94622.0
  misc_feature: Variant of the nucleotide sequence at SEQ ID NO 39313
gaaagttcgagagcgcggctcagagtgcctagttcagatacctcgcatgttcgaggaaagaatatcaacgcctttgaagacacgagcaataactgcgccaatactcccgtcgattcagatcgacgcgttgggcagaacgtcgccgaggggctcgtagctggacaaaccaatgaaccaaccaaaaatgaggccctctcgtgtcacttgagcatgcacgtacttcaggacaccggcaggaatgattcttggggtcccgtcgtttcccaatgtcccaaaacggctgaaaatagggttaggcgtgtttctcagcccatccattccctccacgcaggggtcgacaggatgaagcatagccagggatactgctttgatcaagtcatgggtatatttggacaaggaactgtaagcaagtcgatcagttcgatactccctacacactctagcattccgactatggacagcattcccgagtctcgaatccttactacgatcagcaatcagagccattcc

SEQ ID NO: 39316 - DNA, 1116 bp, Muscodor strobelii
  misc_feature: SGI cDNA ID NO. 573675
  misc_feature: Encodes the peptide sequence at SEQ ID NO 39317
atggaagtcgcactccctcaactcgagcagaactgtccatttatcaagatcacgcaatcgaccttcgccgggctaggcgaggagggccgtaatgtcttccagggcaagcttgggtctattcttcaaaagcccgtcgagttcattgtggatggccacaataccgggctcgtgtttcttgccaatccacaggacctggctgatctctctcgccgctcagaacatcctgagaaaaagctcaatgcaattgagatcaaggccattttagcgccacggtggaaggcaatgagcaaggaagaaaagaagccgtggcagtatcgtgcagccgccgtagaaagggcgttctacgagaaatatcccaatttcaaacgaccgacctcgactaaacgagtcagaaaacaagacgctagtggagacagattctcaaagaagctcaaggcttccaatgcttccaacacagcccaagactcatccatgtcagagcaacgtgttgatgatacacctaaccctaagaccacccacttgtcagctggtggctatactccgacgacccagcaacgggatgaaatttcgcgatctggttacttctcaactaattcatttggttcgacgactgttgctaccatgcctatgcatacgttcgctgtccagcaccaggcgaccgtcgagcatcgacagccacaaatagctgagcaaactaactctgataatggaccaggagtatacaactccaccatatcgcaaacaaccgacttcgtcgaaccagtcgaggaggtcgacaaagcggcaggcagtcgaccagccgccctgattgacgaattcgccatcccgagtgcgagcattggccctatgacttccatggacaaagtcactccaattcctgaacgccatcgttccatggaaagtctgatagatgccgtcagtcccgctctgtttatgagctccaacttccaaccttctgttctccaagcaaatgtgaaccaaagacagaccttaaagattggagatgatggatcgcctggatacggagtacgaaatgccgaaacttggattttagataaccgaagcatattctttcgttcatttgtatttaatctcgtttctcgagttcgtggttag

SEQ ID NO: 39317 - protein, 371 aa, Muscodor strobelii
  misc_feature: SGI Peptide ID NO. 573675
MEVALPQLEQNCPFIKITQSTFAGLGEEGRNVFQGKLGSILQKPVEFIVDGHNTGLVFLANPQDLADLSRRSEHPEKKLNAIEIKAILAPRWKAMSKEEKKPWQYRAAAVERAFYEKYPNFKRPTSTKRVRKQDASGDRFSKKLKASNASNTAQDSSMSEQRVDDTPNPKTTHLSAGGYTPTTQQRDEISRSGYFSTNSFGSTTVATMPMHTFAVQHQATVEHRQPQIAEQTNSDNGPGVYNSTISQTTDFVEPVEEVDKAAGSRPAALIDEFAIPSASIGPMTSMDKVTPIPERHRSMESLIDAVSPALFMSSNFQPSVLQANVNQRQTLKIGDDGSPGYGVRNAETWILDNRSIFFRSFVFNLVSRVRG

SEQ ID NO: 39318 - DNA, 1830 bp, Muscodor strobelii
  misc_feature: SGI cDNA ID NO. 573676
  misc_feature: Encodes the peptide sequence at SEQ ID NO 39319
atggagccgtccagctcgagtcaacagctccacctgctgctgtgggaagccctacaagttcagatagagccgaatcgaccattcatcaagctcaccgacatgctgttcgtccatcttgataacgaaggacgacgatacatgggagcgaagctcagtgctgttcttggtgacaagcccacggagttcatcatcgatggtcacaatagcggacatgtttttcttgccaaccgtcaagatttagcccgtcgttacaatcggcaggtctacgatggtcctgggctcttgccagtcctcctcatacccatcaataagccaagtagccaagcccagaacggcgttcatccgaccgattcagtcacagtcagcatgccgcctagagccactctcccgactccggcttcttcgacttctggcggatcatcgagggttatatcgacatccggtgtaactactcccgatattgtgatgggcagtcacttcaactctccatccttcaccctcggagctgattctcagacccgtcatcagcgtacactgctagccgccccgggtctcatgaccaatatccgtgctcactcccatagtgcgggcgtgccatccaatccgaccccaaatgatgtccaatccacacggtcaaccaccgccgatctgatttccatgggtggtctcactcctcagctgtcgcttgatcaacgtctcccgatccatatccccaccagcaatcaccacacaactcttcctccggccaccaacaattcgatcggacatcgtccggccggtcatttctccccagaaattaacaaaaccattcccgcggagcagccggactccaagaatcgaatggaatatgagccgactgttcatggatctatatatgacgccaatcaattcgaccccacaactggcaagaagattaagcagcctcccaacgcttggtgtgaatacttgagggacaagacgcctgaagttaagagagatcatccaggatgggatgccatcaaaatcaactcctacctggcgaagatttggaagtccatgactccagaggaacaaaagccgtggagagatcgcgctgagcagctgagccgggaacatgcaatcaagtacccgggttggaggaagaagtgtgcaaagcgagcccactctgctcaagtcactgtgaacgcgccgaacaaaaagcaaaaagtcactgctactatccattccaatgcaaatcaaccgagccggaacagtctcctgggaggtttcgagcgattcacagggcctgctcatggccaaacgaaattggccgctgactcgtatgttgtagctccagttgagcactcttcaggctacatcaaacctcacgacgctctgcctgcatcagacccgagccaacgaaacaaatctcggtaccttacacctgtctctgctcctgatgccttcactatgcaggaacgcgagcgtacgacgcaagttgagaaaattggatacggcaaggacggcggtcgtcagtttcttccaactcaagcagcaacatctgacgaagagatcggcaccgacaatatgagactcaatgaaccgtccttcaatcaaactcccaaatttaccagctcaagcgtgagccaggacaatcagacaatagacatggatagcaacaacgatgggcttcctgccgaaaacgacttcctcctgagcctacaagagatcgagcagttctccggcatcactgagcccgattttaccttccgtgagaacatctctggcatcggcgatgaaaatatcacgggagacggggaaaaccacatggctcaattggccagcgcttctacttccagagccttaacttaa

SEQ ID NO: 39319 - protein, 609 aa, Muscodor strobelii
  misc_feature: SGI Peptide ID NO. 573676
  misc_feature (305)..(373): Pfam Id: PF00505 Pfam Desc: HMG (high mobility group) box
  misc_feature (303)..(414): NCBI GI: 63253679 Blast Desc: MAT-2 [Pyrenophora teres] gi|113876756|gb|ABI37049.1| MAT-2 [Pyrenophora teres f. teres] gi|113876758|gb|ABI37050.1| MAT-2 [Pyrenophora teres f. teres] gi|113876760|gb|ABI37051.1| f.
  misc_feature (303)..(414): NCBI GI: 63253687 Blast Desc: MAT-2 [Pyrenophora teres]
  misc_feature (236)..(445): NCBI GI: 190335076 Blast Desc: mating-type HMG-box protein [Petromyces alliaceus]
  misc_feature (303)..(414): NCBI GI: 113876789 Blast Desc: MAT-2 [Pyrenophora graminea]
  misc_feature (303)..(414): NCBI GI: 63253681 Blast Desc: MAT-2 [Pyrenophora teres] gi|113876774|gb|ABI37058.1| MAT-2 [Pyrenophora teres f. maculata] gi|113876776|gb|ABI37059.1| MAT-2 [Pyrenophora teres f. maculata] gi|113876778|gb|ABI37060.1|
  misc_feature (303)..(414): NCBI GI: 113876786 Blast Desc: MAT-2 [Pyrenophora graminea]
  misc_feature (285)..(373): NCBI GI: 207099787 Blast Desc: mating type protein [Acremonium chrysogenum]
  misc_feature (301)..(384): NCBI GI: 95113628 Blast Desc: MAT1-1-3 [Claviceps purpurea]
  misc_feature (241)..(380): NCBI GI: 95113629 Blast Desc: MAT1-1-3 [Ephelis japonica]
  misc_feature (301)..(380): NCBI GI: 95113630 Blast Desc: MAT1-1-3 [Epichloe typhina]
MEPSSSSQQLHLLLWEALQVQIEPNRPFIKLTDMLFVHLDNEGRRYMGAKLSAVLGDKPTEFIIDGHNSGHVFLANRQDLARRYNRQVYDGPGLLPVLLIPINKPSSQAQNGVHPTDSVTVSMPPRATLPTPASSTSGGSSRVISTSGVTTPDIVMGSHFNSPSFTLGADSQTRHQRTLLAAPGLMTNIRAHSHSAGVPSNPTPNDVQSTRSTTADLISMGGLTPQLSLDQRLPIHIPTSNHHTTLPPATNNSIGHRPAGHFSPEINKTIPAEQPDSKNRMEYEPTVHGSIYDANQFDPTTGKKIKQPPNAWCEYLRDKTPEVKRDHPGWDAIKINSYLAKIWKSMTPEEQKPWRDRAEQLSREHAIKYPGWRKKCAKRAHSAQVTVNAPNKKQKVTATIHSNANQPSRNSLLGGFERFTGPAHGQTKLAADSYVVAPVEHSSGYIKPHDALPASDPSQRNKSRYLTPVSAPDAFTMQERERTTQVEKIGYGKDGGRQFLPTQAATSDEEIGTDNMRLNEPSFNQTPKFTSSSVSQDNQTIDMDSNNDGLPAENDFLLSLQEIEQFSGITEPDFTFRENISGIGDENITGDGENHMAQLASASTSRALT

SEQ ID NO: 39320 - DNA, 891 bp, Muscodor strobelii
  misc_feature: SGI cDNA ID NO. 573677
  misc_feature: Encodes the peptide sequence at SEQ ID NO 39321
atgcatcgatttgcaattcagctcttgctagctcttaactatgctcatggtcatggtgtcattcacacagatatacaacctagtgacatcttcgtgaagactaaatcaccgttccgcattatcgagtatctcgcagcaacgccagcgccttttcaagacagaacagagacgcgatacactgtgataccttcccaaccactcggcaacttctacattaacgagggtgaccccattgaaacatttgacatcgcgctaggtgactggagtgtatcgagctggacagacaatcatctaagcgaaaatatacagcccgtcgccctacgggcgccagaggtcctcatgaaggcaccatggggcgcaagtgttgactactggagtctgggtgcaattttcgtagaagtcttcggcggtgcccgtatgttcgatggccgagtcgggcctgccggtcattacgaagtgaaagaacatctagcagagatagttgatttatttggaccatttcctcggaatcttcttgatcaaggtgatcctgacctggggcgctctctttttgacgatgatggatgtatcaagggcaggagacgcatagagaattcatggctcgactctggaggcttcctctcagagctccgacagggtgttaaagatgatttcatatcattcttacgcgagatgatgacgattgatcctttgagacaaccaagagcccagaggcttctacatcacccgtttttaggtttcttgcctcagaagggttcccaggagggtatacaaaatgaactagcggaaggcgatttaaaaaatcaagagcgcgcgcctgcacaagaacacgcttatgaagagacactaggcatcatggatcgattattggtgtggctggggatctattga

SEQ ID NO: 39321 - protein, 296 aa, Muscodor strobelii
  misc_feature: SGI Peptide ID NO. 573677
  misc_feature (108)..(245): Pfam Id: PF00069 Pfam Desc: Protein kinase domain
  misc_feature (1)..(251): NCBI GI: 256724096 Blast Desc: NECHADRAFT_86322 [Nectria haematococca mpVI 77-13-4]
  misc_feature (1)..(248): NCBI GI: 238481837 Blast Desc: srpk, [Aspergillus flavus NRRL3357] gi|220700207|gb|EED56545.1| srpk, [Aspergillus flavus NRRL3357]
  misc_feature (1)..(248): NCBI GI: 169765326 Blast Desc: [Aspergillus oryzae RIB40] gi|83764989|dbj|BAE55132.1| protein product [Aspergillus oryzae]
  misc_feature (1)..(245): NCBI GI: 119185849 Blast Desc: CIMG_02972 [Coccidioides immitis RS]
  misc_feature (1)..(245): NCBI GI: 238838530 Blast Desc: protein kinase dsk1 [Microsporum canis CBS 113480]
  misc_feature (33)..(240): NCBI GI: 255954573 Blast Desc: Pc21g10040 [Penicillium chrysogenum Wisconsin 54-1255] gi|211589750|emb|CAP95901.1| Pc21g10040 [Penicillium chrysogenum Wisconsin 54-1255]
  misc_feature (1)..(239): NCBI GI: 121704583 Blast Desc: serine-threonine protein kinase, [Aspergillus clavatus NRRL 1] gi|119398700|gb|EAW09129.1| serine-threonine protein kinase, [Aspergillus clavatus NRRL 1]
  misc_feature (1)..(239): NCBI GI: 121710522 Blast Desc: protein kinase, [Aspergillus clavatus NRRL 1] gi|119401027|gb|EAW11451.1| protein kinase, [Aspergillus clavatus NRRL 1]
  misc_feature (1)..(246): NCBI GI: 239610191 Blast Desc: serine protein kinase Sky1 [Ajellomyces dermatitidis ER-3]
  misc_feature (1)..(246): NCBI GI: 261192767 Blast Desc: serine protein kinase Sky1 [Ajellomyces dermatitidis SLH14081] gi|239589272|gb|EEQ71915.1| serine protein kinase Sky1 [Ajellomyces dermatitidis SLH14081]
  misc_feature (25)..(245): SWISSPROT Homolog: EC 2.7.11.1 Non-specific serine/threonine protein kinase
MHRFAIQLLLALNYAHGHGVIHTDIQPSDIFVKTKSPFRIIEYLAATPAPFQDRTETRYTVIPSQPLGNFYINEGDPIETFDIALGDWSVSSWTDNHLSENIQPVALRAPEVLMKAPWGASVDYWSLGAIFVEVFGGARMFDGRVGPAGHYEVKEHLAEIVDLFGPFPRNLLDQGDPDLGRSLFDDDGCIKGRRRIENSWLDSGGFLSELRQGVKDDFISFLREMMTIDPLRQPRAQRLLHHPFLGFLPQKGSQEGIQNELAEGDLKNQERAPAQEHAYEETLGIMDRLLVWLGIY

SEQ ID NO: 39322 - DNA, 2043 bp, Muscodor strobelii
  misc_feature: SGI cDNA ID NO. 573678
  misc_feature: Reduced expression when VOC is produced
  misc_feature: Encodes the peptide sequence at SEQ ID NO 39323
atggatcccgccgccccgttgcagtttgcctaccgcacccagaaggccatcggcatcaccgacgccgcccccgtctatgccccgttgcctgggttcgtcaagcccgaggggacactgcggtgctgcgtctactcgccctgcggccgctacctcgcctgggctaccaacgagcgagtgtccgtcgtcgatgcatccgccggcaacgtcctgtcgtggttccccgtctccaccatctacgacgtcgccttctccccgcgcggcacctacctgagcacctgggagcggcccgccaaggatgagaacggcgatgccaccaagaacctgaagatctggcgggcggtcgaggatgtgcccgagggcgtcgacaggcagcccatgagccagttcgtccagaaggcccagtccggctggaacctgcagtacacgtccgacgagaagttctgcgcccgcatcgtcaccaacgaggtccagttctacaacagcaacgacctgaggactgtctggaacaagctgcgcgtcgagggcctcaccgacttcgccctcgccccgggccagagccacaacgtcgccgtcttcgtccccgagcgcaagggtcaacctgcgaccgtcaaggtcttcaacgtgccccagttcaacaccccgatctcgcagaagaccttcttcaagggcgacaaggtccagctcaagtggaacagcctcggcaccagcctcattgtcctggcccagaccgaggtcgacaagtccaacaagagctactacggcgagaccaccctctacctcctcagcgccaacgggtccctcgacgcccgaatcacgctggacaaggaggggccgattcacgatgtctcctggtcgcccaacggcaaggagttcggtgtcatctacgggtacatgcccgccaagaccaccatcttcaaccaccgcgccgtcgcctcccactccttcgccctcggtccccgcaacaccatcatcttctcccccaccggacgattcgcactcgtcgccggctttggtaacttggctggccagatcgatgtctacgacttggagaaggactacaagaagatctgcaccatcgagagcggcaaccccagcgtctgccagtggagccccgacagccgctacatcatgaccgcgaccacctccccccgcctgcgagtcgacaacggcgtgaagctgtggcatgttggcggcaccatcatgtatcatgaggacatggaggagctgtataacgtatcctggaggccatgcctccctgaggatgtttcccaggccgacccgctgaaccccatcccaccccccatgaatccgctatcacgtgccagaggtatgagcacgccccttcacttcaggcgtgaagatgaaggcggtgcggcccacatcatgagcaacggcgccatcaacgtcggccccaatggcttcggcagacagcgtcgccaggttccgggcgctgacttgctggagaatggcagtcgatctgttcccggtgcggctccggcccaggttcccggcggtcctgctgacgaggccttgtcgaaggctgctctgaagaataagaagaaaaggaacaataagaaggccaaagaaaacgagggccaagggccccaaggtcaaaacggtggactggccccaccccctcatgaccacggccccggttccggaaccgaaggacgcagccccgagcgtcgtggataccaacagaaccagcagcgacacaaccgaagtcgctcgcgacatgcccaagggggtaacaaccccaaccgcaatcgcagcaacacccaacagaatggccaggcccaatctgtgcccaaggtcaatactgctcagcccccagctgccgattcgctgctgtcccccggtagccaaaatcccgcttcgaagaagctacgtggcctccagaagaagatccgtgctatcgaagatctcgagatgcgactggccggaggcgagaagctcgaagatacccagatgaagaagattgccactaaagccagtgtcatcaaggagctcgagggtatcgagagagaagggtcggctgcctaa

SEQ ID NO: 39323 - protein, 680 aa, Muscodor strobelii
  misc_feature: SGI Peptide ID NO. 573678
  misc_feature (218)..(412): Pfam Id: PF08662 Pfam Desc: Eukaryotic translation initiation factor eIF2A
  misc_feature (4)..(676): NCBI GI: 171679431 Blast Desc: protein product [Podospora anserina] gi|170939341|emb|CAP64569.1| protein product [Podospora anserina]
  misc_feature (4)..(677): NCBI GI: 85094855 Blast Desc: NCU06099 [Neurospora crassa OR74A] gi|28921419|gb|EAA30725.1| NCU06099 [Neurospora crassa OR74A]
  misc_feature (4)..(676): NCBI GI: 256732902 Blast Desc: [Nectria haematococca mpVI 77-13-4]
  misc_feature (4)..(676): NCBI GI: 46123951 Blast Desc: FG06353.1 [Gibberella zeae PH-1]
  misc_feature (4)..(676): NCBI GI: 39974013 Blast Desc: MGG_00847 [Magnaporthe grisea 70-15] gi|145018212|gb|EDK02491.1| MGG_00847 [Magnaporthe grisea 70-15]
  misc_feature (4)..(676): NCBI GI: 156039563 Blast Desc: SS1G_11918 [Sclerotinia sclerotiorum 1980] gi|154697655|gb|EDN97393.1| SS1G_11918 [Sclerotinia sclerotiorum 1980]
  misc_feature (4)..(536): NCBI GI: 154301302 Blast Desc: BC1G_10321 [Botryotinia fuckeliana B05.10] gi|150856222|gb|EDN31414.1| BC1G_10321 [Botryotinia fuckeliana B05.10]
  misc_feature (4)..(673): NCBI GI: 169618096 Blast Desc: SNOG_12236 [Phaeosphaeria nodorum SN15] gi|111059528|gb|EAT80648.1| SNOG_12236 [Phaeosphaeria nodorum SN15]
  misc_feature (4)..(673): NCBI GI: 189194707 Blast Desc: conserved [Pyrenophora tritici-repentis Pt-1C-BFP] gi|187979256|gb|EDU45882.1| conserved [Pyrenophora tritici-repentis Pt-1C-BFP]
  misc_feature (4)..(677): NCBI GI: 119493328 Blast Desc: eukaryotic translation initiation factor subunit eIF2A, [Neosartorya fischeri NRRL 181] gi|119412014|gb|EAW21957.1| eukaryotic translation initiation
  misc_feature: Useful for introducing or modulating the production of volatile compounds
MDPAAPLQFAYRTQKAIGITDAAPVYAPLPGFVKPEGTLRCCVYSPCGRYLAWATNERVSVVDASAGNVLSWFPVSTIYDVAFSPRGTYLSTWERPAKDENGDATKNLKIWRAVEDVPEGVDRQPMSQFVQKAQSGWNLQYTSDEKFCARIVTNEVQFYNSNDLRTVWNKLRVEGLTDFALAPGQSHNVAVFVPERKGQPATVKVFNVPQFNTPISQKTFFKGDKVQLKWNSLGTSLIVLAQTEVDKSNKSYYGETTLYLLSANGSLDARITLDKEGPIHDVSWSPNGKEFGVIYGYMPAKTTIFNHRAVASHSFALGPRNTIIFSPTGRFALVAGFGNLAGQIDVYDLEKDYKKICTIESGNPSVCQWSPDSRYIMTATTSPRLRVDNGVKLWHVGGTIMYHEDMEELYNVSWRPCLPEDVSQADPLNPIPPPMNPLSRARGMSTPLHFRREDEGGAAHIMSNGAINVGPNGFGRQRRQVPGADLLENGSRSVPGAAPAQVPGGPADEALSKAALKNKKKRNNKKAKENEGQGPQGQNGGLAPPPHDHGPGSGTEGRSPERRGYQQNQQRHNRSRSRHAQGGNNPNRNRSNTQQNGQAQSVPKVNTAQPPAADSLLSPGSQNPASKKLRGLQKKIRAIEDLEMRLAGGEKLEDTQMKKIATKASVIKELEGIEREGSAA

SEQ ID NO: 39324 - DNA, 3166 bp, Muscodor strobelii
  misc_feature: SGI EST ID NO. CUFF.95385.1
  misc_feature: Variant of the nucleotide sequence at SEQ ID NO 39322
catcgccgcgtctttcacagctcctggtctttcttccgcttccctttcttcagcccagtcgctcgtcgtccgccgcgttgtcaagtccaccgccaacccaccgtcaatccatccccctttggtcgggtgacctgtcaattcccccttcttcgcttcctttcttgtcccgacccctcctgttcctctcgatcgcccgcgctcggcccgtcgcactcgatcctagcaccggcacaaagtcaaacagaccgtgttgttggcaccgtcacgtcatcgcctgctactgcaatcccgcccttcgcccgtgcgtgtctgccctctgcctctgcctcaatttctgtgtggccgccaacagcctgacaagcagcagtctagcagtgaaacagcccagtgagtcccatccatctgcaacaaaagtctgattcaacatggctctacattatatcatatcattctgcatcccgcgctacctagtttggatattgtcctactacaaacctgaaccatactcgctaaccaccgcccggcacagctagcttgaactctccgtcgacaaccaccatcaacgtccatcgcccaacccgatttgataatcatcacggactacgactacgatcggccgctgtctgctcacgagagactcttcgctgccctcctccctccccccttcttcgacgacaagaatcgaagcgaccgacctcccaacctgccaacgatcctcgctgctgtgactttgactagtcatggatcccgccgccccgttgcagtttgcctaccgcacccagaaggccatcggcatcaccgacgccgcccccgtctatgccccgttgcctgggttcgtcaagcccgaggggacactgcggtgctgcgtctactcgccctgcggccgctacctcgcctgggctaccaacgagcgagtgtccgtcgtcgatgcatccgccggcaacgtcctgtcgtggttccccgtctccaccatctacgacgtcgccttctccccgcgcggcacctacctgagcacctgggagcggcccgccaaggatgagaacggcgatgccaccaagaacctgaagatctggcgggcggtcgaggatgtgcccgagggcgtcgacaggcagcccatgagccagttcgtccagaaggcccagtccggctggaacctgcagtacacgtccgacgagaagttctgcgcccgcatcgtcaccaacgaggtccagttctacaacagcaacgacctgaggactgtctggaacaagctgcgcgtcgagggcctcaccgacttcgccctcgccccgggccagagccacaacgtcgccgtcttcgtccccgagcgcaagggtcaacctgcgaccgtcaaggtcttcaacgtgccccagttcaacaccccgatctcgcagaagaccttcttcaagggcgacaaggtccagctcaagtggaacagcctcggcaccagcctcattgtcctggcccagaccgaggtcgacaagtccaacaagagctactacggcgagaccaccctctacctcctcagcgccaacgggtccctcgacgcccgaatcacgctggacaaggaggggccgattcacgatgtctcctggtcgcccaacggcaaggagttcggtgtcatctacgggtacatgcccgccaagaccaccatcttcaaccaccgcgccgtcgcctcccactccttcgccctcggtccccgcaacaccatcatcttctcccccaccggacgattcgcactcgtcgccggctttggtaacttggctggccagatcgatgtctacgacttggagaaggactacaagaagatctgcaccatcgagagcggcaaccccagcgtctgccagtggagccccgacagccgctacatcatgaccgcgaccacctccccccgcctgcgagtcgacaacggcgtgaagctgtggcatgttggcggcaccatcatgtatcatgaggacatggaggagctgtataacgtatcctggaggccatgcctccctgaggatgtttcccaggccgacccgctgaaccccatcccaccccccatgaatccgctatcacgtacttgggcagggttaagactccgtccaagccggttggcgcatacagacctccaggtgccagaggtatgagcacgccccttcacttcaggcgtgaagatgaaggcggtgcggcccacatcatgagcaacggcgccatcaacgtcggccccaatggcttcggcagacagcgtcgccaggttccgggcgctgacttgctggagaatggcagtcgatctgttcccggtgcggctccggcccaggttcccggcggtcctgctgacgaggccttgtcgaaggctgctctgaagaataagaagaaaaggaacaataagaaggccaaagaaaacgagggccaagggccccaaggtcaaaacggtggactggccccaccccctcatgaccacggccccggttccggaaccgaaggacgcagccccgagcgtcgtggataccaacagaaccagcagcgacacaaccgaagtcgctcgcgacatgcccaagggggtaacaaccccaaccgcaatcgcagcaacacccaacagaatggccaggcccaatctgtgcccaaggtcaatactgctcagcccccagctgccgattcgctgctgtcccccggtagccaaaatcccgcttcgaagaagctacgtggcctccagaagaagatccgtgctatcgaagatctcgagatgcgactggccggaggcgagaagctcgaagatacccagatgaagaagattgccactaaagccagtgtcatcaaggagctcgagggtatcgagagagaagggtcggctgcctaaaaggttctggggctgctgatattccaaaagtttgtgtatatgggagcgatgggctctttctgtgcgatgacgatcgcaagagacagagatgcagtatgccgtcatccagcgagcaccttcgaacatgatgagggtcctattaaggaaccaggaggaataacgtaatccaacattgccgagtgatttggtcacgttggacatcatcacgggcgtactatactgtctggtcaggtatgcctccatatagacatctatggatagagaaaaatgagacatatgaggtcatggtgttcatgacctacttggcgatccatgattatctactag

SEQ ID NO: 39325 - DNA, 3603 bp, Muscodor strobelii
  misc_feature: SGI cDNA ID NO. 573679
  misc_feature: Encodes the peptide sequence at SEQ ID NO 39326
atggatcccgccgccccgttgcagtttgcctaccgcacccagaaggccatcggcatcaccgacgccgcccccgtctatgccccgttgcctgggttcgtcaagcccgaggggacactgcggtgctgcgtctactcgccctgcggccgctacctcgcctgggctaccaacgagcgagtgtccgtcgtcgatgcatccgccggcaacgtcctgtcgtggttccccgtctccaccatctacgacgtcgccttctccccgcgcggcacctacctgagcacctgggagcggcccgccaaggatgagaacggcgatgccaccaagaacctgaagatctggcgggcggtcgaggatgtgcccgagggcgtcgacaggcagcccatgagccagttcgtccagaaggcccagtccggctggaacctgcagtacacgtccgacgagaagttctgcgcccgcatcgtcaccaacgaggtccagttctacaacagcaacgacctgaggactgtctggaacaagctgcgcgtcgagggcctcaccgacttcgccctcgccccgggccagagccacaacgtcgccgtcttcgtccccgagcgcaagggtcaacctgcgaccgtcaaggtcttcaacgtgccccagttcaacaccccgatctcgcagaagaccttcttcaagggcgacaaggtccagctcaagtggaacagcctcggcaccagcctcattgtcctggcccagaccgaggtcgacaagtccaacaagagctactacggcgagaccaccctctacctcctcagcgccaacgggtccctcgacgcccgaatcacgctggacaaggaggggccgattcacgatgtctcctggtcgcccaacggcaaggagttcggtgtcatctacgggtacatgcccgccaagaccaccatcttcaaccaccgcgccgtcgcctcccactccttcgccctcggtccccgcaacaccatcatcttctcccccaccggacgattcgcactcgtcgccggctttggtaacttggctggccagatcgatgtctacgacttggagaaggactacaagaagatctgcaccatcgagagcggcaaccccagcgtctgccagtggagccccgacagccgctacatcatgaccgcgaccacctccccccgcctgcgagtcgacaacggcgtgaagctgtggcatgttggcggcaccatcatgtatcatgaggacatggaggagctgtataacgtatcctggaggccatgcctccctgaggatgtttcccaggccgacccgctgaaccccatcccaccccccatgaatccgctatcacgtgccagaggtatgagcacgccccttcacttcaggcgtgaagatgaaggcggtgcggcccacatcatgagcaacggcgccatcaacgtcggccccaatggcttcggcagacagcgtcgccaggttccgggcgctgacttgctggagaatggcagtcgatctgttcccggtgcggctccggcccaggttcccggcggtcctgctgacgaggccttgtcgaaggctgctctgaagaataagaagaaaaggaacaataagaaggccaaagaaaacgagggccaagggccccaaggtcaaaacggtggactggccccaccccctcatgaccacggccccggttccggaaccgaaggacgcagccccgagcgtcgtggataccaacagaaccagcagcgacacaaccgaagtcgctcgcgacatgcccaagggggtaacaaccccaaccgcaatcgcagcaacacccaacagaatggccaggcccaatctgtgcccaaggtcaatactgctcagcccccagctgccgattcgctgctgtcccccggtagccaaaatcccgcttcgaagaagctacgtggcctccagaagaagatccgtgctatcgaagatctcgagatgcgactggccggaggcgagaagctcgaagatacccagatgaagaagattgccactaaagccagtgtcatcaaggagctcgagggtatcgagagagaaggtgaagtatctgacacctatcgtgattgcgctggcttcgaccgtgactaccgctatcgccactaccttcttcgaacctgctccactgctccgagttcaggccccatgtctccatctccatctccaacgactcccggcgctagaaagctccactttgtcatcgttgggggatcactgggcggactggcgacgggtatcgcgctgaagagcttggggcataagactacgatattggagagaaaccggacgccgctgcttcaggaccagggcgcggggattgtggcgggtggcgatacgcttgattttttgaagaagtatgtgagatttgaaccgaaacgctctggtcctgaaaatgacgggcatgcgagcgatgttgatgccgataggcaagatgggggtacgagtgatcattttgtgaggagcgagagagataactatgcgatacgatcctccgcacgagtatatgtaaaccgcgacggggaacaggtacataagaaggatagtgtgcagtatatgacgtcttgggatatggtgtaccatctgttgagggcgaattttgatgggtttcagagcgagtattgcgatgtcccaccggaagaccctgaccatggtgaggcgatctatgcttatgatcggactgttgtccatgtacgactgtcccaactcaaggccgcgagcccagatactgagacgcttggaggtacggacgaggtggaaatttcatggcggaacagtcaaggtgacgaaggtagtctgaaagcggactacgtcattggagcagatggcccgtcctcgactatcagggcgcttgccctggaacttgaagatagaccggcagtgcagaggacgtacgcggggtattgtgcgctgagagggacggtttgtgagtctgacccagcgttgtcgaagcagactttggaggtgttccgagagaaattcacattcttccatggaccgggcacacagatcttgtgctatctgattcccggcacaaacggtgcaacacgttctggagcacgactagtcaacttcgtttggtatgtcaattttccggacggcaccgaagaagtagaggaaatcatgacagacctctcgggtcgtcaacgcagcatcacagtaccgcccggtcagcttaactccgctgcatgggagaaacaatgtgcaaaggctagacagcaattaccggcggtattcgcagaggtggtatgcgcggcgaaaagaccgtttgcacagaaagtcactgatgtgttgtctcccgaacatgagttcctcggcgggaaaataatacttattggtgatgcgctggcggggtttagacctcatactgttgcttctacgagtcaggctatgagggatgctgatttgctcgcacgatatgtgcaaggagtgattggtagagaggaatggaagagagagactcttggtatggccaggacgttgcagagacgaggtgttgagatgggggctcggagtcaagaaatggtgctagatctagaagagtatattaaggatagagagagggcgagtttgccgaggagcgaggagaattgggaggagtgggcaacgatgttttaa

SEQ ID NO: 39326 - protein, 1200 aa, Muscodor strobelii
  misc_feature: SGI Peptide ID NO. 573679
  misc_feature (218)..(412): Pfam Id: PF08662 Pfam Desc: Eukaryotic translation initiation factor eIF2A
  misc_feature (727)..(761): Pfam Id: PF00070 Pfam Desc: Pyridine nucleotide-disulphide oxidoreductase
  misc_feature (727)..(763): Pfam Id: PF07992 Pfam Desc: Pyridine nucleotide-disulphide oxidoreductase
  misc_feature (4)..(676): NCBI GI: 171679431 Blast Desc: protein product [Podospora anserina] gi|170939341|emb|CAP64569.1| protein product [Podospora anserina]
  misc_feature (4)..(678): NCBI GI: 85094855 Blast Desc: NCU06099 [Neurospora crassa OR74A] gi|28921419|gb|EAA30725.1| NCU06099 [Neurospora crassa OR74A]
  misc_feature (4)..(676): NCBI GI: 256732902 Blast Desc: [Nectria haematococca mpVI 77-13-4]
  misc_feature (4)..(676): NCBI GI: 46123951 Blast Desc: FG06353.1 [Gibberella zeae PH-1]
  misc_feature (4)..(676): NCBI GI: 39974013 Blast Desc: MGG_00847 [Magnaporthe grisea 70-15] gi|145018212|gb|EDK02491.1| MGG_00847 [Magnaporthe grisea 70-15]
  misc_feature (4)..(676): NCBI GI: 156039563 Blast Desc: SS1G_11918 [Sclerotinia sclerotiorum 1980] gi|154697655|gb|EDN97393.1| SS1G_11918 [Sclerotinia sclerotiorum 1980]
  misc_feature (4)..(536): NCBI GI: 154301302 Blast Desc: BC1G_10321 [Botryotinia fuckeliana B05.10] gi|150856222|gb|EDN31414.1| BC1G_10321 [Botryotinia fuckeliana B05.10]
  misc_feature (4)..(673): NCBI GI: 169618096 Blast Desc: SNOG_12236 [Phaeosphaeria nodorum SN15] gi|111059528|gb|EAT80648.1| SNOG_12236 [Phaeosphaeria nodorum SN15]
  misc_feature (4)..(673): NCBI GI: 189194707 Blast Desc: conserved [Pyrenophora tritici-repentis Pt-1C-BFP] gi|187979256|gb|EDU45882.1| conserved [Pyrenophora tritici-repentis Pt-1C-BFP]
  misc_feature (4)..(677): NCBI GI: 119493328 Blast Desc: eukaryotic translation initiation factor subunit eIF2A, [Neosartorya fischeri NRRL 181] gi|119412014|gb|EAW21957.1| eukaryotic translation initiation
MDPAAPLQFAYRTQKAIGITDAAPVYAPLPGFVKPEGTLRCCVYSPCGRYLAWATNERVSVVDASAGNVLSWFPVSTIYDVAFSPRGTYLSTWERPAKDENGDATKNLKIWRAVEDVPEGVDRQPMSQFVQKAQSGWNLQYTSDEKFCARIVTNEVQFYNSNDLRTVWNKLRVEGLTDFALAPGQSHNVAVFVPERKGQPATVKVFNVPQFNTPISQKTFFKGDKVQLKWNSLGTSLIVLAQTEVDKSNKSYYGETTLYLLSANGSLDARITLDKEGPIHDVSWSPNGKEFGVIYGYMPAKTTIFNHRAVASHSFALGPRNTIIFSPTGRFALVAGFGNLAGQIDVYDLEKDYKKICTIESGNPSVCQWSPDSRYIMTATTSPRLRVDNGVKLWHVGGTIMYHEDMEELYNVSWRPCLPEDVSQADPLNPIPPPMNPLSRARGMSTPLHFRREDEGGAAHIMSNGAINVGPNGFGRQRRQVPGADLLENGSRSVPGAAPAQVPGGPADEALSKAALKNKKKRNNKKAKENEGQGPQGQNGGLAPPPHDHGPGSGTEGRSPERRGYQQNQQRHNRSRSRHAQGGNNPNRNRSNTQQNGQAQSVPKVNTAQPPAADSLLSPGSQNPASKKLRGLQKKIRAIEDLEMRLAGGEKLEDTQMKKIATKASVIKELEGIEREGEVSDTYRDCAGFDRDYRYRHYLLRTCSTAPSSGPMSPSPSPTTPGARKLHFVIVGGSLGGLATGIALKSLGHKTTILERNRTPLLQDQGAGIVAGGDTLDFLKKYVRFEPKRSGPENDGHASDVDADRQDGGTSDHFVRSERDNYAIRSSARVYVNRDGEQVHKKDSVQYMTSWDMVYHLLRANFDGFQSEYCDVPPEDPDHGEAIYAYDRTVVHVRLSQLKAASPDTETLGGTDEVEISWRNSQGDEGSLKADYVIGADGPSSTIRALALELEDRPAVQRTYAGYCALRGTVCESDPALSKQTLEVFREKFTFFHGPGTQILCYLIPGTNGATRSGARLVNFVWYVNFPDGTEEVEEIMTDLSGRQRSITVPPGQLNSAAWEKQCAKARQQLPAVFAEVVCAAKRPFAQKVTDVLSPEHEFLGGKIILIGDALAGFRPHTVASTSQAMRDADLLARYVQGVIGREEWKRETLGMARTLQRRGVEMGARSQEMVLDLEEYIKDRERASLPRSEENWEEWATMF

SEQ ID NO: 39327 - DNA, 3166 bp, Muscodor strobelii; identical to SEQ ID NO: 39324
  misc_feature: SGI EST ID NO. CUFF.95385.1
  misc_feature: Variant of the nucleotide sequence at SEQ ID NO 39325

SEQ ID NO: 39328 - DNA, 3759 bp, Muscodor strobelii
  misc_feature: SGI cDNA ID NO. 573680
  misc_feature: Encodes the peptide sequence at SEQ ID NO 39329
atgagtgagtcggtgaagggcatcgctttcttcggcactccacatcatgggttctccgatgatatctccaacgaagcactcgttcgcatcatcgccagcaggctcatgatccctttcggaacttcgctggttgcagcgaccaaaagaaaattgggaaagggtcgtttgcacccaagccacttaagcttcccaagaccaaaggctgcagcaactgttcaccagcaatggctagatcagtgcaaggggagggtgaagatcgcatcgttttacgagactgtgcctgtgattgtttccagatctgaagcagtcgtagggcttccggagtctgaagaatatgttgttccactggccatggatcacagtaacttggtaaaatttgcagcatatgacgatgcgcattaccgagccacgcgaacctatatttcgcgcctagtaacgcatgtcagacagtcaagtcctgaacatggctatctgaacaggcgagagcttctatcatttcagcttttgtatccagagggtctctcttcccgcagagatatgattgagatgcccaatgatggaacctgcgcgtggatcctagattctccttcgttcaaagaatggctaacgtcggctgacactggtgttctgtgggttactgggaaggctggtagcggcaaatcaaccttatgcaggttcttggagcagtcgctgcctttgactatagaatctagccctagtctgcctagattctcgcgtctgtccttcttctctgatatatggtcacctccggatagtgccgaaagtgtgctccggctgatgcttcaccaagcggtgactacgcatccatcgcttctttcattggttgcaaaagacctgaagcgaagccgaaagtggtcagggaacttgacccggtcgcttggacacacgatttctcacctcgccaagcaccaaagcttcgcatgtttcattgatggtttagatgaaagggaatatggttctcaagtcgagagagacgtccttgaggctctactcggaaatcaccctcaggaatcttggagggaagcatatgattgcggatgttacatgaagtcgccttccatcaaactcttgctcacatctcgaccccacaggaaaggactgaatcaattctcttgtcgcactagtacactggatctctctactggcgaaggggctttcggcgtacaacgcgatgtacggcgcatcatttatagatcactacatcttcacagcagcaatccaacacagcttgacatcttgaatcgtaagatcatgagcattgtttcgagcattacgaacagtactgctggagcatttttatggtgtcgactagtagtcagcttcttcagacagcggattggatcgagctacgacagtgggatggtatcgtttcgcgtgtcgacaatgcctgaggagcttcaagacctataccagatggttctagacagtattctctacgataattatcgactcagggctttggagtgggtgatattctcaagtcggacgttaatgcttgcggaactgcttgaagcaatgagcatcgatgcagacccaatctggccagatactcgtcggatccgccactatgctagaaagcgcaacacgagattggactttgcggagattacgagtccattcttgcttgttgaggaatcaagggttgtgctcattcataagtcagcaagagacttcctcatctcacgcctctctcagcatcggaaagcacccctcaagacgtatgtcagctctatcaatacccatattctcgatgattgcacgtccgtacttgctgtttgcgacgacagccagatcacccgaaacggattgccgctgtactattatgcagcgacccagtggtacacacatctacagtcccgcattgacttgactgtcagtcagcgcagcattgtgcttcaaaatctctgtagtccaaagtctcgcttgttcacggcgtggttccccacctggtgggaggacaaatggaaccaagagtgggaattggctagaatccccaaacacccgagcgaggacgttattctagctttccttggagacgaactagagctcaagagttggctacggaaacaaacacctaaaagacgtactgtgaagggccgagaatggacgcctctcatggccgctgcctggagtggccacgagagggttgtcgacatgctgctttcttcaaaccagagcagcgatttccatccacagatcggagctcgcgctttagtatacgctctggatcatggtcatgagacgattgctcaagcactcattatgtcgtttgctgccgccacaccggggccaaagccgatatttggtgggccagctgcatttgctgacaggattgccaatcctctcatggtggcatgccgaaaaggctacccggatatggtaaaacttctgcttgatagtggggttgatatcaacaagcgtaatgcttcgaatacaatggcgatccattgggctatcagacagggacatgatactgtcgttaaggtattgcttgccaggggggccgaccttgattcacacgccttgtccctagcttgtgacaccgataatgaagatatcagatcgacaatcgtgagcaagaggctacgatatcgccccgaggtgcaacatgattcttgggatgcgacgacgtcgctacgcttttcaacgaagttacgcgatcaattgtctgtagccaagctccttgaatgcgggacaaaccctgcagtccctgatgtctcaggaagcactgctattgaaacggcggttcaaagcagctggattgaaggcatagaattattcgtcgcgtttggccatggtgagctcatgctattggagtcgtgtaggaacgccaagactgatatggtccaacttctgctggaaatgggcgtctctccagatgcatcagctgttcctgacggccgctcagctattcattgcgctattaattctagcttttatgcctcatcagtaaaaaacgattcgtcaatggatgtcatgcgggcactgttggaacatggtgctgatgtcaattattccgacgctaggggtgacacaggtctccacatcgcgtcacggcagggcaatatacccatcgtagctttattgatgcaatttggtgccgatctatgtgctgagaattcggctggggagaccgccatggatcttgcggctcttaatgggcacatctcgctcatcgctctgctacttgatatgggttgcgtggttcgagccacgacgtggcagaacgccctaactagcggaaatatcgaagttgtgttgcatatcatttcccatgtgcggcgtggcatgatgggcgaagacttggaagcccagtctcctatacacccttccccgaccgaagtgattgaatatttcatgatgggtgacaatgcaccaattcgatttcaagcggctgtggaatttttacgtcgtgcacatgcttccgctagtcctattatcgaacttgatttcaacgacagactgcgtttcatcgatgtcctgaagcattggtgggagcggctaacatctgcaagatggtcttggtggccattgaagccgccaatcccttatctgactgcacataaggcctggataagatggttatgcgtaaaaggagttcagagctgcatgaacgaggccagccgctcgatccagatccagatgagaacattgactctgaccatgatcaaacggcacaacgaaggggccgttgggtgtattataaacctcatcgatcctcggaacccaaagaattag

SEQ ID NO: 39329 - protein, 1252 aa, Muscodor strobelii
  misc_feature: SGI Peptide ID NO. 573680
  misc_feature (1016)..(1048): Pfam Id: PF00023 Pfam Desc: Ankyrin repeat
  misc_feature (784)..(816): Pfam Id: PF00023 Pfam Desc: Ankyrin repeat
  misc_feature (973)..(1015): Pfam Id: PF00023 Pfam Desc: Ankyrin repeat
  misc_feature (1049)..(1081): Pfam Id: PF00023 Pfam Desc: Ankyrin repeat
  misc_feature (788)..(816): Pfam Id: PF00023 Pfam Desc: Ankyrin repeat
  misc_feature (707)..(729): Pfam Id: PF00023 Pfam Desc: Ankyrin repeat
  misc_feature (821)..(849): Pfam Id: PF00023 Pfam Desc: Ankyrin repeat
  misc_feature (184)..(1122): NCBI GI: 242760147 Blast Desc: Pfs, NACHT and Ankyrin domain protein [Talaromyces stipitatus ATCC 10500] gi|218723125|gb|EED22542.1| Pfs, NACHT and Ankyrin domain protein [Talaromyces stipitatus ATCC 10500]
  misc_feature (178)..(1066): NCBI GI: 154310142 Blast Desc: BC1G_06991 [Botryotinia fuckeliana B05.10] gi|150851552|gb|EDN26745.1| BC1G_06991 [Botryotinia fuckeliana B05.10]
  misc_feature (168)..(1122): NCBI GI: 67526171 Blast Desc: AN3543.2 [Aspergillus nidulans FGSC A4] gi|40739678|gb|EAA58868.1| AN3543.2 [Aspergillus nidulans FGSC A4] gi|259481936|tpe|CBF75924.1| TPA: conserved [Aspergillus FGSC
  misc_feature (188)..(1113): NCBI GI: 154310156 Blast Desc: BC1G_06998 [Botryotinia fuckeliana B05.10] gi|150851559|gb|EDN26752.1| BC1G_06998 [Botryotinia fuckeliana B05.10]
  misc_feature (166)..(1075): NCBI GI: 159123470 Blast Desc: Ankyrin repeat protein [Aspergillus fumigatus A1163]
  misc_feature (184)..(1076): NCBI GI: 242760891 Blast Desc: ankyrin repeat-containing protein, [Talaromyces stipitatus ATCC 10500] gi|218723276|gb|EED22693.1| ankyrin repeat-containing protein, [Talaromyces stipitatus ATCC 10500]
  misc_feature (184)..(1073): NCBI GI: 170111436 Blast Desc: ectomycorrhiza-induced ankyrin-domain/NACHT-domain containing protein [Laccaria bicolor S238N-H82] gi|164638280|gb|EDR02559.1| ectomycorrhiza-induced containing
  misc_feature (178)..(1043): NCBI GI: 255944215 Blast Desc: Pc20g03230 [Penicillium chrysogenum Wisconsin 54-1255] gi|211587610|emb|CAP85652.1| Pc20g03230 [Penicillium chrysogenum Wisconsin 54-1255]
  misc_feature (160)..(1073): NCBI GI: 255950182 Blast Desc: Pc22g19550 [Penicillium chrysogenum Wisconsin 54-1255] gi|211592875|emb|CAP99243.1| Pc22g19550 [Penicillium chrysogenum Wisconsin 54-1255]
  misc_feature (186)..(812): NCBI GI: 238841880 Blast Desc: ankyrin repeat protein [Microsporum canis CBS 113480]
MSESVKGIAFFGTPHHGFSDDISNEALVRIIASRLMIPFGTSLVAATKRKLGKGRLHPSHLSFPRPKAAATVHQQWLDQCKGRVKIASFYETVPVIVSRSEAVVGLPESEEYVVPLAMDHSNLVKFAAYDDAHYRATRTYISRLVTHVRQSSPEHGYLNRRELLSFQLLYPEGLSSRRDMIEMPNDGTCAWILDSPSFKEWLTSADTGVLWVTGKAGSGKSTLCRFLEQSLPLTIESSPSLPRFSRLSFFSDIWSPPDSAESVLRLMLHQAVTTHPSLLSLVAKDLKRSRKWSGNLTRSLGHTISHLAKHQSFACFIDGLDEREYGSQVERDVLEALLGNHPQESWREAYDCGCYMKSPSIKLLLTSRPHRKGLNQFSCRTSTLDLSTGEGAFGVQRDVRRIIYRSLHLHSSNPTQLDILNRKIMSIVSSITNSTAGAFLWCRLVVSFFRQRIGSSYDSGMVSFRVSTMPEELQDLYQMVLDSILYDNYRLRALEWVIFSSRTLMLAELLEAMSIDADPIWPDTRRIRHYARKRNTRLDFAEITSPFLLVEESRVVLIHKSARDFLISRLSQHRKAPLKTYVSSINTHILDDCTSVLAVCDDSQITRNGLPLYYYAATQWYTHLQSRIDLTVSQRSIVLQNLCSPKSRLFTAWFPTWWEDKWNQEWELARIPKHPSEDVILAFLGDELELKSWLRKQTPKRRTVKGREWTPLMAAAWSGHERVVDMLLSSNQSSDFHPQIGARALVYALDHGHETIAQALIMSFAAATPGPKPIFGGPAAFADRIANPLMVACRKGYPDMVKLLLDSGVDINKRNASNTMAIHWAIRQGHDTVVKVLLARGADLDSHALSLACDTDNEDIRSTIVSKRLRYRPEVQHDSWDATTSLRFSTKLRDQLSVAKLLECGTNPAVPDVSGSTAIETAVQSSWIEGIELFVAFGHGELMLLESCRNAKTDMVQLLLEMGVSPDASAVPDGRSAIHCAINSSFYASSVKNDSSMDVMRALLEHGADVNYSDARGDTGLHIASRQGNIPIVALLMQFGADLCAENSAGETAMDLAALNGHISLIALLLDMGCVVRATTWQNALTSGNIEVVLHIISHVRRGMMGEDLEAQSPIHPSPTEVIEYFMMGDNAPIRFQAAVEFLRRAHASASPIIELDFNDRLRFIDVLKHWWERLTSARWSWWPLKPPIPYLTAHKAWIRWLCVKGVQSCMNEASRSIQIQMRTLTLTMIKRHNEGAVGCIINLIDPRNPKN

SEQ ID NO: 39330 - DNA, 2319 bp, Muscodor strobelii
  misc_feature: SGI cDNA ID NO. 573681
  misc_feature: Encodes the peptide sequence at SEQ ID NO 39331
atgggcaatccttcagaggctcctactgggagttctcagcctacaccaaatgatgtgccacgcccgcctcctatcaatacaccaattcttattccttcgcacaatacactaatcactctgcacagcacagactcttcatcgcagtctgaaactgcagacttccggaaggtaggcatcgcagatcgggcgatgtcgtcacaggtacttgcagatgacatcttgcgtgagcctaggatgcctcttatcaggtcaattggagtctttggaatggtggctctgacagctggtaccgcggtgatatttgcagcagtcggcatcctgggattcgtttggttcggtggaggttcgagccctgaagcacgagatgcaccttgggcttggcgttccatcgctttatcaggatggacttcacaagcagctaccttgatctcgcttctgcttcgtgcgattctggcagcgcaagcggcggtgacttgcggaatgcttgcagggttgatcttggagagatcatccgtgccacgatccaaagccgcccatttctcaattttgcgagccacgcggagcggagctgttactatgatacaactcatcatgtcttcccgtagcctcaaactgctattccgagtcgagccctatctagcactgctgctgttgatcgaaacagtcgctttacagttctcgtcgacaatgttactttcagacattgacacagcaatcttggtagggaagaatgatacgacagaagttctatcattcgagaaggtcggttatagcggggcatacacgtacttaccgagtgcaatagtcagcgcaaagccatcgtttcccatctacggtgagctggcgtctggcgtctctagactgccgggccccaatggagtcagcgatactgggttagtgagccgagccttcctcccaattcgagtatccgaccaaaggaaatctgtccgttattatcttggcgggactacagtgttgaattcaagaactgcttgtatacgaccagtacttcgtgacctacactttggtgctcttacatctatgggaatgccggctaacgctagttttggattgctgaacgcgacattagactatggtctaagtattgagcaggctgacggcaatgcacactgccgtgcgagtaactgttctgtcatcccatttacttgttttgttcctggagccttcgacggatatggcagccagagctcaatgtgctttgcaggcggcgtaggtggcacgttgtggtcacccagcgatggaccaggggtttatccaatcgaccagccgtgggcagtgaactcttcaatttaccttgtattccgcacagatatgcagagccaagattggttcaacaccactaccctaggatcaccggcggtcgacttgttagtagagcaaacggcatcaaacatcgaagagtggacaagctaccagatgctaccaggtcggtcattaaatgtatcagtttgctttcaagcttataacctggactactctaacgtcgagatgaccgcacgaggctcgttgatagagccaaatattacgcaaaatccccaaacgggcgaaatcgagacagcggctgtccgacactacttcggcattggcaacaatggtcgacctaagcccggccagagggcaatcttggatatcgaacaaatcgagactgggaaatccagcagacagaaagaagaccaagatttaactttgagctcactgggctttgagatctataacgagctagcagacagcggactagtcaacggtagtcttctgtcctgttcgcactgctacctaagctctgatacccccacgcatccggatcttgtctctcttctttcagatatgattaattcgacctctcgcgcagtagacatcattcagacgtatacctatcagatcgcgtccatgctctataccaatgatctagataagtacacgattccccaaaatgtcactatgagctctcttcagccagtcacaactgcatatggctgctggagtcgaaacggctgttttggtttcgtagccgtcgtgtctttgctgactacacatctgattctcatctcgatcaccacgggtctgtatgtcaagtactcgcgcttctcaatgtgctctaatatttggtccactgtgtcgcaactaaattctagagagttagaagatatcttggattactcgaatatgtcgtgcgatgtcagtgttgagaagacattcgtacgagatcaaaacactggtgttaagattgcaaggcttcccggaacaaatcgagtaggaattgtcaagagcgatggattacctacgattgtgcaggagtaa

SEQ ID NO: 39331 - protein, 772 aa, Muscodor strobelii
  misc_feature: SGI Peptide ID NO. 573681
  misc_feature (58)..(763): NCBI GI: 145605162 Blast Desc: MGG_02132 [Magnaporthe grisea 70-15] gi|145013020|gb|EDJ97661.1| MGG_02132 [Magnaporthe grisea 70-15]
  misc_feature (66)..(761): NCBI GI: 119474385 Blast Desc: NFIA_005330 [Neosartorya fischeri NRRL 181] gi|119407221|gb|EAW17171.1| conserved [Neosartorya fischeri NRRL 181]
  misc_feature (78)..(719): NCBI GI: 46139113 Blast Desc: FG11071.1 [Gibberella zeae PH-1]
  misc_feature (34)..(760): NCBI GI: 256733978 Blast Desc: NECHADRAFT_77642 [Nectria haematococca mpVI 77-13-4]
  misc_feature (81)..(725): NCBI GI: 256722986 Blast Desc: NECHADRAFT_52602 [Nectria haematococca mpVI 77-13-4]
  misc_feature (84)..(332): NCBI GI: 256726575 Blast Desc: NECHADRAFT_79667 [Nectria haematococca mpVI 77-13-4]
  misc_feature (78)..(343): NCBI GI: 46127455 Blast Desc: FG08105.1 [Gibberella zeae PH-1]
  misc_feature (127)..(332): NCBI GI: 119482479 Blast Desc: NFIA_093340 [Neosartorya fischeri NRRL 181] gi|119409422|gb|EAW19371.1| [Neosartorya fischeri NRRL 181]
MGNPSEAPTGSSQPTPNDVPRPPPINTPILIPSHNTLITLHSTDSSSQSETADFRKVGIADRAMSSQVLADDILREPRMPLIRSIGVFGMVALTAGTAVIFAAVGILGFVWFGGGSSPEARDAPWAWRSIALSGWTSQAATLISLLLRAILAAQAAVTCGMLAGLILERSSVPRSKAAHFSILRATRSGAVTMIQLIMSSRSLKLLFRVEPYLALLLLIETVALQFSSTMLLSDIDTAILVGKNDTTEVLSFEKVGYSGAYTYLPSAIVSAKPSFPIYGELASGVSRLPGPNGVSDTGLVSRAFLPIRVSDQRKSVRYYLGGTTVLNSRTACIRPVLRDLHFGALTSMGMPANASFGLLNATLDYGLSIEQADGNAHCRASNCSVIPFTCFVPGAFDGYGSQSSMCFAGGVGGTLWSPSDGPGVYPIDQPWAVNSSIYLVFRTDMQSQDWFNTTTLGSPAVDLLVEQTASNIEEWTSYQMLPGRSLNVSVCFQAYNLDYSNVEMTARGSLIEPNITQNPQTGEIETAAVRHYFGIGNNGRPKPGQRAILDIEQIETGKSSRQKEDQDLTLSSLGFEIYNELADSGLVNGSLLSCSHCYLSSDTPTHPDLVSLLSDMINSTSRAVDIIQTYTYQIASMLYTNDLDKYTIPQNVTMSSLQPVTTAYGCWSRNGCFGFVAVVSLLTTHLILISITTGLYVKYSRFSMCSNIWSTVSQLNSRELEDILDYSNMSCDVSVEKTFVRDQNTGVKIARLPGTNRVGIVKSDGLPTIVQE

SEQ ID NO: 39332 - DNA, 1515 bp, Muscodor strobelii
  misc_feature: SGI cDNA ID NO. 573682
  misc_feature: Encodes the peptide sequence at SEQ ID NO 39333
atgaggagcctttatgtgtatctgtacgagcgagactggattgcagaaaggaatccaccccctctgtgccgaaagaccatcgcactgtggcgcatcgctatcggacacgtcctgagacacacgcctaggaaagagcttacgcttcgccttgtttgcgaactgacgccgtatcagggggatgacatccttccacccccctcgccaatgcccttccctaaatataaattcgatgctgttctcgaacccttacgtgcgtctccgggtcatttgaaggcattagaactgcaatttacgcacgcctactgggttggcaaatctaaatccacagccatcgtccagaacgcaggaaagcaaatcatgggtgaagattgtcagcgggaacctggaatgcatttcaaatttatggaccttcctcttgagattcgccgacacgtgtattcatacacggatctcgttgctccatatcgccaagttttgtggaccaagagccaaggtttcgagactctatcgagggcttacgatgacaagctagatgacagctttggcacagatctgaattgctgtgacagacattatgagggcactctcagctggttcgagccttttgggacttcttgcaattgctacaaacgcgagtattcttccctctgcaatcgtggggcgagcccgcttccgctctttctagtgagcaaggcattttatcaagaagcaattgcctatttcttttcccagaatcggatcactctccttccggggttgtatcctcctcagtaccggctagatagaggtccatattggccgactgatcaggccgaagaccaaagcgaacaatctgcggatgaggatgatgaagatgactctccacagtcaagagagggacactataagatacacgatgtctcctacgatgtcactaaagctttcctcaataagatcgggcatcactcgacgggacagctctgcacgcttgaggttgtgtttccgacaatgtgttatatttccggaatcaagtcggaaagacaccatgaatggtgcgaagcggtccgtgaacttgctgcccatacgaaatcaacaggtttgactctcgtgatcgggtttcaagctgacgatgaatattatcatcgtggaaaaccgaatcgtcgcttgcaaggattgtacgaattatttttaaaccctctgagacagataaaatctcttgatcgcctgtttatcagactacagtacaagaaccagtggtctacaataccttcaacagacacggagcattcgtacatgaacgagaatggcaaaatcgtcgccaagggcgtatttcccgactgtgaatatgatcaaaacgtaccgagaaatgcatacatggcagcagaagagcagcgcctagaagagatggtgcttggcgataaattcaatcgtagcacatatttcaagaaacaggaagtaccaagtgaatggcttcgcgtcacttggtatttcccccccaattgtttgtcgccaaccctaatccatatagctctctag

SEQ ID NO: 39333 - protein, 504 aa, Muscodor strobelii
  misc_feature: SGI Peptide ID NO. 573682
  misc_feature (7)..(249): NCBI GI: 171685318 Blast Desc: protein product [Podospora anserina] gi|170942620|emb|CAP68272.1| protein product [Podospora anserina]
  misc_feature (134)..(476): NCBI GI: 171685318 Blast Desc: protein product [Podospora anserina] gi|170942620|emb|CAP68272.1| protein product [Podospora anserina]
  misc_feature (134)..(483): NCBI GI: 116200446 Blast Desc: [Chaetomium globosum CBS 148.51] gi|88175482|gb|EAQ82950.1| [Chaetomium globosum CBS 148.51]
  misc_feature (30)..(249): NCBI GI: 116178980 Blast Desc: [Chaetomium globosum CBS 148.51] gi|88184415|gb|EAQ91883.1| [Chaetomium globosum CBS 148.51]
  misc_feature (24)..(249): NCBI GI: 171693629 Blast Desc: protein product [Podospora anserina] gi|170946763|emb|CAP73567.1| protein product [Podospora anserina]
  misc_feature (22)..(245): NCBI GI: 116194402 Blast Desc: [Chaetomium globosum CBS 148.51] gi|88179712|gb|EAQ87180.1| [Chaetomium globosum CBS 148.51]
  misc_feature (111)..(250): NCBI GI: 67901332 Blast Desc: AN7653.2 [Aspergillus nidulans FGSC A4] gi|40742649|gb|EAA61839.1| AN7653.2 [Aspergillus nidulans FGSC A4]
  misc_feature (111)..(250): NCBI GI: 259483987 Blast Desc: TPA: conserved [Aspergillus nidulans FGSC A4]
MRSLYVYLYERDWIAERNPPPLCRKTIALWRIAIGHVLRHTPRKELTLRLVCELTPYQGDDILPPPSPMPFPKYKFDAVLEPLRASPGHLKALELQFTHAYWVGKSKSTAIVQNAGKQIMGEDCQREPGMHFKFMDLPLEIRRHVYSYTDLVAPYRQVLWTKSQGFETLSRAYDDKLDDSFGTDLNCCDRHYEGTLSWFEPFGTSCNCYKREYSSLCNRGASPLPLFLVSKAFYQEAIAYFFSQNRITLLPGLYPPQYRLDRGPYWPTDQAEDQSEQSADEDDEDDSPQSREGHYKIHDVSYDVTKAFLNKIGHHSTGQLCTLEVVFPTMCYISGIKSERHHEWCEAVRELAAHTKSTGLTLVIGFQADDEYYHRGKPNRRLQGLYELFLNPLRQIKSLDRLFIRLQYKNQWSTIPSTDTEHSYMNENGKIVAKGVFPDCEYDQNVPRNAYMAAEEQRLEEMVLGDKFNRSTYFKKQEVPSEWLRVTWYFPPNCLSPTLIHIAL

SEQ ID NO: 39334 - DNA, 1677 bp, Muscodor strobelii
  misc_feature: SGI cDNA ID NO. 573683
  misc_feature: Encodes the peptide sequence at SEQ ID NO 39335
atgccaccgaccaatctcgtcatcgacgcaattgagctatctcacacatcacatgcggctacgtgcgaccgacttgccactatgcctgccgtcagccccgacgaagacatcagcagcatgcactccacgctcctacccagcaacgcctcgttgccgaacatgcaccagagctttcgcgatcttcaacttccaggccatgactcagttacaattttctgcttgcctcgagccgtccggcatcgtatatggtggttcagtggccggatgattgagagctgcatccgactaccgccaccgtgcaatcttgttccggatccattgttcgatggcgctcccgctccttttcatgtatgttcagcaatacgaaatgacttcttgtcgtatctgttctcggttcatcgacttaacatccgagatcgcgatatcgacaccgcactcaagtatttgatccgtatgcctcgcaccgttctcacggatatacaagatctacatatagatctgcttggttatgggaacttcggcccccgtccgtgttgggaaacaatccacatctggcaaattactgctgagaaatcaatgctgcatacaactccaggacgtcttactctgcgcatctgttgtaagatggcactggcgagtggggaggagcccatacctatggaccaaatcacagctattctcaaccctctgcatggatttccgggacacctgagggcattagagttgcggttcgagagtatagaatggcaggtcaaagttcctccaagattaactaagttgatccgtgatgctggttgtcggataatgatagcccacgatgatcccaagaaacctttcgatttcatgaagctgcctcctgagattcgcaaccacgtatactcgtttaccaaccttgtcgccccttatcgtcaagtgcaatggaccagaaacctcggattcgagacaatggttccagcatgccactggaatttctatggtcacattgcaattagccgttattgtacctccagtttccactacgatgaccactttggaacatgtggatctgactcagcagagaggacagatcctctcggcggtgatgtcacaaaagaatttttcgacatcattggagactatgcacttggagccttgagaagagtagatatcgtgtttcctacaatatcggcgacgttcaatgtgacgaactctatagcacaccaagagtggtgcagtgctataaagcatctagcgacccacgggaattcatcgagtctcatgcttgccctgaacttcgatgccgcaaagggtcttcacaaggatggaatgaagcttggaaagcctgggcatcatcttaaaagcatttatgaatccttcgtaaatcccttggcggagttaaagcagctacgtcacctctttgttcgtctccaatgtaaaacgcaatggtcttcaccgtcgccacgactattcaaagatgtcgatatgagtaggaagcgcggcatatacataagactgagtgacgaccattccgttgcgtcacccaacacgtctattgcggaggaagagctacgcttggagacaattgtgctcggtacccaaaccgctaagaatacgcataagaagaacagtcaaatcccgagtgtctggtggcacagtgtttgggatcacgctattgacccatgggacgaagacgggtga

SEQ ID NO: 39335 - protein, 558 aa, Muscodor strobelii
  misc_feature: SGI Peptide ID NO. 573683
MPPTNLVIDAIELSHTSHAATCDRLATMPAVSPDEDISSMHSTLLPSNASLPNMHQSFRDLQLPGHDSVTIFCLPRAVRHRIWWFSGRMIESCIRLPPPCNLVPDPLFDGAPAPFHVCSAIRNDFLSYLFSVHRLNIRDRDIDTALKYLIRMPRTVLTDIQDLHIDLLGYGNFGPRPCWETIHIWQITAEKSMLHTTPGRLTLRICCKMALASGEEPIPMDQITAILNPLHGFPGHLRALELRFESIEWQVKVPPRLTKLIRDAGCRIMIAHDDPKKPFDFMKLPPEIRNHVYSFTNLVAPYRQVQWTRNLGFETMVPACHWNFYGHIAISRYCTSSFHYDDHFGTCGSDSAERTDPLGGDVTKEFFDIIGDYALGALRRVDIVFPTISATFNVTNSIAHQEWCSAIKHLATHGNSSSLMLALNFDAAKGLHKDGMKLGKPGHHLKSIYESFVNPLAELKQLRHLFVRLQCKTQWSSPSPRLFKDVDMSRKRGIYIRLSDDHSVASPNTSIAEEELRLETIVLGTQTAKNTHKKNSQIPSVWWHSVWDHAIDPWDEDG

SEQ ID NO: 39336 - DNA, 1383 bp, Muscodor strobelii
  misc_feature: SGI cDNA ID NO. 573684
  misc_feature: Reduced expression when VOC is produced
  misc_feature: Encodes the peptide sequence at SEQ ID NO 39337
atgggagccgaagataacgagtataccctcaagcaggttgctactcacgacaccactacagatgcgtggatgatcatccatggagaagtatatgatgttacaaaatatctggaaaaccaccctggtggtgctgaagtactgattgaggccgctggcaaagatgcgtccgaagacttcgacaacgcaggtcattcagaagatgccgccgagatcatggcggagtaccacataggcaagctccagggcgcaagaaagaaggcgacatccgcgctacggatgtctgtcgatgttcctgtaccgtcgatccggccttcccatagcctactgaaaacaatggccaggttgagcgcaacagcaatcgtagctatcggatttgctggactctaccgtgctgccgaccagcgtggcctcttaaatgctcttcccaagagcccgttttcgaagacgagaaacggtctgggtttcatggaaggcatactactgacatccaccattttcgggatcgcgggaactgttatctcaagaaaaatgctgaagctcctccactcctacccaagtttcgtgaattacccttcacggatcaaaatgccccggcgtgcaaagcccgaccttcttggtcgtgccgatgggtggctccaccctacaacattccaggacttgccgctcgtgaagaaagacttgattgcgccaaacgtttaccgccttaccttcaccctccctagctctcaagcaatcttaggcttaccaacaggtcagcacgtcgccattacggctgaggtcaacggtgagagcgttacacgctcatatactcctgtatcaaacaactccgacaacggtgtcctggaacttgtcattaagtcctatccagatgggaagctaactggtggctacctgtctcaactcgaagtcggcgacgacgtgcgcttacgtggtcctaagggcgccatgcgataccgaagggggttatgtgagcgcattggcatgctagctggcggatccggcattacgccgatgtaccaggtcattcgtgccatctgtgaggacgagcgtgacttgaccgaagttgacctgatctatgccaaccggtctgaggcagatatactattgcgcgacgagcttgaaagtcttgcacgacggtatcccaagaacctcacaatacactacatgcttgacacaccgcccgctgaggattggacaggtggtgtcggttatgttaccaaagaggttctgggccagcatttcccgtcaccggcaacagactcaaaagtcatgttgtgcggtcctccaggcatggtaaatgcagcgaagaaagcgcttgtgcaacttgggttcgagcagccaggcgctatgtcaaaaatgagcgaccaaatattttgcttctaa

SEQ ID NO: 39337 - protein, 460 aa, Muscodor strobelii
  misc_feature: SGI Peptide ID NO. 573684
  misc_feature (7)..(81): Pfam Id: PF00173 Pfam Desc: Cytochrome b5-like Heme/Steroid binding domain
  misc_feature (219)..(318): Pfam Id: PF00970 Pfam Desc: Oxidoreductase FAD-binding domain
  misc_feature (327)..(437): Pfam Id: PF00175 Pfam Desc: Oxidoreductase NAD-binding domain
  misc_feature (3)..(460): NCBI GI: 256728637 Blast Desc: NECHADRAFT_50873 [Nectria haematococca mpVI 77-13-4]
  misc_feature (3)..(460): NCBI GI: 261355026 Blast Desc: nitrate reductase [Verticillium albo-atrum VaMs.102]
  misc_feature (7)..(460): NCBI GI: 39960713 Blast Desc: MGG_09315 [Magnaporthe grisea 70-15] gi|145009425|gb|EDJ94117.1| MGG_09315 [Magnaporthe grisea 70-15]
  misc_feature (8)..(460): NCBI GI: 46110511 Blast Desc: FG02137.1 [Gibberella zeae PH-1]
  misc_feature (7)..(460): NCBI GI: 46115410 Blast Desc: FG03547.1 [Gibberella zeae PH-1] gi|28202143|gb|AAO34680.1| reductase [Gibberella zeae]
  misc_feature (7)..(460): NCBI GI: 70986446 Blast Desc: cytochrome b5 reductase [Aspergillus fumigatus Af293] gi|66846346|gb|EAL86679.1| cytochrome b5 reductase, [Aspergillus fumigatus Af293]
  misc_feature (7)..(460): NCBI GI: 238499071 Blast Desc: cytochrome b5 reductase, [Aspergillus flavus NRRL3357] gi|220692523|gb|EED48869.1| cytochrome b5 reductase, [Aspergillus flavus NRRL3357]
  misc_feature (7)..(460): NCBI GI: 27924030 Blast Desc: reductase [Fusarium sporotrichioides]
  misc_feature (7)..(460): NCBI GI: 159128112 Blast Desc: cytochrome b5 reductase, [Aspergillus fumigatus A1163]
  misc_feature (7)..(460): NCBI GI: 119474567 Blast Desc: NADH-cytochrome B5 reductase [Neosartorya fischeri NRRL 181] gi|119407312|gb|EAW17262.1| NADH-cytochrome B5 reductase [Neosartorya fischeri NRRL 181]
  misc_feature (156)..(460): SWISSPROT Homolog: EC 1.6.2.2 Cytochrome-b5 reductase
  misc_feature: Useful for introducing or modulating the production of volatile compounds
MGAEDNEYTLKQVATHDTTTDAWMIIHGEVYDVTKYLENHPGGAEVLIEAAGKDASEDFDNAGHSEDAAEIMAEYHIGKLQGARKKATSALRMSVDVPVPSIRPSHSLLKTMARLSATAIVAIGFAGLYRAADQRGLLNALPKSPFSKTRNGLGFMEGILLTSTIFGIAGTVISRKMLKLLHSYPSFVNYPSRIKMPRRAKPDLLGRADGWLHPTTFQDLPLVKKDLIAPNVYRLTFTLPSSQAILGLPTGQHVAITAEVNGESVTRSYTPVSNNSDNGVLELVIKSYPDGKLTGGYLSQLEVGDDVRLRGPKGAMRYRRGLCERIGMLAGGSGITPMYQVIRAICEDERDLTEVDLIYANRSEADILLRDELESLARRYPKNLTIHYMLDTPPAEDWTGGVGYVTKEVLGQHFPSPATDSKVMLCGPPGMVNAAKKALVQLGFEQPGAMSKMSDQIFCF

SEQ ID NO: 39338 - DNA, 1906 bp, Muscodor strobelii
  misc_feature: SGI EST ID NO. CUFF.94727.0
  misc_feature: Variant of the nucleotide sequence at SEQ ID NO 39336
gttgcgtcaactacctaggtcttcagacccgctaatcttttgcgcacctcggcatgaacgagacgggctcgacggggtttatctgaaattctcaaccatcaagccggagacaattttaactaacgccatgacataggtaccaccggcggacgcctgtcgctgtctgcgttagtcgcgatggggaccgatatcatcattactgtgttgtttaataaggggcgaggcaacccccctcgaaacccgtgaatgagcatcccataactcttcaagcaacgtcccagcttccatatcagtgtatctatcataatgggagccgaagataacgagtataccctcaagcaggttgctactcacgacaccactacagatgcgtggatgatcatccatggagaagtatatgatgttacaaaatatctggaaaaccaccctggtggtgctgaagtactgattgaggccgctggcaaagatgcgtccgaagacttcgacaacgcaggtcattcagaagatgccgccgagatcatggcggagtaccacataggcaagctccagggcgcaagaaagaaggcgacatccgcgctacggatgtctgtcgatgttcctgtaccgtcgatccggccttcccatagcctactgaaaacaatggccaggttgagcgcaacagcaatcgtagctatcggatttgctggactctaccgtgctgccgaccagcgtggcctcttaaatgctcttcccaagagcccgttttcgaagacgagaaacggtctgggtttcatggaaggcatactactgacatccaccattttcgggatcgcgggaactgttatctcaagaaaaatgctgaagctcctccactcctacccaagtttcgtgaattacccttcacggatcaaaatgccccggcgtgcaaagcccgaccttcttggtcgtgccgatgggtggctccaccctacaacattccaggacttgccgctcgtgaagaaagacttgattgcgccaaacgtttaccgccttaccttcaccctccctagctctcaagcaatcttaggcttaccaacaggtcagcacgtcgccattacggctgaggtcaacggtgagagcgttacacgctcatatactcctgtatcaaacaactccgacaacggtgtcctggaacttgtcattaagtcctatccagatgggaagctaactggtggctacctgtctcaactcgaagtcggcgacgacgtgcgcttacgtggtcctaagggcgccatgcgataccgaagggggttatgtgagcgcattggcatgctagctggcggatccggcattacgccgatgtaccaggtcattcgtgccatctgtgaggacgagcgtgacttgaccgaagttgacctgatctatgccaaccggtctgaggcagatatactattgcgcgacgagcttgaaagtcttgcacgacggtatcccaagaacctcacaatacactacatgcttgacacaccgcccgctgaggattggacaggtggtgtcggttatgttaccaaagaggttctgggccagcatttcccgtcaccggcaacagactcaaaagtcatgttgtgcggtcctccaggcatggtaaatgcagcgaagaaagcgcttgtgcaacttgggttcgagcagccaggcgctatgtcaaaaatgagcgaccaaatattttgcttctaatgttcctttgttttcacttgcttttgtatactatatcattttgttacggtgcgagtcggggaaatgcatggtaacggtgtttagaggctggacttcgttcaaaaaatcggcatagagtcaggacatgtgtgctgtagagcaaacttgcatgaagcaacttagaacaggaactagaactagacattaatttgataccacgactgcttcagcaaaatcg

SEQ ID NO: 39339 - DNA, 7887 bp, Muscodor strobelii
  misc_feature: SGI cDNA ID NO. 573685
  misc_feature: Elevated expression when VOC is produced
  misc_feature: Encodes the peptide sequence at SEQ ID NO 39340
atgccaccatctcgtttcactgcgccagagcctcccctctctcaatgccccgaacccattgctattgtgggtatgggatgtcggtggccgggtggtgtacggaatcccgcacagttgtggcatttactcaaggaggaaagagacggatggggagagtttccttctcaacgcatcaacttgaacggcttttatcatgaaaatggccaacgacctggaagcatgtacacccggggcggtaacctcctacaagaagacccgagagacttcgatcatgctttcttcggaatctcggccaaagaggtcatctcgttggacccaagccagcgaaagctactggaagttacgtacgaggccgtagaagccgccggagagcctcttgataagtttctcggttcgagaacaggcgtatttgtaggcaacttcaacaatgaacaccagattatgcagtaccgcgatcctgattatacgttgccttacgtggtaacgggaggtgacccgactcttctgagcaatcgcatcaattatgttttcgaccttacggggccaagtttgatggtcgacacagcttgctcggcgtccatgtacgctttacatctagccgtcacatccattcgcaacgatgattgcgacgctgcgattgtggccggggccaatcttattctaggcccagacaaccaactcttcacaaccaagcttggtgctgtatcaccgacctcccgctgtcacagctttgatgctagagcagatggctactctcgggccgaaggattcggggctatatatctgaaaagactatctgacgctataacgcagggcaaccccatccgcgccgtcgtacgcggcactgcgttcaacgccaatgggaaaacgggtggcatctctcatcccagcgccgatggccaggaatccgttattcgacatgcttacaaggctgccggtggcttggaccccgatcttacaggatatgtcgaggctcatggcacgggcacaccagtaggagatccgatcgaagtctcggccatcgggcgagtgtttgcgccggggcgcgaagatgattatcttctaatcggttcgattaagccaaatctgggtcacagcgaagccgccagtgccatgtcccaaattatgaaagctgttttggcgatggagcacgggcagatcccggcaacgattgggatcgaacgattgaacccggctattaatttcgctgtggcaaggtgtaaggtggtcaccgagatgacgccatggcccaagaatcgtctgcgacgtgttagcatcaatagtttcgggtacggaggtgccaatgcacatgtcattatcgatcacccaagcgttttgattcccgcataccacccccgtggtctccccctgtctgactattctggtatcacaggactgaacggcaaggggaaccatcaggctcgggataccgagcacaaaaacgacatcactctcgggccaggattaaccaacggcgaggttggtgctagtggcaatggtgacatgaatatttgcgaccacagttgcccttaccccttgtattcggggtccttgccaattaagtcggcccaagtcgaagacaaaggtgtgcgcaggcagatcctgctaccggtctcggcgcatgatcagcgtgccttgaaagcgaacatggcggccagtcttaagtctcttcgcgactataatacggcggatctactttacacgctcggctgtcgaaggtccatatttgctcaccgcgcgtttgtggttgcagactctacgtctccgactatcaatgagctggaacctaacacatttatgacaggaaaggcgccaagcactccagcaaaaagaattggattcgtcttcactgggcagggcgctcagtggccgcagatgggcgcccagcttcttcatgagtacgccgtctttaagcataccataaggtatctagacatagtgctcagcaggcttcgcagacgaccaagttggtcgattgaggaagcaattctagagcatacggagagcagccagattcaagacccagccttctcgcagactatttgtacagctctacaaattggtcttgtatctctgctaaggcagtggggaatcgaacctgtagccgtagccggacattcttcaggcgagatcgcagctgcatatgcggccgggcacctgaagcagagcgaggccattgtgctagcctacttccgtggccaggcggttaagaacaataagcgtccagggctcatgatggctgtcagcattggagaatcacaaactaagacttatctcgaagggctagagagtcacgtcaagatcgctgcggtgaactcttctaaaagtgtcacattatccggtgagccggaaactatcgccaagttaagccagaccctgcaagcagaagcaatcttgactcaaattctgaagaccggtggcaatgcttaccattgccatcacatggcagctattggtgagacgtacgaaaacctagcaacagaagggttaaaagatatcgagcccttaagcgccgaggagtgttcacataccacagcaaggtggttttcctcagtgaccctaaaagaagagttcgcagcaccccctgcgtattggagacgcaacctcgaatcgcgagtcttattctcctcggcaatggagaggctcgtcgcgaatgtacctgttgatcttttgatcgagatcgggccccatccagcactcagtggcccaatcaagcaaataagatccgacgctgaaacagagagcggcagagcgaaagtgccaccttgtatcgcttcgcttcgccgtggcgagcacgacgtgattagcatgctgacttgcgccgggaatttattcatcagtgatgcgccgattgatctagtggcggtaaatgcgtctgagacgttggtagatggccaggtggcttttcatcatggattcccctgcattgatttgccgcagtataactacacatatccagaccagccaatctactacgaaaacagattgaacagggagtatcgtctgagaaagcatctgccacatgatcttctgggcgctcgggtgccaggaggttcgagaagtcacgcgcaatggaggaatcttattcgtctgagggacgtgccttggctcgaagatcataaggtccttccacatgtagtgctaccaggcgcagcctacatcaccatggcgattgaggcctgcagtcagttgcatgccgaagccgatgaggctgacccgattaagttgttcaagcttcgccaggtggctatcaattcggctctccgcatagaagatgacgaaatcggtaccgagatggtgctggatatggagaaggtgcccttgacgaactcgggatccatgtcgcaatggtatagattcagtatcggctcgatattcccaaattctgacacctggaccctccattgcactggcactatctccgtgactaccaaggaagtcgattttgacggaactcgtcgtctgggaaccgatgtctgtgttaaatccctagacatgtcgctgtggtataggagattccgggaggttgggctagattatggtccagcattccaaggattgtcggacctcaaggcttatcgcacaatcaacactgccagcgccagggtcaccctaaagcccacgactggtatcagaaacgagtcaagttacaccatccacccgagcactctggatactctgtttcagctggccctactatcctgttacgcaggccaggttgagaattttgacaaggcatttgtgcccatctttgccgatgacattaccatctgggtgccacaatcagaccagcaagaccaggggttaggcatggcgagcgggcgacttgtcggtcttcgaagcttgtacgccggagtctggcttcacgacatgacgggatcaccgttggtagacatcggagagctgaaatgcgtcacttatgaagggatcgtagatgctagtgccgtaaatccatccaacgatgaccgagagccgtactggcgccccgtctctagacccgatattgacactctgactccagccattgctaaggctatgtttcctcccaaacaagttgatacagcggccatgtccgtgctagaatccatatcaatgcatgttcttgtcaagataggggaaacgctccagggcgaaggcattgaagacgaacctgctgtgtgcatgatgccgaggaatgcctcgcctgatgttgacctcggctttctcctggacccaaaactgagcgaggcagagagatatgctgcaattcaacgattaccaaccactattacgaagatccccgaactgagatgtctcgtgacattgcatgacaatttggacatggtcttgagaggggcaatcaacggcacccaagttcttgtggatgataacctgatggtagagttgttctcgtcaggtatttctctacagggtggctactctcatcttcagcggatcgtagatcttttaggccataagaatcctcaaatgcgggtattagaagtcggcgctggtactggaggagcgacctcggctgtcctatctatgttacttctaccaaccggagtaaagagactccaggactacacgttcagtgactcggcagattgggcaatattggaagcgcagtcacggtttgctaattggaatgattcgatgacattccagacactgaatatactccaggatcctatctcccaaggtttcgaggagcaatcttttgaccttgtcattgcttctggtttatgcgagattggagatccggcgatagcgctgagacatatacgatccctactcaagccactgggatcattcgtgttgctggaaacgacgcgtccgacaatgacaaccgaagtgctctcgcgcgccttgaccgggcgatggcatcaacacgggtctctaagcctatcagaggctgagtgggagacagctctagaagccagtgggttctcaggtatacaattatccctccaagattacgccgacgataagcacataacgacaatgatgctgtcgagagcgattgcccctagcgtcgagtcttcctgccgcctcgcgtttgatgtcacggttctctacagcgattcattgcccctcctagctgaagcggttggcgagatgctcacaaaggcaggattcaacgtgaacaaggtcgagttggtcgagttgattgaaagcaggaatataatacccaaaaactcttccgtgatcagtttcatcgatgtagacggctctcttttcacgtgccgtgacgaggcatatttcaaagccgtgcaggaaatagtcctgaacgtttcggagatggtttgggtggccgccgatctgatgtaccccggcgaatcgtctattatgaagggcctgctgcgatctatcgggaccgagaatatcttgtctaagtatgcgatcatcgagttggattatagtgactacaccccagtttcgagggccgctgaattgatcatcgtcaagctgaacgagttgcgagcatcacggacactagaaaatgtggatctcgaatgcgttcttcgaggcgggatgttctatatcgaacgtcttctacctgaagtcgcgctcaatgacgacttcagcttgcgcaatgggctaaagacggacatttcggagctgcgcgttggtgatcaaggcccactgatggcacggtatagacagcctggattactatcgtcactgtacttcgcccccgatccaagcttcgacaagcccctggcaagtgattgggttgagatcaagactatcgccatcggactcaacaggaaagaccttgcagttgctacggcgaaattcgatctgaacaacacgagtgcggaaggctccggccttatcacacaagtcggccgggacgcccaatcccttcacaaggtaggcgatcgagtcttcggtgtgatacctggaaatatgggcaactatctacggtctcctgcatctctagttgcgccaattccagatagtatgtctttcgaagacgcggcctcaatgccagtcgtgtacatgacagcgatctacgcattccagcatttagctcacttgagcgcaggcgagttagtcctcatccaatcggcagcgggtggtctcggaatggcggccatatgcatagcccgaacgctgggtgccgtgatttacgcgacagttggcactaccgagaaacggaaagttcttgtcgaagagttcgggatcccgcacgaccgcatcttcgactcccggcaagcgagcgccgtggatcaaattatgcgggcgactaaacacaacaatggtctcgatgtgattcttagcagcgcgggaggcgactccatgcatgagatgtggcgctgtatcgcgcctctggggcggttcatcgacgtcggtcgcactgatgttcttggtggaggcagactggggctcgaggtgttcaagagaaatgccacattttcttcgttcgatctgggtctcatatatcatcaaaagcctgggctcatctttcgattgatgagggaaatgacacaactactagcaaaaggcgacatcggcgccatcagccatttgaccaagtatgatatctcgagacttgggccagctctagccacattttcaaagggcacccatataggaaaattcatcatcaccttccacgaccgggggagctccctaatgacctcacgaccagtgccccgaactacgttcgactcggatgccgcctatcttttagtaggtgcgctgggcggcctcgggagaagcttggctacttggatggctgagcgaggggcgcgatatcttgtttttctctcgcgatctggctctaccaagccggaagccgcggccgccgtcaaggagctcattgaagcgggcgcacaccctacggtagtaagatgtgacgttacaaatgagaaaaacttactcctagctgttactgagatctccaagaagcgacagatcaagggcgtgatccacgccgccatggtcgaaggcgacgcgcttttcagcaacgtcacttgggaccaggtacagcgagtgctcgtacctaaagtcacgggcaccatcaatctccaccacgccacggcacagatgcccctggacttcttcgtcatgatgtcgtccgtctcgggcatcattggcacgcctggtcaaggcgcctacgcggcggccaacgctttccaagacgccttcgccagattccgccactcgcaattcctgcctgctacgtctctcgctctgggcctgatcgccgaagttgggtcgctcagcaccgcaaatggattcaagcagatgcttcagcgcaatgctacatacggcatgaccgaggctgagttcctccagatcttcgagggtgcgctgtgtgactcgcagtcctcggttccctggacaaagaggagacaaacaccatcatcatcactttctgctcttgaccctgaaagtaaggcgcagatagtgacagggcttgagcccgcgaggttcctttcgtacctagataacaatcgcgtcaaggatttagcgtggtataatcgtacacgcttcctggcagtcaggcagagcattgtggatcatgcgcgggctcgcgcgtcatcgggcgcggttgacggcggtggtctatctgttaatacaagcggtcattcgtctacgtctttgcagcaacttctgaaggcatcctcggataccgagaagctagatatcgcgcgtaaatctgtagtcgcgcacatcgctgagcttctgggtatcgaggaagataccataaaccccgaaaaccccgtgtctcactatggcgtcgatagtctcgtggctggcgagctgaggaattggttgatcaaaacgttcggtctggagttaacgatgctccagttgcttagcaagcaaaccaagatccaggacctggcgaaagggatcgcgcgaaagtcagaatctgcccagagcgataattaa

SEQ ID NO: 39340 - protein, 2628 aa, Muscodor strobelii
  misc_feature: SGI Peptide ID NO. 573685
  misc_feature (613)..(951): Pfam Id: PF00698 Pfam Desc: Acyl transferase domain
  misc_feature (1903)..(1979): Pfam Id: PF08240 Pfam Desc: Alcohol dehydrogenase GroES-like domain
  misc_feature (2222)..(2388): Pfam Id: PF00106 Pfam Desc: short chain dehydrogenase
  misc_feature (2010)..(2156): Pfam Id: PF00107 Pfam Desc: Zinc-binding dehydrogenase
  misc_feature (18)..(268): Pfam Id: PF00109 Pfam Desc: Beta-ketoacyl synthase, N-terminal domain
  misc_feature (276)..(394): Pfam Id: PF02801 Pfam Desc: Beta-ketoacyl synthase, C-terminal domain
  misc_feature (2222)..(2401): Pfam Id: PF08659 Pfam Desc: KR domain
  misc_feature (1493)..(1598): Pfam Id: PF08242 Pfam Desc: Methyltransferase domain
  misc_feature (614)..(951): Pfam Id: PF00698 Pfam Desc: Acyl transferase domain
  misc_feature (5)..(2628): NCBI GI: 189195356 Blast Desc: phenolpthiocerol synthesis polyketide synthase ppsA [Pyrenophora tritici-repentis Pt-1C-BFP] gi|187979895|gb|EDU46521.1| phenolpthiocerol synthesis polyketide
  misc_feature (11)..(2622): NCBI GI: 169769096 Blast Desc: [Aspergillus oryzae RIB40] gi|83766876|dbj|BAE57016.1| protein product [Aspergillus oryzae]
  misc_feature (20)..(2604): NCBI GI: 256727768 Blast Desc: NECHADRAFT_46230 [Nectria haematococca mpVI 77-13-4]
  misc_feature (18)..(2615): NCBI GI: 242811727 Blast Desc: polyketide synthase, [Talaromyces stipitatus ATCC 10500] gi|218714148|gb|EED13571.1| polyketide synthase, [Talaromyces stipitatus ATCC 10500]
  misc_feature (19)..(2625): NCBI GI: 282160401 Blast Desc: polyketide synthase [Delitschia winteri]
  misc_feature (18)..(2626): NCBI GI: 67523157 Blast Desc: AN2035.2 [Aspergillus nidulans FGSC A4] gi|40745711|gb|EAA64867.1| AN2035.2 [Aspergillus nidulans FGSC A4] gi|259487402|tpe|CBF86052.1| TPA: polyketide synthase, (JCVI)
  misc_feature (18)..(2604): NCBI GI: 156063352 Blast Desc: SS1G_01792 [Sclerotinia sclerotiorum 1980] gi|154697128|gb|EDN96866.1| SS1G_01792 [Sclerotinia sclerotiorum 1980]
  misc_feature (18)..(2619): NCBI GI: 46114996 Blast Desc: FG03340.1 [Gibberella zeae PH-1]
  misc_feature (21)..(2621): NCBI GI: 145610917 Blast Desc: MGG_00806 [Magnaporthe grisea 70-15] gi|145018256|gb|EDK02535.1| MGG_00806 [Magnaporthe grisea 70-15]
  misc_feature (18)..(2621): NCBI GI: 189206211 Blast Desc: lovastatin nonaketide synthase [Pyrenophora tritici-repentis Pt-1C-BFP] gi|187975533|gb|EDU42159.1| lovastatin nonaketide synthase [Pyrenophora tritici-repentis
  misc_feature (18)..(1913): SWISSPROT Homolog: EC 2.3.1.161 Lovastatin nonaketide synthase
  misc_feature: Useful for fungicidal and/or biocontrol applications
  misc_feature: Useful for introducing or modulating the production of volatile compounds
MPPSRFTAPEPPLSQCPEPIAIVGMGCRWPGGVRNPAQLWHLLKEERDGWGEFPSQRINLNGFYHENGQRPGSMYTRGGNLLQEDPRDFDHAFFGISAKEVISLDPSQRKLLEVTYEAVEAAGEPLDKFLGSRTGVFVGNFNNEHQIMQYRDPDYTLPYVVTGGDPTLLSNRINYVFDLTGPSLMVDTACSASMYALHLAVTSIRNDDCDAAIVAGANLILGPDNQLFTTKLGAVSPTSRCHSFDARADGYSRAEGFGAIYLKRLSDAITQGNPIRAVVRGTAFNANGKTGGISHPSADGQESVIRHAYKAAGGLDPDLTGYVEAHGTGTPVGDPIEVSAIGRVFAPGREDDYLLIGSIKPNLGHSEAASAMSQIMKAVLAMEHGQIPATIGIERLNPAINFAVARCKVVTEMTPWPKNRLRRVSINSFGYGGANAHVIIDHPSVLIPAYHPRGLPLSDYSGITGLNGKGNHQARDTEHKNDITLGPGLTNGEVGASGNGDMNICDHSCPYPLYSGSLPIKSAQVEDKGVRRQILLPVSAHDQRALKANMAASLKSLRDYNTADLLYTLGCRRSIFAHRAFVVADSTSPTINELEPNTFMTGKAPSTPAKRIGFVFTGQGAQWPQMGAQLLHEYAVFKHTIRYLDIVLSRLRRRPSWSIEEAILEHTESSQIQDPAFSQTICTALQIGLVSLLRQWGIEPVAVAGHSSGEIAAAYAAGHLKQSEAIVLAYFRGQAVKNNKRPGLMMAVSIGESQTKTYLEGLESHVKIAAVNSSKSVTLSGEPETIAKLSQTLQAEAILTQILKTGGNAYHCHHMAAIGETYENLATEGLKDIEPLSAEECSHTTARWFSSVTLKEEFAAPPAYWRRNLESRVLFSSAMERLVANVPVDLLIEIGPHPALSGPIKQIRSDAETESGRAKVPPCIASLRRGEHDVISMLTCAGNLFISDAPIDLVAVNASETLVDGQVAFHHGFPCIDLPQYNYTYPDQPIYYENRLNREYRLRKHLPHDLLGARVPGGSRSHAQWRNLIRLRDVPWLEDHKVLPHVVLPGAAYITMAIEACSQLHAEADEADPIKLFKLRQVAINSALRIEDDEIGTEMVLDMEKVPLTNSGSMSQWYRFSIGSIFPNSDTWTLHCTGTISVTTKEVDFDGTRRLGTDVCVKSLDMSLWYRRFREVGLDYGPAFQGLSDLKAYRTINTASARVTLKPTTGIRNESSYTIHPSTLDTLFQLALLSCYAGQVENFDKAFVPIFADDITIWVPQSDQQDQGLGMASGRLVGLRSLYAGVWLHDMTGSPLVDIGELKCVTYEGIVDASAVNPSNDDREPYWRPVSRPDIDTLTPAIAKAMFPPKQVDTAAMSVLESISMHVLVKIGETLQGEGIEDEPAVCMMPRNASPDVDLGFLLDPKLSEAERYAAIQRLPTTITKIPELRCLVTLHDNLDMVLRGAINGTQVLVDDNLMVELFSSGISLQGGYSHLQRIVDLLGHKNPQMRVLEVGAGTGGATSAVLSMLLLPTGVKRLQDYTFSDSADWAILEAQSRFANWNDSMTFQTLNILQDPISQGFEEQSFDLVIASGLCEIGDPAIALRHIRSLLKPLGSFVLLETTRPTMTTEVLSRALTGRWHQHGSLSLSEAEWETALEASGFSGIQLSLQDYADDKHITTMMLSRAIAPSVESSCRLAFDVTVLYSDSLPLLAEAVGEMLTKAGFNVNKVELVELIESRNIIPKNSSVISFIDVDGSLFTCRDEAYFKAVQEIVLNVSEMVWVAADLMYPGESSIMKGLLRSIGTENILSKYAIIELDYSDYTPVSRAAELIIVKLNELRASRTLENVDLECVLRGGMFYIERLLPEVALNDDFSLRNGLKTDISELRVGDQGPLMARYRQPGLLSSLYFAPDPSFDKPLASDWVEIKTIAIGLNRKDLAVATAKFDLNNTSAEGSGLITQVGRDAQSLHKVGDRVFGVIPGNMGNYLRSPASLVAPIPDSMSFEDAASMPVVYMTAIYAFQHLAHLSAGELVLIQSAAGGLGMAAICIARTLGAVIYATVGTTEKRKVLVEEFGIPHDRIFDSRQASAVDQIMRATKHNNGLDVILSSAGGDSMHEMWRCIAPLGRFIDVGRTDVLGGGRLGLEVFKRNATFSSFDLGLIYHQKPGLIFRLMREMTQLLAKGDIGAISHLTKYDISRLGPALATFSKGTHIGKFIITFHDRGSSLMTSRPVPRTTFDSDAAYLLVGALGGLGRSLATWMAERGARYLVFLSRSGSTKPEAAAAVKELIEAGAHPTVVRCDVTNEKNLLLAVTEISKKRQIKGVIHAAMVEGDALFSNVTWDQVQRVLVPKVTGTINLHHATAQMPLDFFVMMSSVSGIIGTPGQGAYAAANAFQDAFARFRHSQFLPATSLALGLIAEVGSLSTANGFKQMLQRNATYGMTEAEFLQIFEGALCDSQSSVPWTKRRQTPSSSLSALDPESKAQIVTGLEPARFLSYLDNNRVKDLAWYNRTRFLAVRQSIVDHARARASSGAVDGGGLSVNTSGHSSTSLQQLLKASSDTEKLDIARKSVVAHIAELLGIEEDTINPENPVSHYGVDSLVAGELRNWLIKTFGLELTMLQLLSKQTKIQDLAKGIARKSESAQSDN

SEQ ID NO: 39341 - DNA, 10845 bp, Muscodor strobelii
  misc_feature: SGI EST ID NO. CUFF.94898.2
  misc_feature: Variant of the nucleotide sequence at SEQ ID NO 39339
cgcaaacattgaaacgaactcgaaacttgaacacaccacactaaataatacaactctcctggatattcttgttctaacggaaggagaaatctacctatgcgaatagtcttgcacctgattcaatggccattaaaaaacattcatccttgattcttcagtcggcgcgcgagaccctgaggcaagctgagagactcgtcaacttactcgagtcaaacaacctggaggagcctgactttaccgtatcctcaccagctcgtcccgagaatagcgactacgacgcgatctgcactgatctggttcaggcaactcaggacctgacgcttcttgccaaaggccctctggcgtgggtgcgcacgtttttctgctgtcaccatgacctggctgcatggcaagtcgcgctacggttcgggtacttcgctatcgtgccccttgatgggtgcatatctgcggcggaaatggcgaagcgagccgggatggacgaagaccgcttgcggcgggtcatgaagttcttgacaacgcagcgatgcttccaagaggtcgaggatgacaagtttgagcacactgccctatcggggtatattgccaagaacaaagacattgagcagtgcctcgcctttgaggctgatgagatgtttgaggctgcttcactcactgccagttccatccaaaaagcaccccttacttccgaggctaggaacagcgcttttaatatgaggttcggtacttcgccgtacacctggtacacccaaaatccagaacgcggtgcacgttttgcgtccgcaatggcaggatatgcccggatgaatagagacaccaccgaactcatgtctcgatttccatgggatcaatttgggaagacgaaagtcgtggacgtgggcggtgggagcgggcacgtctccatatacctggcttcgcaatttcccaaattgagcttcatcgtccaagacatcaatacggtcatgcttgagcaaggtccaaagagagcagactatcttcaggttcgagacagagtgtctttcatgcagtatgacttcttcgaaccgcaacttgtaacagacgccggcttattcctcctacgccaagtcatccacaactaccccgacgacgtgtgcgtcaagattttcaagtcgtttgttcctgccatgctgggagatgggactctaacgcccagcctgcttatcaatgacatgcttctccctcctcccaatgtcgaacccaaagttgaggagtatcatctgcggcagattgacatccacatgcttgttggatatgccgccaaacaacggaccctcgctgagttcaaagcacttttatcggaagcggacccggggtttgaggtcgtcagagtgcacggaaaggggatcatgggattgttagaagttcagctcaagggcaaacaaggacacacatcatcacagagtgaccctcaaaccatacaataactcttgtctaaccaaacccaacctgaacagatctccgacgccgaaagcgtcgatggttgttcaggtcagtcagcactaagtactacacatacaaaatttgcacttatagcaaagcgatgcccctgacttctactggttgtcttgttagatgtggtgttaagagttttgctcaacctcggccgtggtgaagacgtttgctgatctgcaattggagtgcctagtgacgtcatcttgtatatgttactcctttacgggctgtttgtacttgccgagtaataacgctaaggaacttgtttcacgtccccaagcatccacggtacggctttatcttcaaaccgctagggaatattccagggcaatcgcatagctacctaaccatggttgcgagctcattttttgaagaaatttgacggtcaacgatggggtaacttcgtaagttgtcaaaggactggccgctcggagggattggaatattgcgaagtacagcgagcgcagcggctacgttatcaagactatttgctgtcacgactgcagagggcagaacgcgcaaagatcgtgagatggcactacacctagattggctagtgggctccaggatcgggttagtctgtacttaagtacgggatcggtccttcccgtatcgtactgtgctagggatcggtgatttaaactagagctgtcccatgtcgtgcctagaatacatccgataggttgttgcgccgtcaggcccttgccgtagagaaataaagcgcacattccgttgtctatatgattttgtcacctttcaactggacattgatggagtaaagacccggaataacatgtatcatctcttgttggtacgccgaccgcactagctctgacaattaccatcctgtaggactgtaggcccagattgtaacacaccaactcttatcccgacatcagtaatatacatccgagctagatacatgtatattatgtggtagtcttataagtacacacacacagagactcacaatgtctttggctctcaccttcgatgctgacgagctttgggcggttggaacggcttattaccgacgacaaggtatcatctcagctccaagttgttctcgccctcttaacacgcgaaggtgcttctctatgagtcgtgtgtcgcaagtggatccattaattgccaacacgggccctgtaccttagccttcactaacatgccaccatctcgtttcactgcgccagagcctcccctctctcaatgccccgaacccattgctattgtgggtatgggatgtcggtggccgggtggtgtacggaatcccgcacagttgtggcatttactcaaggaggaaagagacggatggggagagtttccttctcaacgcatcaacttgaacggcttttatcatgaaaatggccaacgacctggaagcatgtacacccggggcggtaacctcctacaagaagacccgagagacttcgatcatgctttcttcggaatctcggccaaagaggtcatctcgttggacccaagccagcgaaagctactggaagttacgtacgaggccgtagaagccgccggagagcctcttgataagtttctcggttcgagaacaggcgtatttgtaggcaacttcaacaatgaacaccagattatgcagtaccgcgatcctgattatacgttgccttacgtggtaacgggaggtgacccgactcttctgagcaatcgcatcaattatgttttcgaccttacggggccaagtttgatggtcgacacagcttgctcggcgtccatgtacgctttacatctagccgtcacatccattcgcaacgatgattgcgacgctgcgattgtggccggggccaatcttattctaggcccagacaaccaactcttcacaaccaagcttggtgctgtatcaccgacctcccgctgtcacagctttgatgctagagcagatggctactctcgggccgaaggattcggggctatatatctgaaaagactatctgacgctataacgcagggcaaccccatccgcgccgtcgtacgcggcactgcgttcaacgccaatgggaaaacgggtggcatctctcatcccagcgccgatggccaggaatccgttattcgacatgcttacaaggctgccggtggcttggaccccgatcttacaggatatgtcgaggctcatggcacgggcacaccagtaggagatccgatcgaagtctcggccatcgggcgagtgtttgcgccggggcgcgaagatgattatcttctaatcggttcgattaagccaaatctgggtcacagcgaagccgccagtgccatgtcccaaattatgaaagctgttttggcgatggagcacgggcagatcccggcaacgattgggatcgaacgattgaacccggctattaatttcgctgtggcaaggtgtaaggtggtcaccgagatgacgccatggcccaagaatcgtctgcgacgtgttagcatcaatagtttcgggtacggaggtgccaatgcacatgtcattatcgatcacccaagcgttttgattcccgcataccacccccgtggtctccccctgtctgactattctggtatcacaggactgaacggcaaggggaaccatcaggctcgggataccgagcacaaaaacgacatcactctcgggccaggattaaccaacggcgaggttggtgctagtggcaatggtgacatgaatatttgcgaccacagttgcccttaccccttgtattcggggtccttgccaattaagtcggcccaagtcgaagacaaaggtgtgcgcaggcagatcctgctaccggtctcggcgcatgatcagcgtgccttgaaagcgaacatggcggccagtcttaagtctcttcgcgactataatacggcggatctactttacacgctcggctgtcgaaggtccatatttgctcaccgcgcgtttgtggttgcagactctacgtctccgactatcaatgagctggaacctaacacatttatgacaggaaaggcgccaagcactccagcaaaaagaattggattcgtcttcactgggcagggcgctcagtggccgcagatgggcgcccagcttcttcatgagtacgccgtctttaagcataccataaggtatctagacatagtgctcagcaggcttcgcagacgaccaagttggtcgattgaggaagcaattctagagcatacggagagcagccagattcaagacccagccttctcgcagactatttgtacagctctacaaattggtcttgtatctctgctaaggcagtggggaatcgaacctgtagccgtagccggacattcttcaggcgagatcgcagctgcatatgcggccgggcacctgaagcagagcgaggccattgtgctagcctacttccgtggccaggcggttaagaacaataagcgtccagggctcatgatggctgtcagcattggagaatcacaaactaagacttatctcgaagggctagagagtcacgtcaagatcgctgcggtgaactcttctaaaagtgtcacattatccggtgagccggaaactatcgccaagttaagccagaccctgcaagcagaagcaatcttgactcaaattctgaagaccggtggcaatgcttaccattgccatcacatggcagctattggtgagacgtacgaaaacctagcaacagaagggttaaaagatatcgagcccttaagcgccgaggagtgttcacataccacagcaaggtggttttcctcagtgaccctaaaagaagagttcgcagcaccccctgcgtattggagacgcaacctcgaatcgcgagtcttattctcctcggcaatggagaggctcgtcgcgaatgtacctgttgatcttttgatcgagatcgggccccatccagcactcagtggcccaatcaagcaaataagatccgacgctgaaacagagagcggcagagcgaaagtgccaccttgtatcgcttcgcttcgccgtggcgagcacgacgtgattagcatgctgacttgcgccgggaatttattcatcagtgatgcgccgattgatctagtggcggtaaatgcgtctgagacgttggtagatggccaggtggcttttcatcatggattcccctgcattgatttgccgcagtataactacacatatccagaccagccaatctactacgaaaacagattgaacagggagtatcgtctgagaaagcatctgccacatgatcttctgggcgctcgggtgccaggaggttcgagaagtcacgcgcaatggaggaatcttattcgtctgagggacgtgccttggctcgaagatcataaggtccttccacatgtagtgctaccaggcgcagcctacatcaccatggcgattgaggcctgcagtcagttgcatgccgaagccgatgaggctgacccgattaagttgttcaagcttcgccaggtggctatcaattcggctctccgcatagaagatgacgaaatcggtaccgagatggtgctggatatggagaaggtgcccttgacgaactcgggatccatgtcgcaatggtatagattcagtatcggctcgatattcccaaattctgacacctggaccctccattgcactggcactatctccgtgactaccaaggaagtcgattttgacggaactcgtcgtctgggaaccgatgtctgtgttaaatccctagacatgtcgctgtggtataggagattccgggaggttgggctagattatggtccagcattccaaggattgtcggacctcaaggcttatcgcacaatcaacactgccagcgccagggtcaccctaaagcccacgactggtatcagaaacgagtcaagttacaccatccacccgagcactctggatactctgtttcagctggccctactatcctgttacgcaggccaggttgagaattttgacaaggcatttgtgcccatctttgccgatgacattaccatctgggtgccacaatcagaccagcaagaccaggggttaggcatggcgagcgggcgacttgtcggtcttcgaagcttgtacgccggagtctggcttcacgacatgacgggatcaccgttggtagacatcggagagctgaaatgcgtcacttatgaagggatcgtagatgctagtgccgtaaatccatccaacgatgaccgagagccgtactggcgccccgtctctagacccgatattgacactctgactccagccattgctaaggctatgtttcctcccaaacaagttgatacagcggccatgtccgtgctagaatccatatcaatgcatgttcttgtcaagataggggaaacgctccagggcgaaggcattgaagacgaacctgctgtgtgcatgatgccgaggaatgcctcgcctgatgttgacctcggctttctcctggacccaaaactgagcgaggcagagagatatgctgcaattcaacgattaccaaccactattacgaagatccccgaactgagatgtctcgtgacattgcatgacaatttggacatggtcttgagaggggcaatcaacggcacccaagttcttgtggatgataacctgatggtagagttgttctcgtcaggtatttctctacagggtggctactctcatcttcagcggatcgtagatcttttaggccataagaatcctcaaatgcgggtattagaagtcggcgctggtactggaggagcgacctcggctgtcctatctatgttacttctaccaaccggagtaaagagactccaggactacacgttcagtgactcggcagattgggcaatattggaagcgcagtcacggtttgctaattggaatgattcgatgacattccagacactgaatatactccaggatcctatctcccaaggtttcgaggagcaatcttttgaccttgtcattgcttctggtttatgcgagattggagatccggcgatagcgctgagacatatacgatccctactcaagccactgggatcattcgtgttgctggaaacgacgcgtccgacaatgacaaccgaagtgctctcgcgcgccttgaccgggcgatggcatcaacacgggtctctaagcctatcagaggctgagtgggagacagctctagaagccagtgggttctcaggtatacaattatccctccaagattacgccgacgataagcacataacgacaatgatgctgtcgagagcgattgcccctagcgtcgagtcttcctgccgcctcgcgtttgatgtcacggttctctacagcgattcattgcccctcctagctgaagcggttggcgagatgctcacaaaggcaggattcaacgtgaacaaggtcgagttggtcgagttgattgaaagcaggaatataatacccaaaaactcttccgtgatcagtttcatcgatgtagacggctctcttttcacgtgccgtgacgaggcatatttcaaagccgtgcaggaaatagtcctgaacgtttcggagatggtttgggtggccgccgatctgatgtaccccggcgaatcgtctattatgaagggcctgctgcgatctatcgggaccgagaatatcttgtctaagtatgcgatcatcgagttggattatagtgactacaccccagtttcgagggccgctgaattgatcatcgtcaagctgaacgagttgcgagcatcacggacactagaaaatgtggatctcgaatgcgttcttcgaggcgggatgttctatatcgaacgtcttctacctgaagtcgcgctcaatgacgacttcagcttgcgcaatgggctaaagacggacatttcggagctgcgcgttggtgatcaaggcccactgatggcacggtatagacagcctggattactatcgtcactgtacttcgcccccgatccaagcttcgacaagcccctggcaagtgattgggttgagatcaagactatcgccatcggactcaacaggaaagaccttgcagttgctacggcgaaattcgatctgaacaacacgagtgcggaaggctccggccttatcacacaagtcggccgggacgcccaatcccttcacaaggtaggcgatcgagtcttcggtgtgatacctggaaatatgggcaactatctacggtctcctgcatctctagttgcgccaattccagatagtatgtctttcgaagacgcggcctcaatgccagtcgtgtacatgacagcgatctacgcattccagcatttagctcacttgagcgcaggcgagttagtcctcatccaatcggcagcgggtggtctcggaatggcggccatatgcatagcccgaacgctgggtgccgtgatttacgcgacagttggcactaccgagaaacggaaagttcttgtcgaagagttcgggatcccgcacgaccgcatcttcgactcccggcaagcgagcgccgtggatcaaattatgcgggcgactaaacacaacaatggtctcgatgtgattcttagcagcgcgggaggcgactccatgcatgagatgtggcgctgtatcgcgcctctggggcggttcatcgacgtcggtcgcactgatgttcttggtggaggcagactggggctcgaggtgttcaagagaaatgccacattttcttcgttcgatctgggtctcatatatcatcaaaagcctgggctcatctttcgattgatgagggaaatgacacaactactagcaaaaggcgacatcggcgccatcagccatttgaccaagtatgatatctcgagacttgggccagctctagccacattttcaaagggcacccatataggaaaattcatcatcaccttccacgaccgggggagctccctaatgacctcacgaccagtgccccgaactacgttcgactcggatgccgcctatcttttagtaggtgcgctgggcggcctcgggagaagcttggctacttggatggctgagcgaggggcgcgatatcttgtttttctctcgcgatctggctctaccaagccggaagccgcggccgccgtcaaggagctcattgaagcgggcgcacaccctacggtagtaagatgtgacgttacaaatgagaaaaacttactcctagctgttactgagatctccaagaagcgacagatcaagggcgtgatccacgccgccatggtcgaaggcgacgcgcttttcagcaacgtcacttgggaccaggtacagcgagtgctcgtacctaaagtcacgggcaccatcaatctccaccacgccacggcacagatgcccctggacttcttcgtcatgatgtcgtccgtctcgggcatcattggcacgcctggtcaaggcgcctacgcggcggccaacgctttccaagacgccttcgccagattccgccactcgcaattcctgcctgctacgtctctcgctctgggcctgatcgccgaagttgggtcgctcagcaccgcaaatggattcaagcagatgcttcagcgcaatgctacatacggcatgaccgaggctgagttcctccagatcttcgagggtgcgctgtgtgactcgcagtcctcggttccctggacaaagaggagacaaacaccatcatcatcactttctgctcttgaccctgaaagtaaggcgcagatagtgacagggcttgagcccgcgaggttcctttcgtacctagataacaatcgcgtcaaggatttagcgtggtataatcgtacacgcttcctggcagtcaggcagagcattgtggatcatgcgcgggctcgcgcgtcatcgggcgcggttgacggcggtggtctatctgttaatacaagcggtcattcgtctacgtctttgcagcaacttctgaaggcatcctcggataccgagaagctagatatcgcgcgtaaatctgtagtcgcgcacatcgctgagcttctgggtatcgaggaagataccataaaccccgaaaaccccgtgtctcactatggcgtcgatagtctcgtggctggcgagctgaggaattggttgatcaaaacgttcggtctggagttaacgatgctccagttgcttagcaagcaaaccaagatccaggacctggcgaaagggatcgcgcgaaagtcagaatctgcccagagcgataattaacgggtgaagaggcgatgaagaggtttccactttttgttcaccccattttctcactagagcatatcccaggatccttgcctataactatgcctccttgacttaagttcaaataggtatataaaatatatgattgctatgatataagtttcaaagttggcataaaccccagtacgtgagatttgttgtgactgttgttgttcccagtcgcatagtatgtgagctgtttatctaatcacctgggggcatcatcataagattcaaactacatatcctcaactgtatctcaaccactgcttttacaggataatcacctattgtatgcg

SEQ ID NO: 39342 - DNA, 7878 bp, Muscodor strobelii
  misc_feature: SGI cDNA ID NO. 573686
  misc_feature: Encodes the peptide sequence at SEQ ID NO 39343
atgccaccatctcgtttcactgcgccagagcctcccctctctcaatgccccgaacccattgctattgtgggtatgggatgtcggtggccgggtggtgtacggaatcccgcacagttgtggcatttactcaaggaggaaagagacggatggggagagtttccttctcaacgcatcaacttgaacggcttttatcatgaaaatggccaacgacctggaagcatgtacacccggggcggtaacctcctacaagaagacccgagagacttcgatcatgctttcttcggaatctcggccaaagaggtcatctcgttggacccaagccagcgaaagctactggaagttacgtacgaggccgtagaagccgccggagagcctcttgataagtttctcggttcgagaacaggcgtatttgtaggcaacttcaacaatgaacaccagattatgcagtaccgcgatcctgattatacgttgccttacgtggtaacgggaggtgacccgactcttctgagcaatcgcatcaattatgttttcgaccttacggggccaagtttgatggtcgacacagcttgctcggcgtccatgtacgctttacatctagccgtcacatccattcgcaacgatgattgcgacgctgcgattgtggccggggccaatcttattctaggcccagacaaccaactcttcacaaccaagcttggtgctgtatcaccgacctcccgctgtcacagctttgatgctagagcagatggctactctcgggccgaaggattcggggctatatatctgaaaagactatctgacgctataacgcagggcaaccccatccgcgccgtcgtacgcggcactgcgttcaacgccaatgggaaaacgggtggcatctctcatcccagcgccgatggccaggaatccgttattcgacatgcttacaaggctgccggtggcttggaccccgatcttacaggatatgtcgaggctcatggcacgggcacaccagtaggagatccgatcgaagtctcggccatcgggcgagtgtttgcgccggggcgcgaagatgattatcttctaatcggttcgattaagccaaatctgggtcacagcgaagccgccagtgccatgtcccaaattatgaaagctgttttggcgatggagcacgggcagatcccggcaacgattgggatcgaacgattgaacccggctattaatttcgctgtggcaaggtgtaaggtggtcaccgagatgacgccatggcccaagaatcgtctgcgacgtgttagcatcaatagtttcgggtacggaggtgccaatgcacatgtcattatcgatcacccaagcgttttgattcccgcataccacccccgtggtctccccctgtctgactattctggtatcacaggactgaacggcaaggggaaccatcaggctcgggataccgagcacaaaaacgacatcactctcgggccaggattaaccaacggcgaggttggtgctagtggcaatggtgacatgaatatttgcgaccacagttgcccttaccccttgtattcggggtccttgccaattaagtcggcccaagtcgaagacaaaggtgtgcgcaggcagatcctgctaccggtctcggcgcatgatcagcgtgccttgaaagcgaacatggcggccagtcttaagtctcttcgcgactataatacggcggatctactttacacgctcggctgtcgaaggtccatatttgctcaccgcgcgtttgtggttgcagactctacgtctccgactatcaatgagctggaacctaacacatttatgacaggaaaggcgccaagcactccagcaaaaagaattggattcgtcttcactgggcagggcgctcagtggccgcagatgggcgcccagcttcttcatgagtacgccgtctttaagcataccataaggtatctagacatagtgctcagcaggcttcgcagacgaccaagttggtcgattgaggaagcaattctagagcatacggagagcagccagattcaagacccagccttctcgcagactatttgtacagctctacaaattggtcttgtatctctgctaaggcagtggggaatcgaacctgtagccgtagccggacattcttcaggcgagatcgcagctgcatatgcggccgggcacctgaagcagagcgaggccattgtgctagcctacttccgtggccaggcggttaagaacaataagcgtccagggctcatgatggctgtcagcattggagaatcacaaactaagacttatctcgaagggctagagagtcacgtcaagatcgctgcggtgaactcttctaaaagtgtcacattatccggtgagccggaaactatcgccaagttaagccagaccctgcaagcagaagcaatcttgactcaaattctgaagaccggtggcaatgcttaccattgccatcacatggcagctattggtgagacgtacgaaaacctagcaacagaagggttaaaagatatcgagcccttaagcgccgaggagtgttcacataccacagcaaggtggttttcctcagtgaccctaaaagaagagttcgcagcaccccctgcgtattggagacgcaacctcgaatcgcgagtcttattctcctcggcaatggagaggctcgtcgcgaatgtacctgttgatcttttgatcgagatcgggccccatccagcactcagtggcccaatcaagcaaataagatccgacgctgaaacagagagcggcagagcgaaagtgccaccttgtatcgcttcgcttcgccgtggcgagcacgacgtgattagcatgctgacttgcgccgggaatttattcatcagtgatgcgccgattgatctagtggcggtaaatgcgtctgagacgttggtagatggccaggtggcttttcatcatggattcccctgcattgatttgccgcagtataactacacatatccagaccagccaatctactacgaaaacagattgaacagggagtatcgtctgagaaagcatctgccacatgatcttctgggcgctcgggtgccaggaggttcgagaagtcacgcgcaatggaggaatcttattcgtctgagggacgtgccttggctcgaagatcataaggtccttccacatgtagtgctaccaggcgcagcctacatcaccatggcgattgaggcctgcagtcagttgcatgccgaagccgatgaggctgacccgattaagttgttcaagcttcgccaggtggctatcaattcggctctccgcatagaagatgacgaaatcggtaccgagatggtgctggatatggagaaggtgcccttgacgaactcgggatccatgtcgcaatggtatagattcagtatcggctcgatattcccaaattctgacacctggaccctccattgcactggcactatctccgtgactaccaaggaagtcgattttgacggaactcgtcgtctgggaaccgatgtctgtgttaaatccctagacatgtcgctgtggtataggagattccgggaggttgggctagattatggtccagcattccaaggattgtcggacctcaaggcttatcgcacaatcaacactgccagcgccagggtcaccctaaagcccacgactggtatcagaaacgagtcaagttacaccatccacccgagcactctggatactctgtttcagctggccctactatcctgttacgcaggccaggttgagaattttgacaaggcatttgtgcccatctttgccgatgacattaccatctgggtgccacaatcagaccagcaagaccaggggttaggcatggcgagcgggcgacttgtcggtcttcgaagcttgtacgccggagtctggcttcacgacatgacgggatcaccgttggtagacatcggagagctgaaatgcgtcacttatgaagggatcgtagatgctagtgccgtaaatccatccaacgatgaccgagagccgtactggcgccccgtctctagacccgatattgacactctgactccagccattgctaaggctatgtttcctcccaaacaagttgatacagcggccatgtccgtgctagaatccatatcaatgcatgttcttgtcaagataggggaaacgctccagggcgaaggcattgaagacgaacctgctgtgtgcatgatgccgaggaatgcctcgcctgatgttgacctcggctttctcctggacccaaaactgagcgaggcagagagatatgctgcaattcaacgattaccaaccactattacgaagatccccgaactgagatgtctcgtgacattgcatgacaatttggacatggtcttgagaggggcaatcaacggcacccaagttcttgtggatgataacctgatggtagagttgttctcgtcaggtatttctctacagggtggctactctcatcttcagcggatcgtagatcttttaggccataagaatcctcaaatgcgggtattagaagtcggcgctggtactggaggagcgacctcggctgtcctatctatgttacttctaccaaccggagtaaagagactccaggactacacgttcagtgactcggcagattgggcaatattggaagcgcagtcacggtttgctaattggaatgattcgatgacattccagacactgaatatactccaggatcctatctcccaaggtttcgaggagcaatcttttgaccttgtcattgcttctggtttatgcgagattggagatccggcgatagcgctgagacatatacgatccctactcaagccactgggatcattcgtgttgctggaaacgacgcgtccgacaatgacaaccgaagtgctctcgcgcgccttgaccgggcgatggcatcaacacgggtctctaagcctatcagaggctgagtgggagacagctctagaagccagtgggttctcaggtatacaattatccctccaagattacgccgacgataagcacataacgacaatgatgctgtcgagagcgattgcccctagcgtcgagtcttcctgccgcctcgcgtttgatgtcacggttctctacagcgattcattgcccctcctagctgaagcggttggcgagatgctcacaaaggcaggattcaacgtgaacaaggtcgagttggtcgagttgattgaaagcaggaatataatacccaaaaactcttccgtgatcagtttcatcgatgtagacggctctcttttcacgtgccgtgacgaggcatatttcaaagccgtgcaggaaatagtcctgaacgtttcggagatggtttgggtggccgccgatctgatgtaccccggcgaatcgtctattatgaagggcctgctgcgatctatcgggaccgagaatatcttgtctaagtatgcgatcatcgagttggattatagtgactacaccccagtttcgagggccgctgaattgatcatcgtcaagctgaacgagttgcgagcatcacggacactagaaaatgtggatctcgaatgcgttcttcgaggcgggatgttctatatcgaacgtcttctacctgaagtcgcgctcaatgacgacttcagcttgcgcaatgggctaaagacggacatttcggagctgcgcgttggtgatcaaggcccactgatggcacggtatagacagcctggattactatcgtcactgtacttcgcccccgatccaagcttcgacaagcccctggcaagtgattgggttgagatcaagactatcgccatcggactcaacaggaaagaccttgcagttgctacggcgaaattcgatctgaacaacacgagtgcggaaggctccggccttatcacacaagtcggccgggacgcccaatcccttcacaaggtaggcgatcgagtcttcggtgtgatacctggaaatatgggcaactatctacggtctcctgcatctctagttgcgccaattccagatagtatgtctttcgaagacgcggcctcaatgccagtcgtgtacatgacagcgatctacgcattccagcatttagctcacttgagcgcaggcgagttagtcctcatccaatcggcagcgggtggtctcggaatggcggccatatgcatagcccgaacgctgggtgccgtgatttacgcgacagttggcactaccgagaaacggaaagttcttgtcgaagagttcgggatcccgcacgaccgcatcttcgactcccggcaagcgagcgccgtggatcaaattatgcgggcgactaaacacaacaatggtctcgatgtgattcttagcagcgcgggaggcgactccatgcatgagatgtggcgctgtatcgcgcctctggggcggttcatcgacgtcggtcgcactgatgttcttggtggaggcagactggggctcgaggtgttcaagagaaatgccacattttcttcgttcgatctgggtctcatatatcatcaaaagcctgggctcatctttcgattgatgagggaaatgacacaactactagcaaaaggcgacatcggcgccatcagccatttgaccaagtatgatatctcgagacttgggccagctctagccacattttcaaagggcacccatataggaaaattcatcatcaccttccacgaccgggggagctccctaatggttatgccccgaactacgttcgactcggatgccgcctatcttttagtaggtgcgctgggcggcctcgggagaagcttggctacttggatggctgagcgaggggcgcgatatcttgtttttctctcgcgatctggctctaccaagccggaagccgcggccgccgtcaaggagctcattgaagcgggcgcacaccctacggtagtaagatgtgacgttacaaatgagaaaaacttactcctagctgttactgagatctccaagaagcgacagatcaagggcgtgatccacgccgccatggtcgaaggcgacgcgcttttcagcaacgtcacttgggaccaggtacagcgagtgctcgtacctaaagtcacgggcaccatcaatctccaccacgccacggcacagatgcccctggacttcttcgtcatgatgtcgtccgtctcgggcatcattggcacgcctggtcaaggcgcctacgcggcggccaacgctttccaagacgccttcgccagattccgccactcgcaattcctgcctgctacgtctctcgctctgggcctgatcgccgaagttgggtcgctcagcaccgcaaatggattcaagcagatgcttcagcgcaatgctacatacggcatgaccgaggctgagttcctccagatcttcgagggtgcgctgtgtgactcgcagtcctcggttccctggacaaagaggagacaaacaccatcatcatcactttctgctcttgaccctgaaagtaaggcgcagatagtgacagggcttgagcccgcgaggttcctttcgtacctagataacaatcgcgtcaaggatttagcgtggtataatcgtacacgcttcctggcagtcaggcagagcattgtggatcatgcgcgggctcgcgcgtcatcgggcgcggttgacggcggtggtctatctgttaatacaagcggtcattcgtctacgtctttgcagcaacttctgaaggcatcctcggataccgagaagctagatatcgcgcgtaaatctgtagtcgcgcacatcgctgagcttctgggtatcgaggaagataccataaaccccgaaaaccccgtgtctcactatggcgtcgatagtctcgtggctggcgagctgaggaattggttgatcaaaacgttcggtctggagttaacgatgctccagttgcttagcaagcaaaccaagatccaggacctggcgaaagggatcgcgcgaaagtcagaatctgcccagagcgataattaa

SEQ ID NO: 39343 - protein, 2625 aa, Muscodor strobelii
  misc_feature: SGI Peptide ID NO. 573686
  misc_feature (613)..(951): Pfam Id: PF00698 Pfam Desc: Acyl transferase domain
  misc_feature (1903)..(1979): Pfam Id: PF08240 Pfam Desc: Alcohol dehydrogenase GroES-like domain
  misc_feature (2219)..(2385): Pfam Id: PF00106 Pfam Desc: short chain dehydrogenase
  misc_feature (2010)..(2156): Pfam Id: PF00107 Pfam Desc: Zinc-binding dehydrogenase
  misc_feature (18)..(268): Pfam Id: PF00109 Pfam Desc: Beta-ketoacyl synthase, N-terminal domain
  misc_feature (276)..(394): Pfam Id: PF02801 Pfam Desc: Beta-ketoacyl synthase, C-terminal domain
  misc_feature (2219)..(2398): Pfam Id: PF08659 Pfam Desc: KR domain
  misc_feature (1493)..(1598): Pfam Id: PF08242 Pfam Desc: Methyltransferase domain
  misc_feature (614)..(951): Pfam Id: PF00698 Pfam Desc: Acyl transferase domain
  misc_feature (10)..(2615): NCBI GI: 242812082 Blast Desc: polyketide synthase, [Talaromyces stipitatus ATCC 10500] gi|218714224|gb|EED13647.1| polyketide synthase, [Talaromyces stipitatus ATCC 10500]
  misc_feature (18)..(2614): NCBI GI: 171681658 Blast Desc: protein product [Podospora anserina] gi|170940788|emb|CAP66437.1| protein product [Podospora anserina]
  misc_feature (18)..(2618): NCBI GI: 85089914 Blast Desc: NCU09638 [Neurospora crassa OR74A] gi|28919501|gb|EAA28933.1| conserved [Neurospora crassa OR74A]
  misc_feature (19)..(2621): NCBI GI: 115399290 Blast Desc: ATEG_06056 [Aspergillus terreus NIH2624] gi|114192117|gb|EAU33817.1| ATEG_06056 [Aspergillus terreus NIH2624]
  misc_feature (12)..(2618): NCBI GI: 170940313 Blast Desc: protein product [Podospora anserina]
  misc_feature (18)..(2469): NCBI GI: 116205527 Blast Desc: CHGG_10647 [Chaetomium globosum CBS 148.51] gi|88176775|gb|EAQ84243.1| CHGG_10647 [Chaetomium globosum CBS 148.51]
  misc_feature (17)..(2618): NCBI GI: 40806925 Blast Desc: polyketide synthase [Gibberella moniliformis]
  misc_feature (27)..(2614): NCBI GI: 255950998 Blast Desc: Pc22g23750 [Penicillium chrysogenum Wisconsin 54-1255] gi|211593283|emb|CAP99663.1| Pc22g23750 [Penicillium chrysogenum Wisconsin 54-1255]
  misc_feature (17)..(2602): NCBI GI: 121704114 Blast Desc: polyketide synthase, [Aspergillus clavatus NRRL 1] gi|119398465|gb|EAW08895.1| polyketide synthase, [Aspergillus clavatus NRRL 1]
  misc_feature (18)..(2605): NCBI GI: 242815029 Blast Desc: polyketide synthase, [Talaromyces stipitatus ATCC 10500] gi|218714828|gb|EED14251.1| polyketide synthase, [Talaromyces stipitatus ATCC 10500]
  misc_feature (18)..(1913): SWISSPROT Homolog: EC 2.3.1.161 Lovastatin nonaketide synthase
  misc_feature: Useful for fungicidal and/or biocontrol applications
MPPSRFTAPEPPLSQCPEPIAIVGMGCRWPGGVRNPAQLWHLLKEERDGWGEFPSQRINLNGFYHENGQRPGSMYTRGGNLLQEDPRDFDHAFFGISAKEVISLDPSQRKLLEVTYEAVEAAGEPLDKFLGSRTGVFVGNFNNEHQIMQYRDPDYTLPYVVTGGDPTLLSNRINYVFDLTGPSLMVDTACSASMYALHLAVTSIRNDDCDAAIVAGANLILGPDNQLFTTKLGAVSPTSRCHSFDARADGYSRAEGFGAIYLKRLSDAITQGNPIRAVVRGTAFNANGKTGGISHPSADGQESVIRHAYKAAGGLDPDLTGYVEAHGTGTPVGDPIEVSAIGRVFAPGREDDYLLIGSIKPNLGHSEAASAMSQIMKAVLAMEHGQIPATIGIERLNPAINFAVARCKVVTEMTPWPKNRLRRVSINSFGYGGANAHVIIDHPSVLIPAYHPRGLPLSDYSGITGLNGKGNHQARDTEHKNDITLGPGLTNGEVGASGNGDMNICDHSCPYPLYSGSLPIKSAQVEDKGVRRQILLPVSAHDQRALKANMAASLKSLRDYNTADLLYTLGCRRSIFAHRAFVVADSTSPTINELEPNTFMTGKAPSTPAKRIGFVFTGQGAQWPQMGAQLLHEYAVFKHTIRYLDIVLSRLRRRPSWSIEEAILEHTESSQIQDPAFSQTICTALQIGLVSLLRQWGIEPVAVAGHSSGEIAAAYAAGHLKQSEAIVLAYFRGQAVKNNKRPGLMMAVSIGESQTKTYLEGLESHVKIAAVNSSKSVTLSGEPETIAKLSQTLQAEAILTQILKTGGNAYHCHHMAAIGETYENLATEGLKDIEPLSAEECSHTTARWFSSVTLKEEFAAPPAYWRRNLESRVLFSSAMERLVANVPVDLLIEIGPHPALSGPIKQIRSDAETESGRAKVPPCIASLRRGEHDVISMLTCAGNLFISDAPIDLVAVNASETLVDGQVAFHHGFPCIDLPQYNYTYPDQPIYYENRLNREYRLRKHLPHDLLGARVPGGSRSHAQWRNLIRLRDVPWLEDHKVLPHVVLPGAAYITMAIEACSQLHAEADEADPIKLFKLRQVAINSALRIEDDEIGTEMVLDMEKVPLTNSGSMSQWYRFSIGSIFPNSDTWTLHCTGTISVTTKEVDFDGTRRLGTDVCVKSLDMSLWYRRFREVGLDYGPAFQGLSDLKAYRTINTASARVTLKPTTGIRNESSYTIHPSTLDTLFQLALLSCYAGQVENFDKAFVPIFADDITIWVPQSDQQDQGLGMASGRLVGLRSLYAGVWLHDMTGSPLVDIGELKCVTYEGIVDASAVNPSNDDREPYWRPVSRPDIDTLTPAIAKAMFPPKQVDTAAMSVLESISMHVLVKIGETLQGEGIEDEPAVCMMPRNASPDVDLGFLLDPKLSEAERYAAIQRLPTTITKIPELRCLVTLHDNLDMVLRGAINGTQVLVDDNLMVELFSSGISLQGGYSHLQRIVDLLGHKNPQMRVLEVGAGTGGATSAVLSMLLLPTGVKRLQDYTFSDSADWAILEAQSRFANWNDSMTFQTLNILQDPISQGFEEQSFDLVIASGLCEIGDPAIALRHIRSLLKPLGSFVLLETTRPTMTTEVLSRALTGRWHQHGSLSLSEAEWETALEASGFSGIQLSLQDYADDKHITTMMLSRAIAPSVESSCRLAFDVTVLYSDSLPLLAEAVGEMLTKAGFNVNKVELVELIESRNIIPKNSSVISFIDVDGSLFTCRDEAYFKAVQEIVLNVSEMVWVAADLMYPGESSIMKGLLRSIGTENILSKYAIIELDYSDYTPVSRAAELIIVKLNELRASRTLENVDLECVLRGGMFYIERLLPEVALNDDFSLRNGLKTDISELRVGDQGPLMARYRQPGLLSSLYFAPDPSFDKPLASDWVEIKTIAIGLNRKDLAVATAKFDLNNTSAEGSGLITQVGRDAQSLHKVGDRVFGVIPGNMGNYLRSPASLVAPIPDSMSFEDAASMPVVYMTAIYAFQHLAHLSAGELVLIQSAAGGLGMAAICIARTLGAVIYATVGTTEKRKVLVEEFGIPHDRIFDSRQASAVDQIMRATKHNNGLDVILSSAGGDSMHEMWRCIAPLGRFIDVGRTDVLGGGRLGLEVFKRNATFSSFDLGLIYHQKPGLIFRLMREMTQLLAKGDIGAISHLTKYDISRLGPALATFSKGTHIGKFIITFHDRGSSLMVMPRTTFDSDAAYLLVGALGGLGRSLATWMAERGARYLVFLSRSGSTKPEAAAAVKELIEAGAHPTVVRCDVTNEKNLLLAVTEISKKRQIKGVIHAAMVEGDALFSNVTWDQVQRVLVPKVTGTINLHHATAQMPLDFFVMMSSVSGIIGTPGQGAYAAANAFQDAFARFRHSQFLPATSLALGLIAEVGSLSTANGFKQMLQRNATYGMTEAEFLQIFEGALCDSQSSVPWTKRRQTPSSSLSALDPESKAQIVTGLEPARFLSYLDNNRVKDLAWYNRTRFLAVRQSIVDHARARASSGAVDGGGLSVNTSGHSSTSLQQLLKASSDTEKLDIARKSVVAHIAELLGIEEDTINPENPVSHYGVDSLVAGELRNWLIKTFGLELTMLQLLSKQTKIQDLAKGIARKSESAQSDN

SEQ ID NO: 39344 - DNA, 10845 bp, Muscodor strobelii; identical to SEQ ID NO: 39341
  misc_feature: SGI EST ID NO. CUFF.94898.2
  misc_feature: Variant of the nucleotide sequence at SEQ ID NO 39342

SEQ ID NO: 39345 - DNA, 1320 bp, Muscodor strobelii
  misc_feature: SGI cDNA ID NO. 573687
  misc_feature: Elevated expression when VOC is produced
  misc_feature: Encodes the peptide sequence at SEQ ID NO 39346
atggccattaaaaaacattcatccttgattcttcagtcggcgcgcgagaccctgaggcaagctgagagactcgtcaacttactcgagtcaaacaacctggaggagcctgactttaccgtatcctcaccagctcgtcccgagaatagcgactacgacgcgatctgcactgatctggttcaggcaactcaggacctgacgcttcttgccaaaggccctctggcgtgggtgcgcacgtttttctgctgtcaccatgacctggctgcatggcaagtcgcgctacggttcgggtacttcgctatcgtgccccttgatgggtgcatatctgcggcggaaatggcgaagcgagccgggatggacgaagaccgcttgcggcgggtcatgaagttcttgacaacgcagcgatgcttccaagaggtcgaggatgacaagtttgagcacactgccctatcggggtatattgccaagaacaaagacattgagcagtgcctcgcctttgaggctgatgagatgtttgaggctgcttcactcactgccagttccatccaaaaagcaccccttacttccgaggctaggaacagcgcttttaatatgaggttcggtacttcgccgtacacctggtacacccaaaatccagaacgcggtgcacgttttgcgtccgcaatggcaggatatgcccggatgaatagagacaccaccgaactcatgtctcgatttccatgggatcaatttgggaagacgaaagtcgtggacgtgggcggtgggagcgggcacgtctccatatacctggcttcgcaatttcccaaattgagcttcatcgtccaagacatcaatacggtcatgcttgagcaaggtccaaagagagcagactatcttcaggttcgagacagagtgtctttcatgcagtatgacttcttcgaaccgcaacttgtaacagacgccggcttattcctcctacgccaagtcatccacaactaccccgacgacgtgtgcgtcaagattttcaagtcgtttgttcctgccatgctgggagatgggactctaacgcccagcctgcttatcaatgacatgcttctccctcctcccaatgtcgaacccaaagttgaggagtatcatctgcggcagattgacatccacatgcttgttggatatgccgccaaacaacggaccctcgctgagttcaaagcacttttatcggaagcggacccggggtttgaggtcgtcagagtgcacggaaaggggatcatgggattgttagaagttcagctcaagggcaaacaaggacacacatcatcacagagtgaccctcaaaccatacaataa

SEQ ID NO: 39346 - protein, 439 aa, Muscodor strobelii
  misc_feature: SGI Peptide ID NO. 573687
  misc_feature (139)..(398): Pfam Id: PF00891 Pfam Desc: O-methyltransferase
  misc_feature (193)..(398): Pfam Id: PF00891 Pfam Desc: O-methyltransferase
  misc_feature (1)..(423): NCBI GI: 242812077 Blast Desc: O-methyltransferase, [Talaromyces stipitatus ATCC 10500] gi|218714223|gb|EED13646.1| O-methyltransferase, [Talaromyces stipitatus ATCC 10500]
  misc_feature (5)..(422): NCBI GI: 189201597 Blast Desc: sterigmatocystin 8-O-methyltransferase precursor [Pyrenophora tritici-repentis Pt-1C-BFP] gi|187984234|gb|EDU49722.1| sterigmatocystin precursor Pt-1C-BFP]
  misc_feature (35)..(406): NCBI GI: 121711970 Blast Desc: O-methyltransferase, [Aspergillus clavatus NRRL 1] gi|119401752|gb|EAW12174.1| O-methyltransferase, [Aspergillus clavatus NRRL 1]
  misc_feature (10)..(423): NCBI GI: 171681656 Blast Desc: protein product [Podospora anserina] gi|170940787|emb|CAP66436.1| protein product [Podospora anserina]
  misc_feature (2)..(423): NCBI GI: 116205525 Blast Desc: CHGG_10646 [Chaetomium globosum CBS 148.51] gi|88176774|gb|EAQ84242.1| CHGG_10646 [Chaetomium globosum CBS 148.51]
  misc_feature (7)..(423): NCBI GI: 85089912 Blast Desc: NCU09637 [Neurospora crassa OR74A] gi|28919500|gb|EAA28932.1| [Neurospora crassa OR74A]
  misc_feature (7)..(423): NCBI GI: 170940312 Blast Desc: protein product [Podospora anserina]
  misc_feature (3)..(423): NCBI GI: 169605449 Blast Desc: SNOG_05749 [Phaeosphaeria nodorum SN15] gi|111065693|gb|EAT86813.1| SNOG_05749 [Phaeosphaeria nodorum SN15]
  misc_feature (7)..(422): NCBI GI: 116191605 Blast Desc: CHGG_05521 [Chaetomium globosum CBS 148.51] gi|88181433|gb|EAQ88901.1| CHGG_05521 [Chaetomium globosum CBS 148.51]
  misc_feature (7)..(416): NCBI GI: 212545252 Blast Desc: O-methyltransferase, [Penicillium marneffei ATCC 18224] gi|210065749|gb|EEA19843.1| O-methyltransferase, [Penicillium marneffei ATCC 18224]
  misc_feature (45)..(409): SWISSPROT Homolog: EC 2.1.1.110 Sterigmatocystin 8-O-methyltransferase
  misc_feature: Useful for introducing or modulating the production of volatile compounds
MAIKKHSSLILQSARETLRQAERLVNLLESNNLEEPDFTVSSPARPENSDYDAICTDLVQATQDLTLLAKGPLAWVRTFFCCHHDLAAWQVALRFGYFAIVPLDGCISAAEMAKRAGMDEDRLRRVMKFLTTQRCFQEVEDDKFEHTALSGYIAKNKDIEQCLAFEADEMFEAASLTASSIQKAPLTSEARNSAFNMRFGTSPYTWYTQNPERGARFASAMAGYARMNRDTTELMSRFPWDQFGKTKVVDVGGGSGHVSIYLASQFPKLSFIVQDINTVMLEQGPKRADYLQVRDRVSFMQYDFFEPQLVTDAGLFLLRQVIHNYPDDVCVKIFKSFVPAMLGDGTLTPSLLINDMLLPPPNVEPKVEEYHLRQIDIHMLVGYAAKQRTLAEFKALLSEADPGFEVVRVHGKGIMGLLEVQLKGKQGHTSSQSDPQTIQ

SEQ ID NO: 39347 - DNA, 10845 bp, Muscodor strobelii; identical to SEQ ID NO: 39341
  misc_feature: SGI EST ID NO. CUFF.94898.2
  misc_feature: Variant of the nucleotide sequence at SEQ ID NO 39345

SEQ ID NO: 39348 - DNA, 1578 bp, Muscodor strobelii
  misc_feature: SGI cDNA ID NO. 573688
  misc_feature: Elevated expression when VOC is produced
  misc_feature: Encodes the peptide sequence at SEQ ID NO 39349
atgttgattcccttgaaagaagctcttgctgagaagctacaaggaaacaatagcagccttattctcggtgtctttacgatctgcgcagttactatttccatcattcttgagctaacacggggtaccaacgctaagagcagttatccactcgttggcgctgacctgaagcatactttcttcagaagcatacgtctccgccaacactacttcaagaatggcccagagatcatccatgacgccttcaagaagttcccaaactctatctacaccttgccctcacttgatcgtactaccatcgtgttgccgcctcgctttttgactgagattcgagagctcccgagaaccattggcaacaactcggaggccacttcggatttctttgtcggaaaatggacgactctcgattacgacatcttttcgcatgctacggttgacgccataaaaacccaatacatcgccaagattggtcaacagatcgggccagcgtcgaacgagttatcatatgcttttatcaagcacttcgatagataccaagactggacggccgtcaccgcacagccaaagatcttacagctcgttgcccagagcgtagcccgaactattgttgggcccgatctctgtcgaaaccccgagtgggttccagcagtcatcggctacgcgcagaatgtcttcgtcgctgccgtaacgatgaagctcgtgcctaagattgctcagcctttcgtcgcgttgcttacaccaaatctgtatcgtatccacagctgccgtcgcaccattcggcgtcttttgcgtcccattatggagcagagattagagtggcgacgcgagaaccctgaagaatgggcggccaggctcaagagcgaggaggtgacgacactggagtggctcatcgagacatcggagcctaccgatatgacaattccaactatggcgcaccgtctcactggtgtcagtttcggtgcctctcacacaacgactaacacaatcacgaatgccctgattgatcttgcaaatgatttcgaacgttgggctccgccacttcgagaagagatcgaaagtctaattggtcgcgattccagccgcctcacaaatgcgaatctgtccaagatgtggaagctcgacagcttcttgaaagagtctcagaggttccatccgccctcaaagctttcggtcagtcggaagataaccaaggagcacaccctctcctccggcgatgtcgtccccaaagacgcactcgtctgtttcgcgggcgttccaatgtctctgtccgagccgacgctcgataatccggaggaattcgacggcttccgcttcgagaagcttcggaagaacaaacaggccaaccacaatggcctgcagttcacctcgtcgtattccggcagcctccatttcggccacggtcggtggatgtgtccagggcggttcatgggcgggatgatctgcaagctcctcatcatagaggtcctctcgcgctacgacctgaagctttccccaggtggtcgcccgaagaatctcatgttctttgacatggatgtcccggatccaaagtatgagatcttgtttcgtgacaggaggtcttga

SEQ ID NO: 39349 - protein, 525 aa, Muscodor strobelii
  misc_feature: SGI Peptide ID NO. 573688
  misc_feature (59)..(520): Pfam Id: PF00067 Pfam Desc: Cytochrome P450
  misc_feature (346)..(520): Pfam Id: PF00067 Pfam Desc: Cytochrome P450
  misc_feature (21)..(525): NCBI GI: 242812072 Blast Desc: cytochrome P450, [Talaromyces stipitatus ATCC 10500] gi|218714222|gb|EED13645.1| cytochrome P450, [Talaromyces stipitatus ATCC 10500]
  misc_feature (65)..(524): NCBI GI: 240108704 Blast Desc: Cytochrome P450 family protein [Coccidioides posadasii C735 delta SOWgp]
  misc_feature (27)..(523): NCBI GI: 242771211 Blast Desc: cytochrome P450, [Talaromyces stipitatus ATCC 10500] gi|242821273|ref|XP_002487646.1| cytochrome P450, [Talaromyces stipitatus ATCC 10500] gi|218712567|gb|EED11992.1| cytochrome
  misc_feature (73)..(524): NCBI GI: 258578343 Blast Desc: conserved [Uncinocarpus reesii 1704] gi|237903619|gb|EEP78020.1| conserved [Uncinocarpus reesii 1704]
  misc_feature (80)..(523): NCBI GI: 156045918 Blast Desc: SS1G_09235 [Sclerotinia sclerotiorum 1980] gi|154693631|gb|EDN93369.1| SS1G_09235 [Sclerotinia sclerotiorum 1980]
  misc_feature (16)..(523): NCBI GI: 119494789 Blast Desc: cytochrome P450 monooxygenase, [Neosartorya fischeri NRRL 181] gi|119412362|gb|EAW22303.1| cytochrome P450 monooxygenase, [Neosartorya fischeri NRRL 181]
  misc_feature (79)..(523): NCBI GI: 169635726 Blast Desc: cytochrome P450 monooxygenase [Botryotinia fuckeliana]
  misc_feature (66)..(523): NCBI GI: 13021721 Blast Desc: AF279808_3 cytochrome P450 monooxygenase [Penicillium paxilli]
  misc_feature (19)..(524): NCBI GI: 212542745 Blast Desc: cytochrome P450, [Penicillium marneffei ATCC 18224] gi|210066434|gb|EEA20527.1| cytochrome P450, [Penicillium marneffei ATCC 18224]
  misc_feature (69)..(523): NCBI GI: 145254738 Blast Desc: An18g02700 [Aspergillus niger] gi|134084313|emb|CAK48653.1| protein product [Aspergillus niger]
  misc_feature (27)..(523): SWISSPROT Homolog: EC 1.14.13.78 Ent-kaurene oxidase
  misc_feature: Useful for introducing or modulating the production of volatile compounds
MLIPLKEALAEKLQGNNSSLILGVFTICAVTISIILELTRGTNAKSSYPLVGADLKHTFFRSIRLRQHYFKNGPEIIHDAFKKFPNSIYTLPSLDRTTIVLPPRFLTEIRELPRTIGNNSEATSDFFVGKWTTLDYDIFSHATVDAIKTQYIAKIGQQIGPASNELSYAFIKHFDRYQDWTAVTAQPKILQLVAQSVARTIVGPDLCRNPEWVPAVIGYAQNVFVAAVTMKLVPKIAQPFVALLTPNLYRIHSCRRTIRRLLRPIMEQRLEWRRENPEEWAARLKSEEVTTLEWLIETSEPTDMTIPTMAHRLTGVSFGASHTTTNTITNALIDLANDFERWAPPLREEIESLIGRDSSRLTNANLSKMWKLDSFLKESQRFHPPSKLSVSRKITKEHTLSSGDVVPKDALVCFAGVPMSLSEPTLDNPEEFDGFRFEKLRKNKQANHNGLQFTSSYSGSLHFGHGRWMCPGRFMGGMICKLLIIEVLSRYDLKLSPGGRPKNLMFFDMDVPDPKYEILFRDRRS

SEQ ID NO: 39350 - DNA, 2161 bp, Muscodor strobelii
  misc_feature: SGI EST ID NO. CUFF.94833.1
  misc_feature: Variant of the nucleotide sequence at SEQ ID NO 39348
tgatcacatatttcaaatcttggaatacctttgagaatcattcgtacaattatcccattcttgggatatcggagccaaaatctactacccccaagatgttgattcccttgaaagaagctcttgctgagaagctacaaggaaacaatagcagccttattctcggtgtctttacgatctgcgcagttactatttccatcattcttgagctaacacggggtaccaacgctaagagcagttatccactcgttggcgctgacctgaagcatactttcttcagaagcatacgtctccgccaacactacttcaagaatggcccagagatcatccatgacgccttcaagaagttcccaaactctatctacaccttgccctcacttgatcgtactaccatcgtgttgccgcctcgctttttgactgagattcgagagctcccgagaaccattggcaacaactcggaggccacttcggatttctttgtcggaaaatggacgactctcgattacgacatcttttcgcatgctacggttgacgccataaaaacccaatacatcgccaagattggtcaacagatcgggccagcgtcgaacgagttatcatatgcttttatcaagcacttcgatagataccaagactggacggccgtcaccgcacagccaaagatcttacagctcgttgcccagagcgtagcccgaactattgttgggcccgatctctgtcgaaaccccgagtgggttccagcagtcatcggctacgcgcagaatgtcttcgtcgctgccgtaacgatgaagctcgtgcctaagattgctcagcctttcgtcgcgttgcttacaccaaatctgtatcgtatccacagctgccgtcgcaccattcggcgtcttttgcgtcccattatggagcagagattagagtggcgacgcgagaaccctgaagaatgggcggccaggctcaagagcgaggaggtgacgacactggagtggctcatcgagacatcggagcctaccgatatgacaattccaactatggcgcaccgtctcactggtgtcagtttcggtgcctctcacacaacgactaacacaatcacgaatgccctgattgatcttgcaaatgatttcgaacgttgggctccgccacttcgagaagagatcgaaagtctaattggtcgcgattccagccgcctcacaaatgcgaatctgtccaagatgtggaagctcgacagcttcttgaaagagtctcagaggttccatccgccctcaaagctttcggtcagtcggaagataaccaaggagcacaccctctcctccggcgatgtcgtccccaaagacgcactcgtctgtttcgcgggcgttccaatgtctctgtccgagccgacgctcgataatccggaggaattcgacggcttccgcttcgagaagcttcggaagaacaaacaggccaaccacaatggcctgcagttcacctcgtcgtattccggcagcctccatttcggccacggtcggtggatgtgtccagggcggttcatgggcgggatgatctgcaagctcctcatcatagaggtcctctcgcgctacgacctgaagctttccccaggtggtcgcccgaagaatctcatgttctttgacatggatgtcccggatccaaagtatgagatcttgtttcgtgacaggaggtcttgaaatagatgttttattctaagtgtgaattgcttcaattgccccagtcacttatacactgtcgttaacgaagtcttgttcccccgacattgtagtcgtgcaacttgtaagcgcccgcgtgaatatgccttaaatatactaagatttggtttccagacgtcaagaacgcgtctgatcttagaagctatcaatataaaatcgtactttgtacatggatattatcgcctcctcaaccggaaaactacttattactcctgaagccaaggacctgcgaggttcatgggctcggtcccggcgcgtgctcatggaccgcaacagcccccctaatgcagcacggtctccgaactcaattgctccgagctctaaacgacacccgacgccgaaatcgacttacacagcaaactatactgcgcgaggttttttttattttatttcatatttatctatttatcttttctacaatcgcttcggcccagatgggtatatcacag

SEQ ID NO: 39351 - DNA, 1011 bp, Muscodor strobelii
  misc_feature: SGI cDNA ID NO. 573689
  misc_feature: Elevated expression when VOC is produced
  misc_feature: Encodes the peptide sequence at SEQ ID NO 39352
atggactccgcgaccgaagacagaggtcctggcctccgggcattgactatcgtcgctatcatactaacagtggtcgccttaattcttcggttctggtccaagagtctaagctctgcctctcatccaggagccaaatctcggttttggtgggatgattggcttgcactagccactggtctctctgctctgggccaattcgcaatcgtcctcacgatgatcgactacgccggcgttggtcgccatgtatggacacttgctgattcacaggtcttacagttcgccaagctcctgtttgtcgcccaacaacttttcgggctggcgctttttctatccaagctctcggccttgttgttcttcgagcgtcttttcttttcccggacgactaccttgacatggttcaagatatcattgtggactctattcggcgtcaatattgcctgggagataggaaacttcttcgcatctgtgttcaactgtagtcccgtccaaaggacttgggatccttctgttcccggaacatgcggttctacaaccgtgttatacctagcgacctctgtcccgggtattgcaattgatttcttcatccttctactacccgttccgatcattatgcgtctccgcgttaccgtcatcgtgtcttcgatcggtctagtggtgtcaatctcagtggcagaagaccagtttgcactagatcctacatttgcggctgtggactttctttactgggcctctgctgcacctgcactgtctgtggcttgtatcagtcttccttctatgttgcctcttgggcgagcgtttcaaagtaaagctaggtctttgatgggctcacggaagttctcggcaaccggtccgagcaaccccatcgggagcaccctgagtagcggctcgagaaatcagcaagtctatagtcatcagaaaatcgaaggatcgaatacttcacacggtttcgatccggtagagttagtcgggcgggcttctgaagacagccaacggaagatattagtgacttga

SEQ ID NO: 39352 - protein, 336 aa, Muscodor strobelii
  misc_feature: SGI Peptide ID NO. 573689
  misc_feature (6)..(278): NCBI GI: 67537778 Blast Desc: AN5059.2 [Aspergillus nidulans FGSC A4] gi|40740863|gb|EAA60053.1| AN5059.2 [Aspergillus nidulans FGSC A4] gi|259482061|tpe|CBF76179.1| TPA: conserved [Aspergillus FGSC
  misc_feature (3)..(320): NCBI GI: 238497123 Blast Desc: conserved [Aspergillus flavus NRRL3357] gi|220694677|gb|EED51021.1| conserved [Aspergillus flavus NRRL3357]
  misc_feature (3)..(320): NCBI GI: 169774355 Blast Desc: [Aspergillus oryzae RIB40] gi|83769508|dbj|BAE59643.1| protein product [Aspergillus oryzae]
  misc_feature (46)..(277): NCBI GI: 145250481 Blast Desc: An15g02150 [Aspergillus niger] gi|134082274|emb|CAK42318.1| protein product [Aspergillus niger]
  misc_feature (3)..(298): NCBI GI: 145228617 Blast Desc: An01g01780 [Aspergillus niger] gi|134054708|emb|CAK43549.1| protein product [Aspergillus niger]
  misc_feature (84)..(336): NCBI GI: 242821088 Blast Desc: conserved [Talaromyces stipitatus ATCC 10500] gi|218712531|gb|EED11956.1| conserved [Talaromyces stipitatus ATCC 10500]
  misc_feature (1)..(286): NCBI GI: 242797784 Blast Desc: conserved [Talaromyces stipitatus ATCC 10500] gi|242797794|ref|XP_002483035.1| conserved [Talaromyces stipitatus ATCC 10500] gi|218716378|gb|EED15799.1| conserved ATCC
  misc_feature (77)..(286): NCBI GI: 242797789 Blast Desc: conserved [Talaromyces stipitatus ATCC 10500] gi|218716379|gb|EED15800.1| conserved [Talaromyces stipitatus ATCC 10500]
  misc_feature (18)..(328): NCBI GI: 70981734 Blast Desc: integral membrane protein [Aspergillus fumigatus Af293] gi|66844018|gb|EAL84358.1| integral membrane protein [Aspergillus fumigatus Af293] gi|159121997|gb|EDP47120.1| protein
  misc_feature (6)..(317): NCBI GI: 85119181 Blast Desc: NCU02903 [Neurospora crassa OR74A] gi|28927396|gb|EAA36349.1| [Neurospora crassa OR74A]
  misc_feature: Useful for introducing or modulating the production of volatile compounds
MDSATEDRGPGLRALTIVAIILTVVALILRFWSKSLSSASHPGAKSRFWWDDWLALATGLSALGQFAIVLTMIDYAGVGRHVWTLADSQVLQFAKLLFVAQQLFGLALFLSKLSALLFFERLFFSRTTTLTWFKISLWTLFGVNIAWEIGNFFASVFNCSPVQRTWDPSVPGTCGSTTVLYLATSVPGIAIDFFILLLPVPIIMRLRVTVIVSSIGLVVSISVAEDQFALDPTFAAVDFLYWASAAPALSVACISLPSMLPLGRAFQSKARSLMGSRKFSATGPSNPIGSTLSSGSRNQQVYSHQKIEGSNTSHGFDPVELVGRASEDSQRKILVT

SEQ ID NO: 39353 - DNA, 1610 bp, Muscodor strobelii
  misc_feature: SGI EST ID NO. CUFF.94803.1
  misc_feature: Variant of the nucleotide sequence at SEQ ID NO 39351
cggctgacctgtgagagatcaaaatggtacctcaatatcctggtgcgtgctaagggtcgtattccccgacactcttatgtgctcggtagtatctacccgggtggctcctacctcgttgcccaacttctcacgtactggtattataaccagattaacccccttgaattgtcagcaccctgtctgcctgcaaatagtctcccgtccaggtgttccgctcttcactccacagcatcatatgcatcaccagatattctcatggactccgcgaccgaagacagaggtcctggcctccgggcattgactatcgtcgctatcatactaacagtggtcgccttaattcttcggttctggtccaagagtctaagctctgcctctcatccaggagccaaatctcggttttggtgggatgattggcttgcactagccactggtctctctgctctgggccaattcgcaatcgtcctcacgatgatcgactacgccggcgttggtcgccatgtatggacacttgctgattcacaggtcttacagttcgccaagctcctgtttgtcgcccaacaacttttcgggctggcgctttttctatccaagctctcggccttgttgttcttcgagcgtcttttcttttcccggacgactaccttgacatggttcaagatatcattgtggactctattcggcgtcaatattgcctgggagataggaaacttcttcgcatctgtgttcaactgtagtcccgtccaaaggacttgggatccttctgttcccggaacatgcggttctacaaccgtgttatacctagcgacctctgtcccgggtattgcaattgatttcttcatccttctactacccgttccgatcattatgcgtctccgcgttacgtctcgccaaaaacttggtctttttttgtcttcgcacttgcatccctcgtcatcgtgtcttcgatcggtctagtggtgtcaatctcagtggcagaagaccagtttgcactagatcctacatttgcggctgtggactttctttactgggcctctgctgcacctgcactgtctgtggcttgtatcagtcttccttctatgttgcctcttgggcgagcgtttcaaagtaaagctaggtctttgatgggctcacggaagttctcggcaaccggtccgagcaaccccatcgggagcaccctgagtagcggctcgagaaatcagcaagtctatagtcatcagaaaatcgaaggatcgaatacttcacacggtttcgatccggtagagttagtcgggcgggcttctgaagacagccaacggaagatattagtgacttgaatctaaagcactgcattctcccgtttgaacatagatctatgtactcttgaaaagccttattgtcgacggtgcatctgcgtacgcaaatacaaggccctctcccataacgcttctctatttcatctagatcactagcaactcatcagctgtgtccgctgttggtcatcacacataacgctacacccaacgctatcgcaggcaacggtgagtcggtagaccattgcggggtcagtcgatcaggcttaagactataaattaatcttagagactgagaagttgagtaatttaagacccttc

SEQ ID NO: 39354 - DNA, 399 bp, Muscodor strobelii
  misc_feature: SGI cDNA ID NO. 573690
  misc_feature: Elevated expression when VOC is produced
  misc_feature: Encodes the peptide sequence at SEQ ID NO 39355
atgacctcggagaacaatctggagcctacatgcaacctgttttggacaccacaggacccagtccaaaaggaactcagcgctatcctgaagcccatgaagcaagatccgctcggcgtcgtctcactcggaaaagatggcgtctttcgctctctgacggctgatcgcgacgttattgacgccgcgcctttgacctcgaaactcattgcggcacttcacgcccgtatgccgcctggctatatcaacgatgctgagtgggagggggttgatgggacgacgactcctagggagaaatggttcaacccggataaggggatcttgccagagcctctgagcgaagaacaaaaaggaaaggcaggagtccgttatgaggagcatcttgcgtgggagaagaagcaatag

SEQ ID NO: 39355 - protein, 132 aa, Muscodor strobelii
  misc_feature: SGI Peptide ID NO. 573690
  misc_feature (15)..(115): NCBI GI: 226292241 Blast Desc: conserved [Paracoccidioides brasiliensis Pb18]
  misc_feature (15)..(115): NCBI GI: 225681060 Blast Desc: conserved [Paracoccidioides brasiliensis Pb03]
  misc_feature (15)..(115): NCBI GI: 226282593 Blast Desc: conserved [Paracoccidioides brasiliensis Pb01]
  misc_feature (10)..(124): NCBI GI: 240275761 Blast Desc: conserved [Ajellomyces capsulatus H143]
  misc_feature (10)..(124): NCBI GI: 225563184 Blast Desc: conserved [Ajellomyces capsulatus G186AR]
  misc_feature (10)..(108): NCBI GI: 119183844 Blast Desc: [Coccidioides immitis RS]
  misc_feature (18)..(114): NCBI GI: 242810115 Blast Desc: conserved [Talaromyces stipitatus ATCC 10500] gi|218716139|gb|EED15561.1| conserved [Talaromyces stipitatus ATCC 10500]
  misc_feature (9)..(125): NCBI GI: 256720778 Blast Desc: NECHADRAFT_102850 [Nectria haematococca mpVI 77-13-4]
  misc_feature (20)..(125): NCBI GI: 242778771 Blast Desc: conserved [Talaromyces stipitatus ATCC 10500] gi|218722925|gb|EED22343.1| conserved [Talaromyces stipitatus ATCC 10500]
  misc_feature (19)..(114): NCBI GI: 169597189 Blast Desc: SNOG_01377 [Phaeosphaeria nodorum SN15] gi|160707464|gb|EAT91026.2| SNOG_01377 [Phaeosphaeria nodorum SN15]
  misc_feature: Useful for introducing or modulating the production of volatile compounds
MTSENNLEPTCNLFWTPQDPVQKELSAILKPMKQDPLGVVSLGKDGVFRSLTADRDVIDAAPLTSKLIAALHARMPPGYINDAEWEGVDGTTTPREKWFNPDKGILPEPLSEEQKGKAGVRYEEHLAWEKKQ

SEQ ID NO: 39356 - DNA, 1425 bp, Muscodor strobelii
  misc_feature: SGI EST ID NO. CUFF.94740.0
  misc_feature: Variant of the nucleotide sequence at SEQ ID NO 39354
caagccttcaatctgtagcttggttcgaacacacgcaccccttctacggggttgaaagggtcccgggttgcggggttggactgggcgggggttcaccacccgggcagcgcgactcaattgcatacatgtacctgtgctgaacgtaggtacatctaacgtgatgaccggccagccatgctcctgccttatacatgtaggcaacaacctctgaactatcattatgttccgtgttgagacagatgcatatttcgttaccggaactcgccacagtagcccctaatcggcgtatgttagttaacctattctaagactaggacaacagactagtgtaccgtgcatcatagtacaaatttattggcgatcttgcctgatcatccgcgtatatcacacccccggatgatacacagtaaatcggttactcaacggccaaactcgaagagactcaacggggatcttcttgatgttcaatgttcgtgagcaagtcagaacgtcatcacgaactctcgctgaagttcaaaatgacctcggagaacaatctggagcctacatgcaacctgttttggacaccacaggacccagtccaaaaggaactcagcgctatcctgaagcccatgaagcaagatccgctcggcgtcgtctcactcggaaaagatggcgtctttcgctctctgacggctgatcgcgacgttattgacgccgcgcctttgacctcgaaactcattgcggcacttcacgcccgtatgccgcctggctatatcaacgatgctgagtgggagggggttgatgggacgacgactcctagggagaaatggttcaacccggataaggggatcttgccagagcctctgagcgaagaacaaaaaggaaaggcaggagtccgttatgaggagcatcttgcgtgggagaagaagcaatagtagcatgtatgagggagcacgatcctgtttttgatatattatattcaatatggctcaattgccgttttatactccaatccgtattccttcaggggaatgaatcaatgaaacaagtagatatggaactttcatcgtgtttttctacttcataggctcgaaactgaatgttctatatcttgaatggatatcgagatgtgatcattccttcgctcgcccttccactcccgtgttccaacaccgagcgcgcagagaatctcataagcatcacgggtgcaacattcatcacagaccacacaccgttcttgtcgactctaaccagcgtccctggggcacttgcatcagccgaagtgaggttttgaaaacaacacacaggataattcggcactaacgtgttcctaaaccgctgctattaaacaacctccaaatgctttcgcaaaacggtcccgaatccttctttctgatcttctattattatcccgacgagaatccgtgtcgaatcatgtctggg

SEQ ID NO: 39357 - DNA, 1074 bp, Muscodor strobelii
  misc_feature: SGI cDNA ID NO. 573691
  misc_feature: Encodes the peptide sequence at SEQ ID NO 39358
atgaatcaaccccgccccgcgatgcgcgactcctggttcgcgcctctgtctgtcgacttattcatcaaggtcctgaatgtcacgatactgcacccgttcgtcgcatggatcataccgctctgtttccgcgccgaagctagagagtgggatgccccgccgatggtggtcagcatcgcatgggcgacgcttgtcactctgggatggatggcaaacgtcatcagtcacaagattgcatatggcctgcatagagaagttgacctgaccgaggaggtcatcgtgatcacaggcggcacgagtggattggggttgttgatcgcagaggtgtatggtatgaggggcgcgacggttgctgtcttagacactaaacctctcgagcataccgaggcgcgcggcattacctactatcagtgcgatgtgacggacagggcacagatcgcgcgcgttgctagcgacattgaacgagaactcggaacacccacagtcctgattaacaatgccgcaatagtagtcggcaagaagctcctcgatatgtccatagatgaagtcgacaagtccttacgcacgaacctcctctctcacttctacacgatcaagacctttctgccaggcatgatcaacaacgaaacaggcggcaccatcgtgacattatctagcgtgataggacacattggcgcagcgcaactatctgattacgcagtagcgaaggcaggcgtgacagcactgcacaaatcccttgccgccgagctcgcgccctatcccgagatcaagactgtgttagtcacccccggccagctcagtactccgctattccaaggagtgcgaacaccaaatccgttcattgcgcctgttgtcgagccgatagaggtcgcgaaagaggtcatcaaggcaatcgatcagggcctcagtagccatattgctatgccgatgtatgcacgctggattgattggtacaacgtcttgcctgtgggcatacagaccattgcaaggaagatatctggggtggatagcagtatgagttcgttcgttgggaggagagcgacggaattgagcgagaagaatggctccttgatatga

SEQ ID NO: 39358 - protein, 357 aa, Muscodor strobelii
  misc_feature: SGI Peptide ID NO. 573691
  misc_feature (90)..(250): Pfam Id: PF00106 Pfam Desc: short chain dehydrogenase
  misc_feature (91)..(258): Pfam Id: PF08659 Pfam Desc: KR domain
  misc_feature (6)..(354): NCBI GI: 85110215 Blast Desc: NCU06845 [Neurospora crassa OR74A] gi|28881192|emb|CAD70373.1| related to a retinal short-chain dehydrogenase/reductase [Neurospora crassa] conserved [Neurospora
  misc_feature (6)..(357): NCBI GI: 116204641 Blast Desc: CHGG_10204 [Chaetomium globosum CBS 148.51] gi|88176332|gb|EAQ83800.1| CHGG_10204 [Chaetomium globosum CBS 148.51]
  misc_feature (5)..(353): NCBI GI: 171689190 Blast Desc: protein product [Podospora anserina] gi|170944557|emb|CAP70668.1| protein product [Podospora anserina]
  misc_feature (4)..(349): NCBI GI: 256730832 Blast Desc: [Nectria haematococca mpVI 77-13-4]
  misc_feature (4)..(349): NCBI GI: 46109142 Blast Desc: FG01453.1 [Gibberella zeae PH-1]
  misc_feature (10)..(348): NCBI GI: 145608316 Blast Desc: MGG_12752 [Magnaporthe grisea 70-15] gi|145015804|gb|EDK00294.1| MGG_12752 [Magnaporthe grisea 70-15]
  misc_feature (2)..(357): NCBI GI: 154320722 Blast Desc: BC1G_01833 [Botryotinia fuckeliana B05.10] gi|150853522|gb|EDN28714.1| BC1G_01833 [Botryotinia fuckeliana B05.10]
  misc_feature (2)..(344): NCBI GI: 156040431 Blast Desc: SS1G_12232 [Sclerotinia sclerotiorum 1980] gi|154696288|gb|EDN96026.1| SS1G_12232 [Sclerotinia sclerotiorum 1980]
  misc_feature (10)..(341): NCBI GI: 189191174 Blast Desc: short chain dehydrogenase/reductase [Pyrenophora tritici-repentis Pt-1C-BFP] gi|187973532|gb|EDU41031.1| short chain dehydrogenase/reductase [Pyrenophora tritici-repentis
  misc_feature (6)..(345): NCBI GI: 212526904 Blast Desc: short-chain dehydrogenase/reductase family protein, [Penicillium marneffei ATCC 18224] gi|210073007|gb|EEA27094.1| short-chain dehydrogenase/reductase family protein, [Penicillium
  misc_feature (135)..(345): SWISSPROT Homolog: EC 1.1.1.105 Retinol dehydrogenase
MNQPRPAMRDSWFAPLSVDLFIKVLNVTILHPFVAWIIPLCFRAEAREWDAPPMVVSIAWATLVTLGWMANVISHKIAYGLHREVDLTEEVIVITGGTSGLGLLIAEVYGMRGATVAVLDTKPLEHTEARGITYYQCDVTDRAQIARVASDIERELGTPTVLINNAAIVVGKKLLDMSIDEVDKSLRTNLLSHFYTIKTFLPGMINNETGGTIVTLSSVIGHIGAAQLSDYAVAKAGVTALHKSLAAELAPYPEIKTVLVTPGQLSTPLFQGVRTPNPFIAPVVEPIEVAKEVIKAIDQGLSSHIAMPMYARWIDWYNVLPVGIQTIARKISGVDSSMSSFVGRRATELSEKNGSLI

SEQ ID NO: 39359 - DNA, 2475 bp, Muscodor strobelii
  misc_feature: SGI EST ID NO. CUFF.94744.0
  misc_feature: Variant of the nucleotide sequence at SEQ ID NO 39357
cgttcattgggtattcaaaattccttggataggcgaattcctcacgattagtagtcgaaggtgaaatgctgccaacacttcaaacgtcacatgggttggcaagacacagccttaatgactcaatctatggcgacagactccacccgttacgtataacagagtaggcgcatacaagagggcagcaacatgagagttctcaaatagtcatattatcgctttcgactcaatggtacggatactaaatgagcaactgatccttcttccttagatggctgagcgagcaggtaggcctgcttcggcacagccttgttggccgggaatgggttaggttggtgggaagccagcagacgggccgccgcttcaaacacccctgtaggggtgaaacggagaagcccgcgccaacgtgtttcaagcgcctaggaagctcccctcgtcgcaagaaatctgtcatcgagtgcttgaaacaatttgaagctctcatcgatctattgtcccgtgttcatcccaacttcaatcgtcgctctcttccattccagctaataccccaaagcgttgcaggtcaacgtttctttttgtttctttcacgcgtcgtgtgttttcttcatccgcaatcattcagtcaattgcccgcaatgaatcaaccccgccccgcgatgcgcgactcctggttcgcgcctctgtctgtcgacttattcatcaaggtcctgaatgtcacgatactgcacccgttcgtcgcatggatcataccgctctgtttccgcgccgaagctagagagtgggatgccccgccgatggtggtcagcatcgcatgggcgacgcttgtcactctgggatggatggcaaacgtcatcagtcacaagattgcatatggcctgcatagagaagttgacctgaccgaggaggtcatcgtgatcacaggcggcacgagtggattggggttgttgatcgcagaggtgtatggtatgaggggcgcgacggttgctgtcttagacactaaacctctcgagcataccgaggcgcgcggcattacctactatcagtgcgatgtgacggacagggcacagatcgcgcgcgttgctagcgacattgaacgagaactcggaacacccacagtcctgattaacaatgccgcaatagtagtcggcaagaagctcctcgatatgtccatagatgaagtcgacaagtccttacgcacgaacctcctctctcacttctacacgatcaagacctttctgccaggcatgatcaacaacgaaacaggcggcaccatcgtgacattatctagcgtgataggacacattggcgcagcgcaactatctgattacgcagtagcgaaggcaggcgtgacagcactgcacaaatcccttgccgccgagctcgcgccctatcccgagatcaagactgtgttagtcacccccggccagctcagtactccgctattccaaggagtgcgaacaccaaatccgttcattgcgcctgttgtcgagccgatagaggtcgcgaaagaggtcatcaaggcaatcgatcagggcctcagtagccatattgctatgccgatgtatgcacgctggattgattggtacaacgtcttgcctgtgggcatacagaccattgcaaggaagatatctggggtggatagcagtatgagttcgttcgttgggaggagagcgacggaattgagcgagaagaatggctccttgatatgatgatcatgtttgcaatgcaggcgttgcgacctagcggtaatgtgtatacccagaagctaaaactatgggacgaatgaagatgttcaactcgccctgctattttgatggcgtgttcggaacgcacttgcctgtccgtatcccgctcctcatatctcgaccacaatgctacaggaataaacgagccgctagagacgcttgacgaaaacgctacaatgcagatggggaatctgcgcaatatgttcattagggggtatgctcctcggccgcataggtgatcttctaggttcgctcaattatcgagcgacatcctcatagatatcatgacatactgaggcgaggcgtggtgatactgcactttggctcattggtcgcttcactgcatagcaatcgcggtcaacaacttcaccggtaggcaacaggcttgatctgagcctttcggtctcaactccagaacatgtccagtcttcgccgacctcggttccagcaaagttgactatgtcgggtgatcatgaaatttcgaccacatggtcaggaaatgaaatcggcttgccctgtgcccgctagatccttgttgagcttatttatcgagagacagccgatgtcgagtcggagtgcgatagggatgagcagaaaggctgtttctcgaagggcacattatacaatatgcaggatcagccactacgcgcaacttccagtgactttactcaaaacgtggatgcatctaagcagtttagacatggatttctcgttactgcgagtgaagatgacg

SEQ ID NO: 39360 - DNA, 1848 bp, Muscodor strobelii
  misc_feature: SGI cDNA ID NO. 573692
  misc_feature: Encodes the peptide sequence at SEQ ID NO 39361
atgtcgttttcaatctatcaagagaagcttgggtggtcacccaaggaactggacgacaaaaatgacactctacacaccccaaaacatcaatttgaatcacgaaaaggcttcacggacataacagaaatccacactgatacgcttactgggactgacgagcaagttatgcttacttctgattactctccgccgccaaatgcgaaaagcgagcaagccatgcgaaaatacgagtcatatactttgttgatgcggagaatcgtgcgcaatgatggaagacagcatttaatagtccgcattgagctttctttgcagtctgagagcttgtgcggcgttctcagggaaattatcggcagcacatttgaaagggtcagcattgcaaccactcctatcacctttatcgagccttattacgagctgttcttccgaagagacgagatcagtcggtacatgaaagatagcagaaaccctgagatcaatcggaaagaagtcaagcttttgcatgataccatgtgtaaacagaaaccacttcaggacgccatcatagagtacagcagactggcctcaaatggaaagatcagtttccagattctgtggaccttgttcccaccgaatgaattgttatgtttgaacggcaggtacttggaagaatgctggctatgtcgcgatatcagttttgataggacaaaactcacatggacgatctatggaattcgacttgattacaatggccaaaatattggcatggcgaggcagacctgcaagatttcattccggagatcggtcggtggggtcttggagatttcacagctccccattattccttttcgctttttaccagcacaagatcaaacaaggatcaaggcacaatttatcaagaggggcaaactgttccgtgagattctagggagcgatttactaggctttgcttgtcaggagtatacgggtcccacgtggatcaatttcgaaaaagaggatgaagagcaactggaagtttctccgaagtcgcatatcaatgagcgagtggttgttgactatcagtcctttcttgatgaggatccacgccaagcacccgaccttatagagagaaaaacgagagtggtccagcccacttacgtagccaagcagaaaagtgtcgctttcacgagatctgacgatgaaatctgcgatgacgcaaaatctttgacagagagtgttcaggatccgagtaaggatcacttcgaggccctgttcgaaaatattcggagtgtgtacaaattcacggacatggatgatctcctccttttgtctcccgcatgtgttcctgcattcggattgaagtcaaaggaatgggtttggctgcttatcgagaagcttaaaccgatacacttcaatgttcgagctttcgagtccctgcagttagatacatcgaccaagactctcgtacaagcactggtgataggcgcccaaagccgtcagactgatcatttcgatgatgtcattcagggcaaagggaaaggactcgtaatgctcttacatggaaatcctggtgttggcaagacattaatggcagaaagtactgcggagctcagagagtcacccttgtatagcgtttcaggcggcgagctaagtaccagtgtcatgagagtcgaacacaagctgaagagagttttcaagctcgccaagcgctggaatgctattgtactgatagatgaagccgatgtcatcatggccaagagaagtaatgtcgaaacagagagaaatgcgatagttgctggtgagatttatctggtcgtttccgtgacgggtccgaaagctgaggagagaaaaatgctaatgctcatgatgtatagtatggttgagaatgattga

SEQ ID NO: 39361 - protein, 615 aa, Muscodor strobelii
  misc_feature: SGI Peptide ID NO. 573692
  misc_feature (501)..(579): Pfam Id: PF00004 Pfam Desc: ATPase family associated with various cellular activities (AAA)
  misc_feature (35)..(584): NCBI GI: 256734914 Blast Desc: NECHADRAFT_32031 [Nectria haematococca mpVI 77-13-4]
  misc_feature (35)..(584): NCBI GI: 85091836 Blast Desc: NCU09187 [Neurospora crassa OR74A] gi|28920495|gb|EAA29861.1| [Neurospora crassa OR74A]
  misc_feature (98)..(584): NCBI GI: 256726603 Blast Desc: NECHADRAFT_39190 [Nectria haematococca mpVI 77-13-4]
  misc_feature (40)..(584): NCBI GI: 159123389 Blast Desc: AAA family ATPase, [Aspergillus fumigatus A1163]
  misc_feature (40)..(584): NCBI GI: 121711781 Blast Desc: AAA family ATPase, [Aspergillus clavatus NRRL 1] gi|119401657|gb|EAW12080.1| AAA family ATPase, [Aspergillus clavatus NRRL 1]
  misc_feature (40)..(584): NCBI GI: 119483180 Blast Desc: AAA family ATPase, [Neosartorya fischeri NRRL 181] gi|119409773|gb|EAW19721.1| AAA family ATPase, [Neosartorya fischeri NRRL 181]
  misc_feature (66)..(584): NCBI GI: 256726505 Blast Desc: NECHADRAFT_39197 [Nectria haematococca mpVI 77-13-4]
  misc_feature (67)..(584): NCBI GI: 119180143 Blast Desc: CIMG_08739 [Coccidioides immitis RS]
  misc_feature (70)..(584): NCBI GI: 145607209 Blast Desc: MGG_04085 [Magnaporthe grisea 70-15] gi|145014809|gb|EDJ99377.1| MGG_04085 [Magnaporthe grisea 70-15]
  misc_feature (70)..(584): NCBI GI: 39940826 Blast Desc: MGG_11021 [Magnaporthe grisea 70-15] gi|145010948|gb|EDJ95604.1| MGG_11021 [Magnaporthe grisea 70-15]
MSFSIYQEKLGWSPKELDDKNDTLHTPKHQFESRKGFTDITEIHTDTLTGTDEQVMLTSDYSPPPNAKSEQAMRKYESYTLLMRRIVRNDGRQHLIVRIELSLQSESLCGVLREIIGSTFERVSIATTPITFIEPYYELFFRRDEISRYMKDSRNPEINRKEVKLLHDTMCKQKPLQDAIIEYSRLASNGKISFQILWTLFPPNELLCLNGRYLEECWLCRDISFDRTKLTWTIYGIRLDYNGQNIGMARQTCKISFRRSVGGVLEISQLPIIPFRFLPAQDQTRIKAQFIKRGKLFREILGSDLLGFACQEYTGPTWINFEKEDEEQLEVSPKSHINERVVVDYQSFLDEDPRQAPDLIERKTRVVQPTYVAKQKSVAFTRSDDEICDDAKSLTESVQDPSKDHFEALFENIRSVYKFTDMDDLLLLSPACVPAFGLKSKEWVWLLIEKLKPIHFNVRAFESLQLDTSTKTLVQALVIGAQSRQTDHFDDVIQGKGKGLVMLLHGNPGVGKTLMAESTAELRESPLYSVSGGELSTSVMRVEHKLKRVFKLAKRWNAIVLIDEADVIMAKRSNVETERNAIVAGEIYLVVSVTGPKAEERKMLMLMMYSMVEND

SEQ ID NO: 39362 - DNA, 173 bp, Muscodor strobelii
  misc_feature: SGI EST ID NO. CUFF.94756.0
  misc_feature: Variant of the nucleotide sequence at SEQ ID NO 39360
gtgataggcgcccaaagccgtcagactgatcatttcgatgatgtcattcagggcaaagggaaaggactcgtaatgctcttacatggaaatcctggtgttggcaagacattaatggcagaaagtactgcggagctcagagagtcacccttgtatagcgtttcaggcggcgagct

SEQ ID NO: 39363 - DNA, 2670 bp, Muscodor strobelii
  misc_feature: SGI cDNA ID NO. 573693
  misc_feature: Encodes the peptide sequence at SEQ ID NO 39364
atgtctaaattcaacagcatgtctatgccatgggacccacgattatttttttcgaaaggagaaaaggagtcacgggcaaacggagaggacagagccacaacgtctaacccgaagctgagagcccaacgtgacaacaaagtcagaatatcagaggaaaatgttttgaaacgagcttgcgactacgagggatattcaaatcgttcattcgacccacatctcaaggttcgaactggactagccaacacattcgacgtcactgcctatgatgtatccgctgaggcccaaaaagagctatacagggtagaaattcatagattgacatcatctttgaccaatggctctccaagaacattccatgggtcgaggcatctccggactgacacgcaagagggttatgaaatcatgagcagcctctgcaatcagatgttcatggctcttcaaatcgtcatacacgacacggagcttctgctccgatcacactgctcggacttacatagcgaaagagccttccgcagtacacggatgaacctaagatatttcacgaaacaagatggcgatgagagtgaggcagaggacaacggacttagcgagagtcaaggcgacaagaatctcctatcttccgcactaaactatgaaggcaacagagaggactattttgaactcgtcaactacgcaacagagattatattcagggtcctgatgaagtgtgcatacggagcggaatggagtgaacgcgtgttggcttgtatagcgaagctctccacaaaagtaaaagtattgtctgctaatgtggaggactgcgcggccatctctcttactcagacaccagctccactgaaacagtcattccccgaaacccagccctcgcagaaaggggaagaacctgatacgggtcgtggagcacctacaggggacataagcgcaatgttacagtctttttcggctcaagagcgctcgattatatcagctagtgagactgaagaatccaagcggcatgtcctggtgcacctctattggctcgacactatgcggacccagtcgtctattcaagtgattttccgagttctgttactttctttgagaggcatgaagagaacgaaagcaacattcactacatcttatgagctatgcgcaatggtatatcacacggggtacgaagattatccgatcatgatatatcaagatctggaccacgaatatcaaggtacttcgagacaggagaatataagcacatcgcagtcggctttcgaggtgctcaactccgcaatacgggatgtgttgtcctctgaagaatcttgtcacccgccgcactcgtctttgggcggtggcagtcgaccaaattccaaaggtcaaagtgacaaagggccattgctgggttctgccgcatcaagtagcacacgaagacataatacagctatcggaacgacgatatcctacagctacaccgacatagatgcaaatggcaatgaacaattgagtggtccgggaacatctctggcgatgcctgtgaccgagattaagccgcaatctcatttgctcagatctatgaatgcggtcctaacggtaattgtgcctttaacagtattagagccggcgataatcgatacgatgacggatttccttgggcttatgattcgaataaaccagtccattgccgaaaatgatgcagagcaaatccacgcatctccagggacaccatttaaagcctctttctgcttgacgacccacgagtacataaattcgtggcgaaagacaccacattcggcgtcatcacaactttcaaaatcattgatgactcgagataaattaatcactgggatggctaatgagttaatacgcaaagggactcttccctttgtggctggcgaactattgccagatcagcaaatgaaggattggcgggaacaacaagagcaatggcaagaggcaatgatgcaagcaaagagaaaaatgaagggatgggtcttcgaagagagtggcgtaagggtgccttgtggcatttatgtctggagtgttctcactgtcgctgcagccctcgttgccgggggtgttgtcgcaggtctaacaatccatacgcgaatcagtggcgtggatccattcaacattgccacgttcacgtgggttgtcgctggttttgttatactcattgcaaagagcactcgtgttgagaattggtcgtggagagattttctgcaccggcgggtactttgccgaagtgtgtctgagcttcattacgtttctggcatcgacaaccaactaatcttggcgaaactcttgcacaatgaatcgaccaatcgcttgaagacgagaggcccttacaattccgtgtttgcgacaagaacagacagtgccgatgggttctccatcgaccgtcctctgagcatccgcacgatgctcctgagtgggctgatcatgatccaggtacagggaccatcgtatggtgaattcctcgtatgtcttgatttgcgcaggggcacggagcgtcgtgctattaccaaccacaacattatggtcgatctggagaaatcgagcaagtatatcgtcagtagaacggttcccgatttcagtcttagcgaatcagggccacagcaaatccccttgagccgcgcgaaccaaccatggggtcggataattggtatctttggtcgaagagactgctactttacttaa

SEQ ID NO: 39364 - protein, 889 aa, Muscodor strobelii
  misc_feature: SGI Peptide ID NO. 573693
  misc_feature (49)..(888): NCBI GI: 256735616 Blast Desc: NECHADRAFT_75649 [Nectria haematococca mpVI 77-13-4]
  misc_feature (33)..(888): NCBI GI: 85091838 Blast Desc: NCU09188 [Neurospora crassa OR74A] gi|28920496|gb|EAA29862.1| [Neurospora crassa OR74A]
  misc_feature (98)..(831): NCBI GI: 238497365 Blast Desc: conserved [Aspergillus flavus NRRL3357] gi|220694798|gb|EED51142.1| conserved [Aspergillus flavus NRRL3357]
  misc_feature (84)..(812): NCBI GI: 258572388 Blast Desc: [Uncinocarpus reesii 1704] gi|237905226|gb|EEP79627.1| [Uncinocarpus reesii 1704]
  misc_feature (379)..(799): NCBI GI: 170940155 Blast Desc: protein product [Podospora anserina]
  misc_feature (84)..(885): NCBI GI: 46113351 Blast Desc: FG02928.1 [Gibberella zeae PH-1]
  misc_feature (68)..(887): NCBI GI: 256726475 Blast Desc: NECHADRAFT_79722 [Nectria haematococca mpVI 77-13-4]
  misc_feature (638)..(888): NCBI GI: 145614692 Blast Desc: MGG_04370 [Magnaporthe grisea 70-15] gi|145021592|gb|EDK05721.1| MGG_04370 [Magnaporthe grisea 70-15]
  misc_feature (630)..(797): NCBI GI: 261355973 Blast Desc: conserved [Verticillium albo-atrum VaMs.102]
  misc_feature (632)..(731): NCBI GI: 46105228 Blast Desc: FG00242.1 [Gibberella zeae PH-1]
MSKFNSMSMPWDPRLFFSKGEKESRANGEDRATTSNPKLRAQRDNKVRISEENVLKRACDYEGYSNRSFDPHLKVRTGLANTFDVTAYDVSAEAQKELYRVEIHRLTSSLTNGSPRTFHGSRHLRTDTQEGYEIMSSLCNQMFMALQIVIHDTELLLRSHCSDLHSERAFRSTRMNLRYFTKQDGDESEAEDNGLSESQGDKNLLSSALNYEGNREDYFELVNYATEIIFRVLMKCAYGAEWSERVLACIAKLSTKVKVLSANVEDCAAISLTQTPAPLKQSFPETQPSQKGEEPDTGRGAPTGDISAMLQSFSAQERSIISASETEESKRHVLVHLYWLDTMRTQSSIQVIFRVLLLSLRGMKRTKATFTTSYELCAMVYHTGYEDYPIMIYQDLDHEYQGTSRQENISTSQSAFEVLNSAIRDVLSSEESCHPPHSSLGGGSRPNSKGQSDKGPLLGSAASSSTRRHNTAIGTTISYSYTDIDANGNEQLSGPGTSLAMPVTEIKPQSHLLRSMNAVLTVIVPLTVLEPAIIDTMTDFLGLMIRINQSIAENDAEQIHASPGTPFKASFCLTTHEYINSWRKTPHSASSQLSKSLMTRDKLITGMANELIRKGTLPFVAGELLPDQQMKDWREQQEQWQEAMMQAKRKMKGWVFEESGVRVPCGIYVWSVLTVAAALVAGGVVAGLTIHTRISGVDPFNIATFTWVVAGFVILIAKSTRVENWSWRDFLHRRVLCRSVSELHYVSGIDNQLILAKLLHNESTNRLKTRGPYNSVFATRTDSADGFSIDRPLSIRTMLLSGLIMIQVQGPSYGEFLVCLDLRRGTERRAITNHNIMVDLEKSSKYIVSRTVPDFSLSESGPQQIPLSRANQPWGRIIGIFGRRDCYFT

SEQ ID NO: 39365 - DNA, 518 bp, Muscodor strobelii
  misc_feature: SGI EST ID NO. CUFF.94779.0
  misc_feature: Variant of the nucleotide sequence at SEQ ID NO 39363
gcaatggcaagaggcaatgatgcaagcaaagagaaaaatgaagggatgggtcttcgaagagagtggcgtaagggtgccttgtggcatttatgtctggagtgttctcactgtcgctgcagccctcgttgccgggggtgttgtcgcaggtctaacaatccatacgcgaatcagtggcgtggatccattcaacattgccacgttcacgtgggttgtcgctggttttgttatactcattgcaaagagcactcgtgttgagaattggtcgtggagagattttctgcaccggcgggtactttgccgaagtgtgtctgagcttcattacgtttctggcatcgacaaccaactaatcttggcgaaactcttgcacaatgaatcgaccaatcgcttgaagacgagaggcccttacaattccgtgtttgcgacaagaacagacagtgccgatgggttctccatcgaccgtcctctgagcatccgcacgatgctcctgagtgggctgatcatgatccaggtacagggac

SEQ ID NO: 39366 - DNA, 936 bp, Muscodor strobelii
  misc_feature: SGI cDNA ID NO. 573694
  misc_feature: Elevated expression when VOC is produced
  misc_feature: Encodes the peptide sequence at SEQ ID NO 39367
atgtctgccattctccctcccgttgagaagcttcctcttgctctccgcaagagtgtgagagatgactgggatgctaagaaggaagatgtcgagaagaagctctctgagatactggagactccttggactatatccgtaaaccctaaccaaattttcgcatacgccaagtcagattatcccaaacagaatctgggtaactgcattcacgaatactttgatggcagcactcgccgtctccaagaatacgtagacaaatacggcgaggagggcgtgaaagagctgaacactattgcccatgcccatgtcatgacactagatgtcgatgatggcaagcgcttcagctactctggtgcggacattcaggatggccagattcgtcttctcttccaccctgaatgcctcggctccaacatctcatctgccctgagcatggagtacctcctggacgcactcaacaaggctgaggaccccgagacgagaccaattagctttgctgcccggctcagtatccgagagggatacgatcgcaagatcaaagaggtcgaagacaagatcacggagctgttgggcaagccccttactcttgtgcccaacttcgaatccaattttgctgctttgaaggaggaaagccagaagaagaagacagatcttcgaaaagactgggaaagcagctttggccaggctattcgcgactacttctacggtctctctcgccagctcgagtggcagaagttcgaggacgatgagcttctacaggaaggtcttttcgaaatcgtcgagaaagctgaagtccaattccgtatcgttgagaagcttaaggagcgcagctacaacgaggttgtgattgaggatggtgttctctacattcagacaactccttcgaagtggtggtccaactcgaacgatgcagcggagggacttgtaaacatgctctag

SEQ ID NO: 39367 - protein, 311 aa, Muscodor strobelii
  misc_feature: SGI Peptide ID NO. 573694
  misc_feature (3)..(311): NCBI GI: 116181164 Blast Desc: CHGG_01210 [Chaetomium globosum CBS 148.51] gi|88185507|gb|EAQ92975.1| CHGG_01210 [Chaetomium globosum CBS 148.51]
  misc_feature (3)..(311): NCBI GI: 171695748 Blast Desc: protein product [Podospora anserina] gi|170948116|emb|CAP60280.1| protein product [Podospora anserina]
  misc_feature (5)..(311): NCBI GI: 261357729 Blast Desc: conserved [Verticillium albo-atrum VaMs.102]
  misc_feature (3)..(311): NCBI GI: 46116502 Blast Desc: FG04093.1 [Gibberella zeae PH-1]
  misc_feature (3)..(311): NCBI GI: 256725720 Blast Desc: NECHADRAFT_81729 [Nectria haematococca mpVI 77-13-4]
  misc_feature (5)..(296): NCBI GI: 256722644 Blast Desc: NECHADRAFT_85382 [Nectria haematococca mpVI 77-13-4]
  misc_feature (7)..(207): NCBI GI: 238593611 Blast Desc: MPER_07055 [Moniliophthora perniciosa FA553] gi|215460438|gb|EEB94175.1| MPER_07055 [Moniliophthora perniciosa FA553]
  misc_feature (11)..(182): NCBI GI: 66806355 Blast Desc: DDB_G0288091 [Dictyostelium discoideum AX4] gi|60465298|gb|EAL63390.1| DDB_G0288091 [Dictyostelium discoideum AX4]
  misc_feature: Useful for introducing or modulating the production of volatile compounds
MSAILPPVEKLPLALRKSVRDDWDAKKEDVEKKLSEILETPWTISVNPNQIFAYAKSDYPKQNLGNCIHEYFDGSTRRLQEYVDKYGEEGVKELNTIAHAHVMTLDVDDGKRFSYSGADIQDGQIRLLFHPECLGSNISSALSMEYLLDALNKAEDPETRPISFAARLSIREGYDRKIKEVEDKITELLGKPLTLVPNFESNFAALKEESQKKKTDLRKDWESSFGQAIRDYFYGLSRQLEWQKFEDDELLQEGLFEIVEKAEVQFRIVEKLKERSYNEVVIEDGVLYIQTTPSKWWSNSNDAAEGLVNML

SEQ ID NO: 39368 - DNA, 2008 bp, Muscodor strobelii
  misc_feature: SGI EST ID NO. CUFF.94788.0
  misc_feature: Variant of the nucleotide sequence at SEQ ID NO 39366
cccaaccccacgcctagcgccgagccatcctatcagaccatcttagggctgaagccaaggttgactcgatcaacatgcaccaatcgcagtaccatttcaaccaccgtgtgcacctatgtagcgacggcagagtttgaatctgcgctggataaaagccatatcaccttcggaaattgtgttactatatgcgtctctcgagtcgtctgatgagcgagatgtgttgatacgaaaggtagccgacaggatggatgcaggcatcaccggtgtgccacgaatcagtatggtgcactttagctccgaaagagatagcgtgcagtcttgaacgcatgaggaaaggctgaggattgacaacctctcaagcagcgatcgtctgcggccgcgaggaacgggtaggttctcgtccagtcctacgcagggatgggcaaaggagactggcctcgctgctttgcaaacgtgtatataaactcatcgaaatcttgaaagatgcactttcgaccttcttgctcaacaaccacatcctctctttcagcatttacatacactatctttttacaactccatcacctacatcgggaccatgtctgccattctccctcccgttgagaagcttcctcttgctctccgcaagagtgtgagagatgactgggatgctaagaaggaagatgtcgagaagaagctctctgagatactggagactccttggactatatccgtaaaccctaaccaaattttcgcatacgccaagtcagattatcccaaacagaatctgggtaactgcattcacgaatactttgatggcagcactcgccgtctccaagaatacgtagacaaatacggcgaggagggcgtgaaagagctgaacactattgcccatgcccatgtcatgacactagatgtcgatgatggcaagcgcttcagctactctggtgcggacattcaggatggccagattcgtcttctcttccaccctgaatgcctcggctccaacatctcatctgccctgagcatggagtacctcctggacgcactcaacaaggctgaggaccccgagacgagaccaattagctttgctgcccggctcagtatccgagagggatacgatcgcaagatcaaagaggtcgaagacaagatcacggagctgttgggcaagccccttactcttgtgcccaacttcgaatccaattttgctgctttgaaggaggaaagccagaagaagaagacagatcttcgaaaagactgggaaagcagctttggccaggctattcgcgactacttctacggtctctctcgccagctcgagtggcagaagttcgaggacgatgagcttctacaggaaggtcttttcgaaatcgtcgagaaagctgaagtccaattccgtatcgttgagaagcttaaggagcgcagctacaacgaggttgtgattgaggatggtgttctctacattcagacaactccttcgaagtggtggtccaactcgaacgatgcagcggagggacttgtaaacatgctctagtctcaaaaaggacaaagtcgattcgggacgttcagtacagtctataaacatacatgtatacatatagtcagtttgaaaatctaaaatggaatcaatcgctctacaatcaagctgtctgtctccatgcgcctgttatactcttggctgagggttggcggcgtggaaaataatatcagtatttaattcctacccacaagactcatggcgctgctatacgactctgccatggatatttaacatacaatcaaatgcaggctgaactacaatcgatcatcgacccctcttcatcactctctttcctgaataactactagattatatcggcccccaggtatggaaatcatgaatgtcaccaccctgcaatatcaatggtttcatcttcgcctccctttccacatcttcactgaccttcccgcttccaatcccactcttcacactcgaatacggatcataagccgtactctgtctccaaaacggaatctcttcacttcttcc

SEQ ID NO: 39369 - DNA, 1002 bp, Muscodor strobelii
  misc_feature: SGI cDNA ID NO. 573695
  misc_feature: Encodes the peptide sequence at SEQ ID NO 39370
atgtcaacagctcgcgacgttgtcgcattgacggaactctgcttcttcggcatttccctcgtaactacaatcgcagtaatagcgaaatatgtccgcgcaaagaataagacttggcttcccgcctgtgtgcctttgataatactaagcggtgtccggatagccggagcgatactagagcttcgatcaaagagtccgaatggacacgaactcctagcaatttcggcaatactggacgacatagcgatcggaccattgctcttggccgtcgctggagctttacttcgtgtcaacaatcccctcccttggggaatacctttcctcacgttcgtacccctccaaatcctcataatagttggggcagtcatcacagcacttgggaacaagaccatactcgccgcctccgcctctgctcttcgagctaccggtaaaaccccaccagaagatccgacgggtggagcactagcgagaagtggcatcgtcgtcttcgtcatcctcttcacagcgttgttcgtactgtcattgatatcgtatcaaaagacgaaagaaacagacacctacccctgtgagcgtgaccttgcagtgtgcgtgttgctctcggccccgcagatctttgaaaaattggcatggagcttcgtgtctgcgttttggagcatgaacccgcttttctcgcaagtgaatcccgacgcaggcgatgtctggctgcactttgcgatggcggtgattccggagatgataatcaccggtgcgatattgggcactgcacttgttgggaagacgacgagactgggaagctacaagacagttcgtggtggcaatcagtatggaagaagtgaagagattccgttttggagacagagtacggcttatgatccgtattcgagtgtgaagagtgggattggaagcgggaaggtcagtgaagatgtggaaagggaggcgaagatgaaaccattgatattgcagggtggtgacattcatgatttccatacctgggggccgatataa

SEQ ID NO: 39370 - protein, 333 aa, Muscodor strobelii
  misc_feature: SGI Peptide ID NO. 573695
  misc_feature (1)..(258): NCBI GI: 119501487 Blast Desc: NFIA_044220 [Neosartorya fischeri NRRL 181] gi|119415666|gb|EAW25603.1| conserved [Neosartorya fischeri NRRL 181]
  misc_feature (1)..(278): NCBI GI: 67904444 Blast Desc: AN9209.2 [Aspergillus nidulans FGSC A4] gi|40742310|gb|EAA61500.1| AN9209.2 [Aspergillus nidulans FGSC A4] gi|259485361|tpe|CBF82320.1| TPA: conserved [Aspergillus FGSC
  misc_feature (1)..(258): NCBI GI: 115401958 Blast Desc: conserved [Aspergillus terreus NIH2624] gi|114190508|gb|EAU32208.1| conserved [Aspergillus terreus NIH2624]
  misc_feature (5)..(261): NCBI GI: 170085403 Blast Desc: [Laccaria bicolor S238N-H82] gi|164651477|gb|EDR15717.1| [Laccaria bicolor S238N-H82]
  misc_feature (14)..(267): NCBI GI: 238841039 Blast Desc: conserved [Microsporum canis CBS 113480]
  misc_feature (4)..(248): NCBI GI: 169612650 Blast Desc: SNOG_09449 [Phaeosphaeria nodorum SN15] gi|160702556|gb|EAT82714.2| SNOG_09449 [Phaeosphaeria nodorum SN15]
  misc_feature (45)..(273): NCBI GI: 145251876 Blast Desc: An16g01380 [Aspergillus niger] gi|134082992|emb|CAK42755.1| protein product [Aspergillus niger]
  misc_feature (5)..(246): NCBI GI: 121714154 Blast Desc: conserved [Aspergillus clavatus NRRL 1] gi|119402841|gb|EAW13262.1| conserved [Aspergillus clavatus NRRL 1]
  misc_feature (8)..(252): NCBI GI: 242789954 Blast Desc: conserved [Talaromyces stipitatus ATCC 10500] gi|218718056|gb|EED17476.1| conserved [Talaromyces stipitatus ATCC 10500]
MSTARDVVALTELCFFGISLVTTIAVIAKYVRAKNKTWLPACVPLIILSGVRIAGAILELRSKSPNGHELLAISAILDDIAIGPLLLAVAGALLRVNNPLPWGIPFLTFVPLQILIIVGAVITALGNKTILAASASALRATGKTPPEDPTGGALARSGIVVFVILFTALFVLSLISYQKTKETDTYPCERDLAVCVLLSAPQIFEKLAWSFVSAFWSMNPLFSQVNPDAGDVWLHFAMAVIPEMIITGAILGTALVGKTTRLGSYKTVRGGNQYGRSEEIPFWRQSTAYDPYSSVKSGIGSGKVSEDVEREAKMKPLILQGGDIHDFHTWGPI

SEQ ID NO: 39371 - DNA, 2367 bp, Muscodor strobelii
  misc_feature: SGI cDNA ID NO. 573698
  misc_feature: Encodes the peptide sequence at SEQ ID NO 39372
atggcttcattgcgcttgacgattgagaatggtcagttctgtgacaagtacgggagacatgtcgtgctgaggggtatcaatgtcgccggcgacgcgaagctcccaagtcagcccgatgtgccgtcccacgtctctgacagctttttcgatggcgacagcgtcaagttccacagccggcctttccgcaaagaagatgcccacatccacttcacccgcttaaaacgcttcggctacaacaccattcgctatgtcttcacctgggaggccatcgaggctgcggggcccggcaagtacgacgaggagtggattcagcacacaatcgacgtgctgagggtggccaaggactacggcttctatatcttcatggacccccatcaggatgtgtggtccagatactgcggaggttctggcgcgcccatgtggaccatctatgcatgcggcctcaacccccagagcttcgctgccaccgaagctgccattgtccacaacacttaccccgaccccgagaagttccccaagatgatctggtcgacgaactactaccgcctggccgcggccaccatttttaccctcttcttcgccggtcgagacttcgcccccaaatgcatcatcaacggcatgaacatacaagattacctgcaggggcatttcatgggagcttgcgcgcatctggccaagaggatccacgaagccggtgatatcgagaacgaggtcgtctttggctgggagagtctgaatgaacccaaccgaggcatggttgggcatgtcgatctcggggtcgttcccaaggaacagcagctcaaaaagggtacatgtccaactttttggcagtgtatgctgaccggatcggggcgcgcaatcgaggtcgatacctgggacataggaggtctcggtgcctacaaagtcggacgtgctctaatcgacccgcggggagaaaaagcctggctgcctcccgactacgatgacagcaggtatggctggaaacgtgaccccgactggaagatgggagagtgtatctgggcccagcatggagtctgggaccaatctcaagatctactgctccagaagaattattttgagaaacatcccaagacaggcgagaccttgaactacgaaaagttcaccaacacttactttctagatttttaccggtactacagggacacaatcaggggtatatacagagacgcaatcatgctgtgtcagcctcctactctcgagatccctcccactgtaaagggtacggcagacgatgatcccatgatggtctacgcgccacactactatgatggcatcacacttatgaccaagaagtggaaccgcacttggaacgttgatgtctttggtgtccttcgcggcagatacctccatccggcattcgccatcaagatcggcgagacagcgatccgcaactcattcagagaccaattggcagcgatcaggaaggagggccacgactatatgggcaaccatccgtgtatcctgactgagttcggtattccctatgatatggacgataagtacgcgtacaaaacgggcaactactcgagtcaatctgccgccatggatgccaaccactttgccgtggaaggcgccgggatggaggggtatactctgtggttatactcagctactgtaagctacgcaatattatcctacattgttttcatgacacttacttttcttcagaatgaccaccagaggggtgatcaatggaacggggaggacctgtcgatctactccgccgatgaccaaactctgcccgtctcgccaattccccgtacggtcgaaatgtctggcccatcaagtaatttcgcaaccagcgataatgccgctagcaggaaggaagtagacgacgacattgcagtgacacctgacaatctgaagcgcacacttacaaatccctccatatcctccaaagcaccctcaatcgccccagaactaacaaacgcaccgggataccgtgcggctgaggcatatgtacgacccgctcccatcgtcacgaacggcaacatcatcaaatacggcttcgatctcaaaaactgtcaatttaatttagaacttgagggcaccaagcagaccaccgatgcgctagagacagtagtgtttctaccagaattccacttccccaaagagcaatgcaccgttgctgtgtcatcaggaacctgggagatcagtaccgatgatgacgaaagggcatggatacagaagatacgatggagacacggggagggcaaacaaattctgaaagttaccggaatagtgaggccgagagctgcactgacaggcacaagggaggaggagggctacctggatcaatgtcaacaggcttatggtgttgatctgaagagttgtcaggttatgtag

SEQ ID NO: 39372 - protein, 788 aa, Muscodor strobelii
  misc_feature: SGI Peptide ID NO. 573698
  misc_feature (77)..(127): Pfam Id: PF00150 Pfam Desc: Cellulase (glycosyl hydrolase family 5)
  misc_feature (1)..(788): NCBI GI: 145252020 Blast Desc: An16g02100 [Aspergillus niger] gi|134083066|emb|CAL00434.1| protein product [Aspergillus niger]
  misc_feature (1)..(788): NCBI GI: 212546465 Blast Desc: glycosyl hydrolase, [Penicillium marneffei ATCC 18224] gi|210064906|gb|EEA19001.1| glycosyl hydrolase, [Penicillium marneffei ATCC 18224]
  misc_feature (1)..(788): NCBI GI: 238484603 Blast Desc: glycosyl hydrolase, [Aspergillus flavus NRRL3357] gi|220701590|gb|EED57928.1| glycosyl hydrolase, [Aspergillus flavus NRRL3357]
  misc_feature (1)..(788): NCBI GI: 169767690 Blast Desc: [Aspergillus oryzae RIB40] gi|83766171|dbj|BAE56314.1| protein product [Aspergillus oryzae]
  misc_feature (1)..(788): NCBI GI: 242823256 Blast Desc: glycosyl hydrolase, [Talaromyces stipitatus ATCC 10500] gi|218712967|gb|EED12392.1| glycosyl hydrolase, [Talaromyces stipitatus ATCC 10500]
  misc_feature (1)..(788): NCBI GI: 71000034 Blast Desc: glycosyl hydrolase [Aspergillus fumigatus Af293] gi|66852371|gb|EAL92696.1| glycosyl hydrolase, [Aspergillus fumigatus Af293] gi|159127742|gb|EDP52857.1| glycosyl hydrolase,
  misc_feature (4)..(788): NCBI GI: 115384820 Blast Desc: conserved [Aspergillus terreus NIH2624] gi|114196649|gb|EAU38349.1| conserved [Aspergillus terreus NIH2624]
  misc_feature (1)..(775): NCBI GI: 67525111 Blast Desc: AN3013.2 [Aspergillus nidulans FGSC A4] gi|40744408|gb|EAA63584.1| AN3013.2 [Aspergillus nidulans FGSC A4] gi|259486040|tpe|CBF83566.1| TPA: glycosyl hydrolase, FGSC
  misc_feature (1)..(777): NCBI GI: 119492238 Blast Desc: glycosyl hydrolase, [Neosartorya fischeri NRRL 181] gi|119411718|gb|EAW21661.1| glycosyl hydrolase, [Neosartorya fischeri NRRL 181]
  misc_feature (1)..(788): NCBI GI: 225681001 Blast Desc: glycosyl hydrolase [Paracoccidioides brasiliensis Pb03]
MASLRLTIENGQFCDKYGRHVVLRGINVAGDAKLPSQPDVPSHVSDSFFDGDSVKFHSRPFRKEDAHIHFTRLKRFGYNTIRYVFTWEAIEAAGPGKYDEEWIQHTIDVLRVAKDYGFYIFMDPHQDVWSRYCGGSGAPMWTIYACGLNPQSFAATEAAIVHNTYPDPEKFPKMIWSTNYYRLAAATIFTLFFAGRDFAPKCIINGMNIQDYLQGHFMGACAHLAKRIHEAGDIENEVVFGWESLNEPNRGMVGHVDLGVVPKEQQLKKGTCPTFWQCMLTGSGRAIEVDTWDIGGLGAYKVGRALIDPRGEKAWLPPDYDDSRYGWKRDPDWKMGECIWAQHGVWDQSQDLLLQKNYFEKHPKTGETLNYEKFTNTYFLDFYRYYRDTIRGIYRDAIMLCQPPTLEIPPTVKGTADDDPMMVYAPHYYDGITLMTKKWNRTWNVDVFGVLRGRYLHPAFAIKIGETAIRNSFRDQLAAIRKEGHDYMGNHPCILTEFGIPYDMDDKYAYKTGNYSSQSAAMDANHFAVEGAGMEGYTLWLYSATVSYAILSYIVFMTLTFLQNDHQRGDQWNGEDLSIYSADDQTLPVSPIPRTVEMSGPSSNFATSDNAASRKEVDDDIAVTPDNLKRTLTNPSISSKAPSIAPELTNAPGYRAAEAYVRPAPIVTNGNIIKYGFDLKNCQFNLELEGTKQTTDALETVVFLPEFHFPKEQCTVAVSSGTWEISTDDDERAWIQKIRWRHGEGKQILKVTGIVRPRAALTGTREEEGYLDQCQQAYGVDLKSCQVM

SEQ ID NO: 39373 - DNA, 3132 bp, Muscodor strobelii
  misc_feature: SGI EST ID NO. CUFF.94800.0
  misc_feature: Variant of the nucleotide sequence at SEQ ID NO 39371
cgggtggggaaggatactgaattaagctggatttggaatggtattctgacttgtgcacgcatccaacagatctcgggatcatctacttctatcatccgggctcacatgcacgcctgatctgcctctccaactcctagaagcaatgctctcctcctcgacacctcatcttcatcttctcatatgccgagtacaagtttgtaacatttgtattttcagcttctcctcagcctcaggtaataccccgtcgcaacgagtcagatagtttgtcactcccgtcgttacacgcagttccagcagctcgaagctcacatccgctctcgcatcggttgcccccaacgtcatcgtcccgtcgctggcattctatcacatatgcactgtccattccaccctccctcatcccattgccaagctattgattttcaactcatggcctcgtagcttactactgctgctcattttgtttcgtcgtacatactgaattatatacaccttggtcttttgtcgataatcactgtccattcgattcgaaacaagtgcctcgtgaaactgtctcatttccttggtgagccgcatcggctagagacacgcgtagtaatcgggcggactcgactaccgcctcctcatcgttgcccgttctagccatggcttcattgcgcttgacgattgagaatggtcagttctgtgacaagtacgggagacatgtcgtgctgaggggtatcaatgtcgccggcgacgcgaagctcccaagtcagcccgatgtgccgtcccacgtctctgacagctttttcgatggcgacagcgtcaagttccacagccggcctttccgcaaagaagatgcccacatccacttcacccgcttaaaacgcttcggctacaacaccattcgctatgtcttcacctgggaggccatcgaggctgcggggcccggcaagtacgacgaggagtggattcagcacacaatcgacgtgctgagggtggccaaggactacggcttctatatcttcatggacccccatcaggatgtgtggtccagatactgcggaggttctggcgcgcccatgtggaccatctatgcatgcggcctcaacccccagagcttcgctgccaccgaagctgccattgtccacaacacttaccccgaccccgagaagttccccaagatgatctggtcgacgaactactaccgcctggccgcggccaccatttttaccctcttcttcgccggtcgagacttcgcccccaaatgcatcatcaacggcatgaacatacaagattacctgcaggggcatttcatgggagcttgcgcgcatctggccaagaggatccacgaagccggtgatatcgagaacgaggtcgtctttggctgggagagtctgaatgaacccaaccgaggcatggttgggcatgtcgatctcggggtcgttcccaaggaacagcagctcaaaaagggtacatgtccaactttttggcagtgtatgctgaccggatcggggcgcgcaatcgaggtcgatacctgggacataggaggtctcggtgcctacaaagtcggacgtgctctaatcgacccgcggggagaaaaagcctggctgcctcccgactacgatgacagcaggtatggctggaaacgtgaccccgactggaagatgggagagtgtatctgggcccagcatggagtctgggaccaatctcaagatctactgctccagaagaattattttgagaaacatcccaagacaggcgagaccttgaactacgaaaagttcaccaacacttactttctagatttttaccggtactacagggacacaatcaggggtatatacagagacgcaatcatgctgtgtcagcctcctactctcgagatccctcccactgtaaagggtacggcagacgatgatcccatgatggtctacgcgccacactactatgatggcatcacacttatgaccaagaagtggaaccgcacttggaacgttgatgtctttggtgtccttcgcggcagatacctccatccggcattcgccatcaagatcggcgagacagcgatccgcaactcattcagagaccaattggcagcgatcaggaaggagggccacgactatatgggcaaccatccgtgtatcctgactgagttcggtattccctatgatatggacgataagtacgcgtacaaaacgggcaactactcgagtcaatctgccgccatggatgccaaccactttgccgtggaaggcgccgggatggaggggtatactctgtggttatactcagctactaatgaccaccagaggggtgatcaatggaacggggaggacctgtcgatctactccgccgatgaccaaactctgcccgtctcgccaattccccgtacggtcgaaatgtctggcccatcaagtaatttcgcaaccagcgataatgccgctagcaggaaggaagtagacgacgacattgcagtgacacctgacaatctgaagcgcacacttacaaatccctccatatcctccaaagcaccctcaatcgccccagaactaacaaacgcaccgggataccgtgcggctgaggcatatgtacgacccgctcccatcgtcacgaacggcaacatcatcaaatacggcttcgatctcaaaaactgtcaatttaatttagaacttgagggcaccaagcagaccaccgatgcgctagagacagtagtgtttctaccagaattccacttccccaaagagcaatgcaccgttgctgtgtcatcaggaacctgggagatcagtaccgatgatgacgaaagggcatggatacagaagatacgatggagacacggggagggcaaacaaattctgaaagttaccggaatagtgaggccgagagctgcactgacaggcacaagggaggaggagggctacctggatcaatgtcaacaggcttatggtgttgatctgaagagttgtcaggttatgtagagggctgttttacatcttggagttatggtctttcagcggggatataatatggtgcatgtttttaggcattcaaatccgtaccattcaggtgtaatgcataaatggagtttaagccaccatcagtacacatggctataaggaagccatgttcatttcccgtcgtaagagaagctcgtcg

SEQ ID NO: 39374 - DNA, 2313 bp, Muscodor strobelii
  misc_feature: SGI cDNA ID NO. 573699
  misc_feature: Encodes the peptide sequence at SEQ ID NO 39375
atggcttcattgcgcttgacgattgagaatggtcagttctgtgacaagtacgggagacatgtcgtgctgaggggtatcaatgtcgccggcgacgcgaagctcccaagtcagcccgatgtgccgtcccacgtctctgacagctttttcgatggcgacagcgtcaagttccacagccggcctttccgcaaagaagatgcccacatccacttcacccgcttaaaacgcttcggctacaacaccattcgctatgtcttcacctgggaggccatcgaggctgcggggcccggcaagtacgacgaggagtggattcagcacacaatcgacgtgctgagggtggccaaggactacggcttctatatcttcatggacccccatcaggatgtgtggtccagatactgcggaggttctggcgcgcccatgtggaccatctatgcatgcggcctcaacccccagagcttcgctgccaccgaagctgccattgtccacaacacttaccccgaccccgagaagttccccaagatgatctggtcgacgaactactaccgcctggccgcggccaccatttttaccctcttcttcgccggtcgagacttcgcccccaaatgcatcatcaacggcatgaacatacaagattacctgcaggggcatttcatgggagcttgcgcgcatctggccaagaggatccacgaagccggtgatatcgagaacgaggtcgtctttggctgggagagtctgaatgaacccaaccgaggcatggttgggcatgtcgatctcggggtcgttcccaaggaacagcagctcaaaaagggtacatgtccaactttttggcagtgtatgctgaccggatcggggcgcgcaatcgaggtcgatacctgggacataggaggtctcggtgcctacaaagtcggacgtgctctaatcgacccgcggggagaaaaagcctggctgcctcccgactacgatgacagcaggtatggctggaaacgtgaccccgactggaagatgggagagtgtatctgggcccagcatggagtctgggaccaatctcaagatctactgctccagaagaattattttgagaaacatcccaagacaggcgagaccttgaactacgaaaagttcaccaacacttactttctagatttttaccggtactacagggacacaatcaggggtatatacagagacgcaatcatgctgtgtcagcctcctactctcgagatccctcccactgtaaagggtacggcagacgatgatcccatgatggtctacgcgccacactactatgatggcatcacacttatgaccaagaagtggaaccgcacttggaacgttgatgtctttggtgtccttcgcggcagatacctccatccggcattcgccatcaagatcggcgagacagcgatccgcaactcattcagagaccaattggcagcgatcaggaaggagggccacgactatatgggcaaccatccgtgtatcctgactgagttcggtattccctatgatatggacgataagtacgcgtacaaaacgggcaactactcgagtcaatctgccgccatggatgccaaccactttgccgtggaaggcgccgggatggaggggtatactctgtggttatactcagctactaatgaccaccagaggggtgatcaatggaacggggaggacctgtcgatctactccgccgatgaccaaactctgcccgtctcgccaattccccgtacggtcgaaatgtctggcccatcaagtaatttcgcaaccagcgataatgccgctagcaggaaggaagtagacgacgacattgcagtgacacctgacaatctgaagcgcacacttacaaatccctccatatcctccaaagcaccctcaatcgccccagaactaacaaacgcaccgggataccgtgcggctgaggcatatgtacgacccgctcccatcgtcacgaacggcaacatcatcaaatacggcttcgatctcaaaaactgtcaatttaatttagaacttgagggcaccaagcagaccaccgatgcgctagagacagtagtgtttctaccagaattccacttccccaaagagcaatgcaccgttgctgtgtcatcaggaacctgggagatcagtaccgatgatgacgaaagggcatggatacagaagatacgatggagacacggggagggcaaacaaattctgaaagttaccggaatagtgaggccgagagctgcactgacaggcacaagggaggaggagggctacctggatcaatgtcaacaggcttatggtgttgatctgaagagttgtcaggttatgtag

SEQ ID NO: 39375 - protein, 770 aa, Muscodor strobelii
  misc_feature: SGI Peptide ID NO. 573699
  misc_feature (77)..(127): Pfam Id: PF00150 Pfam Desc: Cellulase (glycosyl hydrolase family 5)
  misc_feature (1)..(770): NCBI GI: 85093191 Blast Desc: NCU02233 [Neurospora crassa OR74A] gi|28921092|gb|EAA30410.1| conserved [Neurospora crassa OR74A]
  misc_feature (2)..(770): NCBI GI: 171679617 Blast Desc: protein product [Podospora anserina] gi|170939434|emb|CAP64662.1| protein product [Podospora anserina]
  misc_feature (1)..(770): NCBI GI: 256732926 Blast Desc: glycoside hydrolase family 5 [Nectria haematococca mpVI 77-13-4]
  misc_feature (1)..(770): NCBI GI: 39973943 Blast Desc: MGG_00882 [Magnaporthe grisea 70-15] gi|145018172|gb|EDK02451.1| MGG_00882 [Magnaporthe grisea 70-15]
  misc_feature (1)..(770): NCBI GI: 46123895 Blast Desc: FG06325.1 [Gibberella zeae PH-1]
  misc_feature (1)..(770): NCBI GI: 169625059 Blast Desc: SNOG_15796 [Phaeosphaeria nodorum SN15] gi|160705594|gb|EAT76891.2| SNOG_15796 [Phaeosphaeria nodorum SN15]
  misc_feature (1)..(770): NCBI GI: 242823247 Blast Desc: glycosyl hydrolase, [Talaromyces stipitatus ATCC 10500] gi|218712966|gb|EED12391.1| glycosyl hydrolase, [Talaromyces stipitatus ATCC 10500]
  misc_feature (1)..(758): NCBI GI: 76786282 Blast Desc: glycosyl hydrolase [Coccidioides posadasii] gi|240107647|gb|EER25826.1| CPC735_042700 [Coccidioides posadasii C735 delta SOWgp]
  misc_feature (1)..(758): NCBI GI: 119177525 Blast Desc: CIMG_07690 [Coccidioides immitis RS]
  misc_feature (1)..(770): NCBI GI: 225562506 Blast Desc: conserved [Ajellomyces capsulatus G186AR]
MASLRLTIENGQFCDKYGRHVVLRGINVAGDAKLPSQPDVPSHVSDSFFDGDSVKFHSRPFRKEDAHIHFTRLKRFGYNTIRYVFTWEAIEAAGPGKYDEEWIQHTIDVLRVAKDYGFYIFMDPHQDVWSRYCGGSGAPMWTIYACGLNPQSFAATEAAIVHNTYPDPEKFPKMIWSTNYYRLAAATIFTLFFAGRDFAPKCIINGMNIQDYLQGHFMGACAHLAKRIHEAGDIENEVVFGWESLNEPNRGMVGHVDLGVVPKEQQLKKGTCPTFWQCMLTGSGRAIEVDTWDIGGLGAYKVGRALIDPRGEKAWLPPDYDDSRYGWKRDPDWKMGECIWAQHGVWDQSQDLLLQKNYFEKHPKTGETLNYEKFTNTYFLDFYRYYRDTIRGIYRDAIMLCQPPTLEIPPTVKGTADDDPMMVYAPHYYDGITLMTKKWNRTWNVDVFGVLRGRYLHPAFAIKIGETAIRNSFRDQLAAIRKEGHDYMGNHPCILTEFGIPYDMDDKYAYKTGNYSSQSAAMDANHFAVEGAGMEGYTLWLYSATNDHQRGDQWNGEDLSIYSADDQTLPVSPIPRTVEMSGPSSNFATSDNAASRKEVDDDIAVTPDNLKRTLTNPSISSKAPSIAPELTNAPGYRAAEAYVRPAPIVTNGNIIKYGFDLKNCQFNLELEGTKQTTDALETVVFLPEFHFPKEQCTVAVSSGTWEISTDDDERAWIQKIRWRHGEGKQILKVTGIVRPRAALTGTREEEGYLDQCQQAYGVDLKSCQVM

SEQ ID NO: 39376 - DNA, 3132 bp, Muscodor strobelii; identical to SEQ ID NO: 39373
  misc_feature: SGI EST ID NO. CUFF.94800.0
  misc_feature: Variant of the nucleotide sequence at SEQ ID NO 39374

SEQ ID NO: 39377 - DNA, 4701 bp, Muscodor strobelii
  misc_feature: SGI cDNA ID NO. 573700
  misc_feature: Reduced expression when VOC is produced
  misc_feature: Encodes the peptide sequence at SEQ ID NO 39378
atgtatcaaaaccagcagagagatccggcgcggccgttccaggtcccgccgccgccgcctctcgctacgcccatccagggtcaactcaacatgacgagcatccctcctccgccgccgcgcgccctcgtcggatcttcgaatccatggcaaggccactggaattccacccgatacgatgggcggtctgcatacggcattcctcctccccccgccggcggccctgctgcatacaacccgagacttcaccaccaggtctctaacaataacctggcgatacccccgccgccgcctcccgccatcgaccattccagcggcacgtaccgaccccccgcgagcgagtcctccgaagcccttgtctcggccacctacatcccgaacggcatggaccaatatggcgaggtgggcatcccgggcttcttccccgccgacgacacgtcttccatctactcgaacatgacttcgtggccgagccagtccagcacgagcaccaccctcaccacgcccgccgacgacaaccgccccgcccaatacctcaacgctttcccccagcccaaacagccctctacgtcgaacgggcctacgctgcaccccgagattccacccgagctggcggcgaaatgggggctcgaccatgtcctgctgtggctggccaacaaccagttctccaaggactggcaggagacgttcaaggtgctgaatatccaaggcgcccatttcctggagctgggaagccagcgtggaggtcgaggcaactttggcatgatgcaccagctggtgtatccaaaactggccgtggtctgcgcaaacagcggcactggctgggatcagcagcagcagagggacgaaggaaagagaatgcgccgactgattcgaagtctggtaaccggcaagcctgtagaaggctcgaagtcttcaacacatggtcgcaaggaatcggtgagtggcgcgcatggccagaacacgagcgctgggacagacgtcgagtcgccgaacacgcccatcaaacccaacagcagctcgggcatgacggtccggaggttctctcagacgagagccgcgactgtgccgataaatggcaccatgtcttccgactcgaatcatcgggctatgctaaagaatatcgacattgagagtagtcgcaaaggtagtcctggcgctaacgaattcggagaacggagacaaagtcccgctggaagtccaagactaccttcgtctctgcctcctccctcgccatctgccagatttgtttctcataagtctcggaacagcacggactcggtttcttcgaatgctgccatctacggctcaggggttccaccggaggcgggacagtacttgcgcaatgcacagactggcggtggatatggcagccggttgtcgcctatggatcccgataatcgctcggctggcggagaacctagctctgcgaaggacaagaagaacatatttggattctttgccaagaaacacaagcacaaagatgacgatcgagattcgcctacgactacgagtccgggcttgatgcggccgaacaatggcttcatcgcagaattgggacccggatctcagaagacatatatcctggtgactctggacggttggaattatcgcatgtgcgatgtcacggcgtgcgactcggcaaaggacttgcggctgagtatctgccagaacatgaatcttcccgaccctgaatcactacagatgtacccaacggaactgggacagggtgtccacgaagagcagcttggcgatgtctgtgtttggcataaccagcgtacaaagggtaatcctatgaagcttttcatcaagtacggcgaaccgagcaatggaaatgccacgataccctcgttattggtgccgggtggagatgccgaggcgtatgcgcgactcaacggccagcgttcgagatcgagctcctcaccacccacgtcgagaaacaacagcacgataccgatatcagacgaacaattagctgcgagggctgaagagcaccgccttaggatggaacagcagcagcaggcttattttgcgcagaggaaccaggcgctcaagcaatcttcacctcagcacacgcctcctcccggagctggtgtcgtgggccgaagtgtcgatttcgatcaccctcgcgggtctccctttgaggagaagaagcaggattctcttcttccgcaaaggaaagcaccagctcctcctggtgtcgagactgccactcttatcaaggcgaactccttgtacaagaagcaaggtcatggtaatcgatcttcgcaaggaagtctgggaagtttggatggcgttcctagtccccgaaggccagctacatcacaagggtcatatgagaacgaaacccaggactcgtctggccgtcggccatgtctttcaccaccagccggctctgctttgggagccttggtgaacattggcagcaattggagtcgcttgggtcgaccttcgcaaggcaaccagcggccagtctcacctagtcgtgtcaactctggcccaccacaggcgaaggcggagcagcaatatgatcaaagaggtaagggagcaatggcaagcgttgattttggtcaagtggcctcaggtcgcagtagtccacggtctggctcacccggcggcatcacttggagtcgcggggatataccattcctcgtgcctgactactcgcctggtggtaccccgatccctcccgatggggctaagccccaacatgaatccgttactaaagtgcgctcaacagcaacacggggagccactgcaggtgatcttagtccaagctcggcccatccttcttcgaactcatccggtctggcctatgcgcagagcgttcgacgcaaatctcacggtcccgatgtcgacttcaccgagacagatgtccagttttccaagatggccgagccgacggggcggagggaagcagattctggagatgactctgatgacggcttatttgcggttcctgttagaggcaggcagccgtctaagaagctcgctctcaaaggcagtgattcagattcgagtggcaaacggcctagtctacgcgtacgaacgtcacggtcacgcaaacaactgtcggtgtcgttcaactcgcctagcgctataactacaccggacgggggagatggagagagtatccgaagcgagcgcagctctcatcatcgtacgcctgcaacgccgaattccgatcaatggcaatccgacgacagcagactgaaccgtcgaaaatcgttcattgaccgcgatgtatgggccaatcgtcccccacccgaagctctattgagcaatctcgacgccttcttccccgaattagatctcgatcaacctgtgttggacgagaatcaactacaagaaccgggatcgcctgtgtctcctattccggaacaggaggagacttcgccacagcccactaatcttaccatcaacatacccacgccgcctgatatccctgacgaggcgaggacattctataatgagagtgatacgcttggatccgatgagtctactctgaaagccctcgaacgtcctgcgtccatcatctctaatgctcggaagagtgtgcgccggtctgctggaggcttgggtcgcatgaagtctatccgagaagtcgctcgtggcgcacacgaagctaacaaacgatacaccagcatgtctagtgccagcggctcacgggcaacctcgatggtacagcgccggaagagtaccaagatgttcggtgccaatgtggtgcaaatccatcctgaaagaggttccattgccatacctgaaataccgcaagatgtgctacctagcatgcccagcatgcccaagcgccagacgactttcagatggttcaagggtgagctcatcggcaagggcacttacggtcgtgtttacctcggcatgaacgccacgacgggtgaattcttggccgtcaaggaagtcgaggtcaatcagaaagcagcaggcggtgacaaaaacaagatgaaagaactcctctcggcactagatcaagaaatcgacacgatgcagaatttggaccacgagaatatcgtgcagtatctaggctgtgagaggaaagagacctctatctctatcttcttggagtatatctctggtggcagtatcggctcttgtctacgcaaacatgggaaattcgaggaacctgttgtgagatcacttacgcggcagacgctgtccggacttgcgtatctgcactcccagggcattctacacagagatctcaaagctgacaacatcctcctcgatctcgacggtacttgcaagatttccgactttggcatcagcaagaagaccgacgatatctacggaaacgataagacaaactctatgcaagggtcggtattctggatggcgcccgaggttattaggtcccagggcgaagggtatagtgccaaagtggatatttggagtttgggctgtgtggtgctggagatgtttgcggggagaagaccctggagtaaggaggaggctgtgggcgcgatctataagattgctaatggggagacgccgcctattagtgatgaggttaggagtgtgattagccccgagggcttggggttcatgttggattgttttactgtggaatcaagtgaacgaccaacggcggccagattactgagggggcatgtgttctgtaagttagatcagagctataatttctatgatacggaactgcatgctaggattcggggcacttttcagtaa

SEQ ID NO: 39378 - protein, 1566 aa, Muscodor strobelii
  misc_feature: SGI Peptide ID NO. 573700
  misc_feature (1275)..(1543): Pfam Id: PF00069 Pfam Desc: Protein kinase domain
  misc_feature (1277)..(1542): Pfam Id: PF07714 Pfam Desc: Protein tyrosine kinase
  misc_feature (1277)..(1484): Pfam Id: PF07714 Pfam Desc: Protein tyrosine kinase
  misc_feature (43)..(1562): NCBI GI: 256732925 Blast Desc: NECHADRAFT_68087 [Nectria haematococca mpVI 77-13-4]
  misc_feature (43)..(1562): NCBI GI: 46123897 Blast Desc: FG06326.1 [Gibberella zeae PH-1]
  misc_feature (112)..(1563): NCBI GI: 171679619 Blast Desc: protein product [Podospora anserina] gi|18699013|gb|AAL77223.1| Bck1-like MAP kinase kinase kinase [Podospora anserina] gi|170939435|emb|CAP64663.1| protein product
  misc_feature (119)..(1565): NCBI GI: 156042372 Blast Desc: SS1G_10983 [Sclerotinia sclerotiorum 1980] gi|154695370|gb|EDN95108.1| SS1G_10983 [Sclerotinia sclerotiorum 1980]
  misc_feature (48)..(1478): NCBI GI: 116203469 Blast Desc: CHGG_09618 [Chaetomium globosum CBS 148.51] gi|88175746|gb|EAQ83214.1| CHGG_09618 [Chaetomium globosum CBS 148.51]
  misc_feature (227)..(1565): NCBI GI: 154300312 Blast Desc: BC1G_11345 [Botryotinia fuckeliana B05.10] gi|150856668|gb|EDN31860.1| BC1G_11345 [Botryotinia fuckeliana B05.10]
  misc_feature (49)..(1561): NCBI GI: 119187481 Blast Desc: CIMG_03788 [Coccidioides immitis RS]
  misc_feature (49)..(1561): NCBI GI: 240108180 Blast Desc: Protein kinase domain containing protein [Coccidioides posadasii C735 delta SOWgp]
  misc_feature (118)..(1562): NCBI GI: 239607356 Blast Desc: MAP kinase kinase kinase [Ajellomyces dermatitidis ER-3]
  misc_feature (133)..(1562): NCBI GI: 238838115 Blast Desc: mitogen activated protein kinase kinase kinase 3 [Microsporum canis CBS 113480]
  misc_feature: Useful for introducing or modulating the production of volatile compounds
MYQNQQRDPARPFQVPPPPPLATPIQGQLNMTSIPPPPPRALVGSSNPWQGHWNSTRYDGRSAYGIPPPPAGGPAAYNPRLHHQVSNNNLAIPPPPPPAIDHSSGTYRPPASESSEALVSATYIPNGMDQYGEVGIPGFFPADDTSSIYSNMTSWPSQSSTSTTLTTPADDNRPAQYLNAFPQPKQPSTSNGPTLHPEIPPELAAKWGLDHVLLWLANNQFSKDWQETFKVLNIQGAHFLELGSQRGGRGNFGMMHQLVYPKLAVVCANSGTGWDQQQQRDEGKRMRRLIRSLVTGKPVEGSKSSTHGRKESVSGAHGQNTSAGTDVESPNTPIKPNSSSGMTVRRFSQTRAATVPINGTMSSDSNHRAMLKNIDIESSRKGSPGANEFGERRQSPAGSPRLPSSLPPPSPSARFVSHKSRNSTDSVSSNAAIYGSGVPPEAGQYLRNAQTGGGYGSRLSPMDPDNRSAGGEPSSAKDKKNIFGFFAKKHKHKDDDRDSPTTTSPGLMRPNNGFIAELGPGSQKTYILVTLDGWNYRMCDVTACDSAKDLRLSICQNMNLPDPESLQMYPTELGQGVHEEQLGDVCVWHNQRTKGNPMKLFIKYGEPSNGNATIPSLLVPGGDAEAYARLNGQRSRSSSSPPTSRNNSTIPISDEQLAARAEEHRLRMEQQQQAYFAQRNQALKQSSPQHTPPPGAGVVGRSVDFDHPRGSPFEEKKQDSLLPQRKAPAPPGVETATLIKANSLYKKQGHGNRSSQGSLGSLDGVPSPRRPATSQGSYENETQDSSGRRPCLSPPAGSALGALVNIGSNWSRLGRPSQGNQRPVSPSRVNSGPPQAKAEQQYDQRGKGAMASVDFGQVASGRSSPRSGSPGGITWSRGDIPFLVPDYSPGGTPIPPDGAKPQHESVTKVRSTATRGATAGDLSPSSAHPSSNSSGLAYAQSVRRKSHGPDVDFTETDVQFSKMAEPTGRREADSGDDSDDGLFAVPVRGRQPSKKLALKGSDSDSSGKRPSLRVRTSRSRKQLSVSFNSPSAITTPDGGDGESIRSERSSHHRTPATPNSDQWQSDDSRLNRRKSFIDRDVWANRPPPEALLSNLDAFFPELDLDQPVLDENQLQEPGSPVSPIPEQEETSPQPTNLTINIPTPPDIPDEARTFYNESDTLGSDESTLKALERPASIISNARKSVRRSAGGLGRMKSIREVARGAHEANKRYTSMSSASGSRATSMVQRRKSTKMFGANVVQIHPERGSIAIPEIPQDVLPSMPSMPKRQTTFRWFKGELIGKGTYGRVYLGMNATTGEFLAVKEVEVNQKAAGGDKNKMKELLSALDQEIDTMQNLDHENIVQYLGCERKETSISIFLEYISGGSIGSCLRKHGKFEEPVVRSLTRQTLSGLAYLHSQGILHRDLKADNILLDLDGTCKISDFGISKKTDDIYGNDKTNSMQGSVFWMAPEVIRSQGEGYSAKVDIWSLGCVVLEMFAGRRPWSKEEAVGAIYKIANGETPPISDEVRSVISPEGLGFMLDCFTVESSERPTAARLLRGHVFCKLDQSYNFYDTELHARIRGTFQ

SEQ ID NO: 39379 - DNA, 6537 bp, Muscodor strobelii
  misc_feature: SGI EST ID NO. CUFF.95434.1
  misc_feature: Variant of the nucleotide sequence at SEQ ID NO 39377
tgcacctccaaatgttggaaagaggaggagcgcctcatctccgtcgctgttttgaatctcaacctcttcgctcaatgtcaggcgcacatgtgaacaaacagccgtggaacaaagaacgacttcatgatacgttatcccatcggcttagccacgtaacaaaggaaaagacgagtagcagcagccaagggaacggatccaaacagccgggctaggctcaagcagtggtgtcgctaagcgcgtagccgcccaagtttttggaggcgcaactagtacgcacacctccgccgccacgggatgtactgctaagccagactctattagagttggaccagtcgcattcacttccaagctgctgtcgcgtctctcttggcgacgagtgtgtctgtgtgagctgtgaaagtgctacgttggacagggcctggcccatcccgctcccgacgatccgacctgtcgtttttttgttggtcgggcacttgtccgtcttgtctccagcacggattatacggcgacaggcgacaacaacaacaacacgagcagctttcttcgtctctgccccatcgtcttgcgtgtttcgcccctcgccttgcactccccagtcttatctgatctggtctgcctctgccctaccgagcgacagatagctattgcctaattctcccgtttggcttcccatacccctgacccaactctggctggccaagctcgctctggtgctgcgcatgccggcgttcagccccatctcgacgacgagactagcccgaccagcagccgcaggggactagcgactaggtttcgaactttagctctctggcaacagcccagctaggctctagctcgagcttgggacaacctgggctgccctatcacccgcatcccatcccgagatcctacctatcccatcctatcccaatcgcatccctcgcatccctccaccgccgggcagccatcctcccccaacccgtttgttttgtcccgctcgcagcgtggccgtcccggagaccaccacagacaacgaccagggatctcgaggatccaggcgacgtcgacactcccgtaccgagaaattgcgagtcatcattgccgatatttgattttttggagcgctcatggtcatgtctggcatcgacccgagtgctgctatcgtgtctaccgccgtttgtcgccatctctagaccatgaaagaagaagagctgaaacaagacaaactggtcagggttcttgacaacaaaagcgacacgggaaacaacattttggagactacacatctaatcaactattgcggcgcatagcacgtcgctcactgtagaccatcgtctgtttttttgtcttgtatcaacagcattttacgacctatgatcggtgtttgacgcagtattgtccgaagcactcagcatctacttgactcccataccgccgatcgaccgaaacgaactcgaatgtcgatgtgattgtcaccgggttaaacattgcgactgcgcctccagcacatacgctgtatgtcgtcttgttgcatcatacataccataacgctcgatagtcaagatgtatcaaaaccagcagagagatccggcgcggccgttccaggtcccgccgccgccgcctctcgctacgcccatccagggtcaactcaacatgacgagcatccctcctccgccgccgcggtatcccatgaacggggtcatggttccaccaccacccggcctcccccgaccagcgccctcgtcggatcttcgaatccatggcaaggccactggaattccacccgatacgatgggcggtctgcatacggcattcctcctccccccgccggcggccctgctgcatacaacccgagacttcaccaccaggtctctaacaataacctggcgatacccccgccgccgcctcccgccatcgaccattccagcggcacgtaccgaccccccgcgagcgagtcctccgaagcccttgtctcggccacctacatcccgaacggcatggaccaatatggcgaggtgggcatcccgggcttcttccccgccgacgacacgtcttccatctactcgaacatgacttcgtggccgagccagtccagcacgagcaccaccctcaccacgcccgccgacgacaaccgccccgcccaatacctcaacgctttcccccagcccaaacagccctctacgtcgaacgggcctacgctgcaccccgagattccacccgagctggcggcgaaatgggggctcgaccatgtcctgctgtggctggccaacaaccagttctccaaggactggcaggagacgttcaaggtgctgaatatccaaggcgcccatttcctggagctgggaagccagcgtggaggtcgaggcaactttggcatgatgcaccagctggtgtatccaaaactggccgtggtctgcgcaaacagcggcactggctgggatcagcagcagcagagggacgaaggaaagagaatgcgccgactgattcgaagtctggtaaccggcaagcctgtagaaggctcgaagtcttcaacacatggtcgcaaggaatcggtgagtggcgcgcatggccagaacacgagcgctgggacagacgtcgagtcgccgaacacgcccatcaaacccaacagcagctcgggcatgacggtccggaggttctctcagacgagagccgcgactgtgccgataaatggcaccatgtcttccgactcgaatcatcgggctatgctaaagaatatcgacattgagagtagtcgcaaaggtagtcctggcgctaacgaattcggagaacggagacaaagtcccgctggaagtccaagactaccttcgtctctgcctcctccctcgccatctgccagatttgtttctcataagtctcggaacagcacggactcggtttcttcgaatgctgccatctacggctcaggggttccaccggaggcgggacagtacttgcgcaatgcacagactggcggtggatatggcagccggttgtcgcctatggatcccgataatcgctcggctggcggagaacctagctctgcgaaggacaagaagaacatatttggattctttgccaagaaacacaagcacaaagatgacgatcgagattcgcctacgactacgagtccgggcttgatgcggccgaacaatggcttcatcgcagaattgggacccggatctcagaagacatatatcctggtgactctggacggttggaattatcgcatgtgcgatgtcacggcgtgcgactcggcaaaggacttgcggctgagtatctgccagaacatgaatcttcccgaccctgaatcactacagatgtacccaacggaactgggacagggtgtccacgaagagcagcttggcgatgtctgtgtttggcataaccagcgtacaaagggtaatcctatgaagcttttcatcaagtacggcgaaccgagcaatggaaatgccacgataccctcgttattggtgccgggtggagatgccgaggcgtatgcgcgactcaacggccagcgttcgagatcgagctcctcaccacccacgtcgagaaacaacagcacgataccgatatcagacgaacaattagctgcgagggctgaagagcaccgccttaggatggaacagcagcagcaggcttattttgcgcagaggaaccaggcgctcaagcaatcttcacctcagcacacgcctcctcccggagctggtgtcgtgggccgaagtgtcgatttcgatcaccctcgcgggtctccctttgaggagaagaagcaggattctcttcttccgcaaaggaaagcaccagctcctcctggtgtcgagactgccactcttatcaaggcgaactccttgtacaagaagcaaggtcatggtaatcgatcttcgcaaggaagtctgggaagtttggatggcgttcctagtccccgaaggccagctacatcacaagggtcatatgagaacgaaacccaggactcgtctggccgtcggccatgtctttcaccaccagccggctctgctttgggagccttggtgaacattggcagcaattggagtcgcttgggtcgaccttcgcaaggcaaccagcggccagtctcacctagtcgtgtcaactctggcccaccacaggcgaaggcggagcagcaatatgatcaaagaggtaagggagcaatggcaagcgttgattttggtcaagtggcctcaggtcgcagtagtccacggtctggctcacccggcggcatcacttggagtcgcggggatataccattcctcgtgcctgactactcgcctggtggtaccccgatccctcccgatggggctaagccccaacatgaatccgttactaaagtgcgctcaacagcaacacggggagccactgcaggtgatcttagtccaagctcggcccatccttcttcgaactcatccggtctggcctatgcgcagagcgttcgacgcaaatctcacggtcccgatgtcgacttcaccgagacagatgtccagttttccaagatggccgagccgacggggcggagggaagcagattctggagatgactctgatgacggcttatttgcggttcctgttagaggcaggcagccgtctaagaagctcgctctcaaaggcagtgattcagattcgagtggcaaacggcctagtctacgcgtacgaacgtcacggtcacgcaaacaactgtcggtgtcgttcaactcgcctagcgctataactacaccggacgggggagatggagagagtatccgaagcgagcgcagctctcatcatcgtacgcctgcaacgccgaattccgatcaatggcaatccgacgacagcagactgaaccgtcgaaaatcgttcattgaccgcgatgtatgggccaatcgtcccccacccgaagctctattgagcaatctcgacgccttcttccccgaattagatctcgatcaacctgtgttggacgagaatcaactacaagaaccgggatcgcctgtgtctcctattccggaacaggaggagacttcgccacagcccactaatcttaccatcaacatacccacgccgcctgatatccctgacgaggcgaggacattctataatgagagtgatacgcttggatccgatgagtctactctgaaagccctcgaacgtcctgcgtccatcatctctaatgctcggaagagtgtgcgccggtctgctggaggcttgggtcgcatgaagtctatccgagaagtcgctcgtggcgcacacgaagctaacaaacgatacaccagcatgtctagtgccagcggctcacgggcaacctcgatggtacagcgccggaagagtaccaagatgttcggtgccaatgtggtgcaaatccatcctgaaagaggttccattgccatacctgaaataccgcaagatgtgctacctagcatgcccagcatgcccaagcgccagacgactttcagatggttcaagggtgagctcatcggcaagggcacttacggtcgtgtttacctcggcatgaacgccacgacgggtgaattcttggccgtcaaggaagtcgaggtcaatcagaaagcagcaggcggtgacaaaaacaagatgaaagaactcctctcggcactagatcaagaaatcgacacgatgcagaatttggaccacgagaatatcgtgcagtatctaggctgtgagaggaaagagacctctatctctatcttcttggagtatatctctggtggcagtatcggctcttgtctacgcaaacatgggaaattcgaggaacctgttgtgagatcacttacgcggcagacgctgtccggacttgcgtatctgcactcccagggcattctacacagagatctcaaagctgacaacatcctcctcgatctcgacggtacttgcaagatttccgactttggcatcagcaagaagaccgacgatatctacggaaacgataagacaaactctatgcaagggtcggtattctggatggcgcccgaggttattaggtcccagggcgaagggtatagtgccaaagtggatatttggagtttgggctgtgtggtgctggagatgtttgcggggagaagaccctggagtaaggaggaggctgtgggcgcgatctataagattgctaatggggagacgccgcctattagtgatgaggttaggagtgtgattagccccgagggcttggggttcatgttggattgttttactgtggaatcaagtgaacgaccaacggcggccagattactgagggggcatgtgttctgtaagttagatcagagctataatttctatgatacggaactgcatgctaggattcggggcacttttcagtaaaggaggaatagcataggcattggtatggatggtgggtaggaagggatggtatcgggctgtagggagtgtgaagatggcggagatggagacttggtgtgagagttttggatatcaatacgaataccccattgtttccatatatatgatgattagtttggctgtgaaaatgctgtgcatgtgatgtgactgtgatgtgactgatgtgtctacttgggttgcgatttgtgggttgtgatgtgga

SEQ ID NO: 39380 - DNA, 1572 bp, Muscodor strobelii
  misc_feature: SGI cDNA ID NO. 573701
  misc_feature: Encodes the peptide sequence at SEQ ID NO 39381
atggaggacgataccaaaccctcaaacgcagtgagtgaagacttaggggatgaccactcgagcaaagcagcgccagtagaaacaaaccgagtccgagtcgaactgacagaagaagatagcaagagaattcgtcggaagacggacaaggtcattctggctatcctagtatgggcctacttcctccagatattggataagacagtattaggctatggcgcattattcggtctgcaggaagacactggccttacagggaatcaatactcgtttctgggttctatcgcgccaattgcgatgttgatttggcagccattttcatcggtgttgatcgtcaaagttccgcaccgcatcctcatgccatctcttgtgcttggatggggcattgcgcaaacggcgatggcagcgtgtcataataatcgtgaactcttggctgcacggttctttttaggattgtttgaagcgggatgtctgccacttttctccgtcatcacctcgcagtggtacaggcgtgcagaacagccgatacgggtcgctgcgtggtatggtacgaatggcttggcgacaatcgtcgcatcggcgttaagctacggcttaggtcatataccctcagaatcattgaaatcatggcagattatcttcctctttgtaggtctggttacgattatcagtgttccattcatatactggaaactggacaatgacatagcatctgctcgcttccttaccgaacatgaaaaagagcaagcaactgaacgcctgcgcgccaatcaaacgggtctcggatcaaaagaattcaagctctcccatgttgtcgagatctgtctagagcccaagacttacctctggattggcatgaccctactggtcaacgtgggcgcagcagtgacgaacacattcggacctttaattttgaatggcctcggttacaataagtacttgacctcattgctcaatatcccatttggcgcactccaacttatagtcattctgctcgcatcatgggcggcgcagaaggctaagatcaagtcaatcacactcgacatcttcatgatcccagtggtcgtcgggcttgttctcctatacgttctcaatagaggctcatcgcagcagggaccactcctcctagggtactacttcctcgcttttctatttggcgcaaacccgttgatcgtctcctggattgtcggtaacactggtggcacaactaagaagtcggtcatgatgtccttgtacagcggctcttctgcagctggaaacattgtcgggcccttgctattttccgcagccgatgctccctcgtatcacaacgggctgcgcagtacgctcgccattttcgtcacgctcatagcagtagtcgctttacaagcgggcaacctttttgttctcaacaaactcaacagaaagagccgaatcagagccggaaagaaggcagacatcaaggatcattctatgagcgaccgttatgtagcagctgatgttgagaatgctgatgatgcagggcatgtagttggacttggcaaagacgcggatctaacggacgccaagaacgatgaatttgtctacatatattag

SEQ ID NO: 39381 - protein, 523 aa, Muscodor strobelii
  misc_feature: SGI Peptide ID NO. 573701
  misc_feature (55)..(423): Pfam Id: PF07690 Pfam Desc: Major Facilitator Superfamily
  misc_feature (18)..(523): NCBI GI: 119473921 Blast Desc: MFS transporter, [Neosartorya fischeri NRRL 181] gi|119406989|gb|EAW16939.1| MFS transporter, [Neosartorya fischeri NRRL 181]
  misc_feature (18)..(523): NCBI GI: 70986002 Blast Desc: MFS transporter [Aspergillus fumigatus Af293] gi|66846133|gb|EAL86466.1| MFS transporter, [Aspergillus fumigatus Af293] gi|159128364|gb|EDP53479.1| MFS transporter,
  misc_feature (31)..(523): NCBI GI: 115436974 Blast Desc: conserved [Aspergillus terreus NIH2624] gi|114188508|gb|EAU30208.1| conserved [Aspergillus terreus NIH2624]
  misc_feature (5)..(523): NCBI GI: 121712248 Blast Desc: MFS transporter, [Aspergillus clavatus NRRL 1] gi|119401891|gb|EAW12313.1| MFS transporter, [Aspergillus clavatus NRRL 1]
  misc_feature (5)..(523): NCBI GI: 255938462 Blast Desc: Pc14g00060 [Penicillium chrysogenum Wisconsin 54-1255] gi|211584622|emb|CAP74147.1| Pc14g00060 [Penicillium chrysogenum Wisconsin 54-1255]
  misc_feature (2)..(523): NCBI GI: 169784482 Blast Desc: [Aspergillus oryzae RIB40] gi|238508366|ref|XP_002385378.1| MFS transporter, [Aspergillus flavus NRRL3357] gi|83775449|dbj|BAE65569.1| protein product MFS
  misc_feature (1)..(523): NCBI GI: 145248509 Blast Desc: An13g03680 [Aspergillus niger] gi|134081258|emb|CAK41764.1| protein product [Aspergillus niger]
  misc_feature (28)..(523): NCBI GI: 258573119 Blast Desc: conserved [Uncinocarpus reesii 1704] gi|237901007|gb|EEP75408.1| conserved [Uncinocarpus reesii 1704]
  misc_feature (24)..(523): NCBI GI: 225560464 Blast Desc: conserved [Ajellomyces capsulatus G186AR]
  misc_feature (29)..(523): NCBI GI: 67526637 Blast Desc: AN3776.2 [Aspergillus nidulans FGSC A4] gi|40740794|gb|EAA59984.1| AN3776.2 [Aspergillus nidulans FGSC A4] gi|259481671|tpe|CBF75409.1| TPA: MFS transporter, nidulans
MEDDTKPSNAVSEDLGDDHSSKAAPVETNRVRVELTEEDSKRIRRKTDKVILAILVWAYFLQILDKTVLGYGALFGLQEDTGLTGNQYSFLGSIAPIAMLIWQPFSSVLIVKVPHRILMPSLVLGWGIAQTAMAACHNNRELLAARFFLGLFEAGCLPLFSVITSQWYRRAEQPIRVAAWYGTNGLATIVASALSYGLGHIPSESLKSWQIIFLFVGLVTIISVPFIYWKLDNDIASARFLTEHEKEQATERLRANQTGLGSKEFKLSHVVEICLEPKTYLWIGMTLLVNVGAAVTNTFGPLILNGLGYNKYLTSLLNIPFGALQLIVILLASWAAQKAKIKSITLDIFMIPVVVGLVLLYVLNRGSSQQGPLLLGYYFLAFLFGANPLIVSWIVGNTGGTTKKSVMMSLYSGSSAAGNIVGPLLFSAADAPSYHNGLRSTLAIFVTLIAVVALQAGNLFVLNKLNRKSRIRAGKKADIKDHSMSDRYVAADVENADDAGHVVGLGKDADLTDAKNDEFVYIY

SEQ ID NO: 39382 - DNA, 2570 bp, Muscodor strobelii
  misc_feature: SGI EST ID NO. CUFF.94807.0
  misc_feature: Variant of the nucleotide sequence at SEQ ID NO 39380
cagcatttcgtcttcgcccataggacacgataatggaggacgataccaaaccctcaaacgcagtgagtgaagacttaggggatgaccactcgagcaaagcagcgccagtagaaacaaaccgagtccgagtcgaactgacagaagaagatagcaagagaattcgtcggaagacggacaaggtcattctggctatcctagtatgggcctacttcctccagatattggataagacagtattaggctatggcgcattattcggtctgcaggaagacactggccttacagggaatcaatactcgtttctgggttctatcgcgccaattgcgatgttgatttggcagccattttcatcggtgttgatcgtcaaagttccgcaccgcatcctcatgccatctcttgtgcttggatggggcattgcgcaaacggcgatggcagcgtgtcataataatcgtgaactcttggctgcacggttctttttaggattgtttgaagcgggatgtctgccacttttctccgtcatcacctcgcagtggtacaggcgtgcagaacagccgatacgggtcgctgcgtggtatggtacgaatggcttggcgacaatcgtcgcatcggcgttaagctacggcttaggtcatataccctcagaatcattgaaatcatggcagattatcttcctctttgtaggtctggttacgattatcagtgttccattcatatactggaaactggacaatgacatagcatctgctcgcttccttaccgaacatgaaaaagagcaagcaactgaacgcctgcgcgccaatcaaacgggtctcggatcaaaagaattcaagctctcccatgttgtcgagatctgtctagagcccaagacttacctctggattggcatgaccctactggtcaacgtgggcgcagcagtgacgaacacattcggacctttaattttgaatggcctcggttacaataagtacttgacctcattgctcaatatcccatttggcgcactccaacttatagtcattctgctcgcatcatgggcggcgcagaaggctaagatcaagtcaatcacactcgacatcttcatgatcccagtggtcgtcgggcttgttctcctatacgttctcaatagaggctcatcgcagcagggaccactcctcctagggtactacttcctcgcttttctatttggcgcaaacccgttgatcgtctcctggattgtcggtaacactggtggcacaactaagaagtcggtcatgatgtccttgtacagcggctcttctgcagctggaaacattgtcgggcccttgctattttccgcagccgatgctccctcgtatcacaacgggctgcgcagtacgctcgccattttcgtcacgctcatagcagtagtcgctttacaagcgggcaacctttttgttctcaacaaactcaacagaaagagccgaatcagagccggaaagaaggcagacatcaaggatcattctatgagcgaccgttatgtagcagctgatgttgagaatgctgatgatgcagggcatgtagttggacttggcaaagacgcggatctaacggacgccaagaacgatgaatttgtctacatatattagaataaattggaacatgctacaatacatccgcatctttacgacccgttcatactctacatttcgcgagttttgaactacatcaaacactgccattaccagcctcgacgaattgcattggctgattccatttttcgttgcccatttactccttctcaaacgcattggaaatccactgcgacagttacatgccgtctcgttaattattacttccgaaagaacttgattgatctcgagcgcgtaactatcagtttgtggattatcggtccaaactagaatgactttgcaataaggatgagagtatgttgaacacgtgtgtatccccattgctgctacttttataactgggccagcaatattcggtgagcccgctcctatcggagacatcgctgccctaatgagttcatgtccgaggaatcgttattgttcgtcgctcgtgaagcattccgtcgaagtactcttgttacgatgagtagaccatgattgaactagcataggatgctccgggtccgatatatcaagcggcgctagttcttgctctggaagagtaacagggacggaatgcgtgcagtttgaccacttcgtatgcaagacgctgaaggtgtagcgtttcgttacttctccattcgaggttgctgtactccctgtatttatgtcgtttctgagcaaatgacagaatagggtcgatcgcgtaagatagaatgatgattattgtgccggtgatgtatgtgaagtaaagaccaaaaaggctcactgagatgtgggccgtgctgagaattttctagtggcatcgtcattaggtatccaggatttaatgattagagaatcatcaataaatcctccgctcttccttgttcgttagcagcatgagtgataaattcttacctggttttgacacagcgtcttctgtgccacattcgtggggtttactttaatcttcgcttcgcttgtaagtatcggaccgttcgc

SEQ ID NO: 39383 - DNA, 834 bp, Muscodor strobelii
  misc_feature: SGI cDNA ID NO. 573702
  misc_feature: Encodes the peptide sequence at SEQ ID NO 39384
atgagggccttcactatccttgccattctgtgcgcttcgctcccgagtgtcgcaaatgctcactggatatttggacgtctgattgtagacggcaaatggacggatacgtgggaatatgttcgtaaagtgagcccggaccccaagctcagttccacgccctcgacggctcaggtcgcccctaacattgacccgacatcccccgatctacggtgcggtcgcaatgcgtcggtctcacagactttggtcaaggtcgccaccgtccaagccggcgatacagttgggtttgcatgtggtgaacccatgcttgaggtatacgatttcttcgcttatggcgacgtcatgccttggatgtaccacccagggttcgcatctgcctggctttccaagtcgccaatagacgacctgaatgcatacacaggagacggcgattggttcaagattctaagcgtgacgggccgaactgagcagtcgctcaacttctccgatccagcttgggctccctattacgatcaatttaagtcactatggggcacacatcggcttccaagctacaacttcacaattcccgcatcaacacccccaggcaagtatctgctgcgcttcgagcacatctttcctaataaggtcgatgcacaatattatatcggctgcgcgcacatcgatgtcgaggcctcgggagagccggtgggcacgccggctccgctagtgaagatccctggcgtgtacacctacggacaagaagatgtttactttgattcttattcctacgccataacgcacaatatgagtatctctagtttcaaagcgcctgcgccagaggtgtgggctggctaa

SEQ ID NO: 39384 - protein, 277 aa, Muscodor strobelii
  misc_feature: SGI Peptide ID NO. 573702
  misc_feature (21)..(277): NCBI GI: 116179190 Blast Desc: CHGG_00223 [Chaetomium globosum CBS 148.51] gi|88184520|gb|EAQ91988.1| CHGG_00223 [Chaetomium globosum CBS 148.51]
  misc_feature (3)..(276): NCBI GI: 39944092 Blast Desc: MGG_04057 [Magnaporthe grisea 70-15] gi|145014783|gb|EDJ99351.1| MGG_04057 [Magnaporthe grisea 70-15]
  misc_feature (5)..(275): NCBI GI: 261356327 Blast Desc: cellulose-growth-specific protein [Verticillium albo-atrum VaMs.102]
  misc_feature (22)..(277): NCBI GI: 116196738 Blast Desc: CHGG_04967 [Chaetomium globosum CBS 148.51] gi|88180880|gb|EAQ88348.1| CHGG_04967 [Chaetomium globosum CBS 148.51]
  misc_feature (21)..(277): NCBI GI: 115433194 Blast Desc: conserved [Aspergillus terreus NIH2624] gi|114189586|gb|EAU31286.1| conserved [Aspergillus terreus NIH2624]
  misc_feature (12)..(275): NCBI GI: 169784466 Blast Desc: [Aspergillus oryzae RIB40] gi|238508389|ref|XP_002385389.1| endoglucanase, [Aspergillus flavus NRRL3357] gi|83775441|dbj|BAE65561.1| protein product
  misc_feature (1)..(277): NCBI GI: 119470730 Blast Desc: fungal cellulose binding domain protein [Neosartorya fischeri NRRL 181] gi|119406222|gb|EAW16173.1| fungal cellulose binding domain protein [Neosartorya fischeri NRRL 181]
  misc_feature (1)..(275): NCBI GI: 115397335 Blast Desc: conserved [Aspergillus terreus NIH2624] gi|114192450|gb|EAU34150.1| conserved [Aspergillus terreus NIH2624]
  misc_feature (1)..(242): NCBI GI: 145250957 Blast Desc: An15g04570 [Aspergillus niger] gi|134082518|emb|CAK97324.1| protein product [Aspergillus niger]
  misc_feature (1)..(277): NCBI GI: 70991989 Blast Desc: endoglucanase [Aspergillus fumigatus Af293] gi|66848476|gb|EAL88805.1| endoglucanase, [Aspergillus fumigatus Af293] gi|159124411|gb|EDP49529.1| endoglucanase, [Aspergillus
MRAFTILAILCASLPSVANAHWIFGRLIVDGKWTDTWEYVRKVSPDPKLSSTPSTAQVAPNIDPTSPDLRCGRNASVSQTLVKVATVQAGDTVGFACGEPMLEVYDFFAYGDVMPWMYHPGFASAWLSKSPIDDLNAYTGDGDWFKILSVTGRTEQSLNFSDPAWAPYYDQFKSLWGTHRLPSYNFTIPASTPPGKYLLRFEHIFPNKVDAQYYIGCAHIDVEASGEPVGTPAPLVKIPGVYTYGQEDVYFDSYSYAITHNMSISSFKAPAPEVWAG

SEQ ID NO: 39385 - DNA, 1324 bp, Muscodor strobelii
  misc_feature: SGI EST ID NO. CUFF.94816.0
  misc_feature: Variant of the nucleotide sequence at SEQ ID NO 39383
gccttcactatccttgccattctgtgcgcttcgctcccgagtgtcgcaaatgctcactggatatttggacgtctgattgtagacggcaaatggacggatacgtgggaatatgttcgtaaagtgagcccggaccccaagctcagttccacgccctcgacggctcaggtcgcccctaacattgacccgacatcccccgatctacggtgcggtcgcaatgcgtcggtctcacagactttggtcaaggtcgccaccgtccaagccggcgatacagttgggtttgcatgtggtgaacccatgcttgagggcgacgtcatgccttggatgtaccacccagggttcgcatctgcctggctttccaagtcgccaatagacgacctgaatgcatacacaggagacggcgattggttcaagattctaagcgtgacgggccgaactgagcagtcgctcaacttctccgatccagcttgggctccctattacgatcaatttaagtcactatggggcacacatcggcttccaagctacaacttcacaattcccgcatcaacacccccaggcaagtatctgctgcgcttcgagcacatctttcctaataaggtcgatgcacaatattatatcggctgcgcgcacatcgatgtcgaggcctcgggagagccggtgggcacgccggctccgctagtgaagatccctggcgtgtacacctacggacaagaagatgtttactttgattcttattcctacgccataacgcacaatatgagtatctctagtttcaaagcgcctgcgccagaggtgtgggctggctaattcaggggagactcggttaccgtgacggtcaggtaattggagagggaaaaggtaacaagaatggagagctgcgactttggcgaagatggcaagagaattaaaattcgaaattgagttgtattgctagatcagtgtttctacacaaaggtagaagccactggcagcatggagatatgactggaatggggtctgtcttcctggtggtcgcggaacacgcattcccccgaattatgccttatctcagaggaaaagcacgtgaaggaagtgaaggataactcagcgaatgactggtatcttcaatccttttttttttttttgcatctgtatacgcagattcatcatcgtctctcgttctatttgcctctgcctctcttctctttgccgatccttattcatcgctatcacatacctctcagccgtcttatcaaaagacgacttccattgcggcacggccatacccttcaaataatacaagtcttcagtcgaattcatattgtctagaggcacagaagcttcc

SEQ ID NO: 39386 - DNA, 1461 bp, Muscodor strobelii
  misc_feature: SGI cDNA ID NO. 573703
  misc_feature: Encodes the peptide sequence at SEQ ID NO 39387
atgctcacttctgtttctatcccgtcaagttgtttgacagagacgtggctctcgagcaaccagaatggcgatgcatcaatagtgcttggcaatccgcgcgacgaagcttgctggttccctccccagcaagacttgtccatcaccttatcgcccgcagtgtgtcctcatggctatacgagtgcttgcaatgccactccattaaccgatgcaagccagaccgtgtgggcgcgttgcccaacttgtgacaattacggtgtctttgactgtgttacggatttcccaaccagaacacctcaagcaatggagttgatggacaccgatagcttgggcaacaccattgtgcgtaccatcacaacctgttgtaatatcaatgcccattcaattcgagtagcatttcactcttccgacctcaatacctcgcctactaccactagcccttcacataatctgatctcacataccgatccatcgcactcgatatcagcatcggagacatctacgacgccgaaccctgaaggcaaacgcggaacaaaactaagcactgcggctgctatagccactggggcctgtgcatgcatcgtggtgcttatcatctttggctctatcagctggattatgcgaagttccattatcaagaagaagaaagtgtctcagtcggttgtgcaagaaacgtcgggaagcaataagcgagaagcattcaacgcgccgaagtcgagagacttcgtggaactgaacgttgtgcagcccgcaggagagctatctgctgtcagaccgccagccgagctcgggcgtttcagagatttgcctcgcgagtccaccgcgcatgacaccgattgggatgctgacgagaccgatccggaagaccagcgccgagttgttttttccaaaacctctacaaccatatatggccatccttccacaggcggcgttctcattttgagcccctgtaatgccgtcgagctcaatttcttgggccttgaccgtcttgaaacggcgaaacgatcaccagatgcgaacgaagaggatcgtcactgtgcacagatgaggaaactaggcgcaaggtggttcaggagtatgtatcatttccggacgatgccttattttgggccgttaaagttccgacggcttaaagttgtcatcgctgcgtggccgcagaatgatccagggatatgggtcttggccttccgagactgtgatgaggcaggaagcgaaggcgttggacgcgtatggaacactgtggacatggaggagagatgcgacgtgataaaaaggcttggcggcacctatcacgccgatcctgctctctgtccagatctacacctgtttgaggatgacgatagtgtgaatgatggatatctactcaatcgaccccatcaactatcatcagtaccaaccatggcccaagtagctatagagcatagcatgttcgcatccgacatgtttgcgccagggtctcgataa

SEQ ID NO: 39387 - protein, 486 aa, Muscodor strobelii
  misc_feature: SGI Peptide ID NO. 573703
  misc_feature (291)..(439): NCBI GI: 116202983 Blast Desc: CHGG_09376 [Chaetomium globosum CBS 148.51] gi|88177894|gb|EAQ85362.1| CHGG_09376 [Chaetomium globosum CBS 148.51]
  misc_feature (280)..(441): NCBI GI: 119487457 Blast Desc: NFIA_030570 [Neosartorya fischeri NRRL 181] gi|119410678|gb|EAW20624.1| conserved [Neosartorya fischeri NRRL 181]
  misc_feature (271)..(444): NCBI GI: 242787370 Blast Desc: conserved [Talaromyces stipitatus ATCC 10500] gi|218721140|gb|EED20559.1| conserved [Talaromyces stipitatus ATCC 10500]
  misc_feature (280)..(441): NCBI GI: 145246706 Blast Desc: An12g05320 [Aspergillus niger] gi|134080323|emb|CAK46245.1| protein product [Aspergillus niger]
  misc_feature (301)..(441): NCBI GI: 121709488 Blast Desc: conserved [Aspergillus clavatus NRRL 1] gi|119400585|gb|EAW11010.1| conserved [Aspergillus clavatus NRRL 1]
  misc_feature (290)..(441): NCBI GI: 46137843 Blast Desc: FG10437.1 [Gibberella zeae PH-1]
  misc_feature (291)..(452): NCBI GI: 154322304 Blast Desc: BC1G_01299 [Botryotinia fuckeliana B05.10] gi|150850546|gb|EDN25739.1| BC1G_01299 [Botryotinia fuckeliana B05.10]
  misc_feature (291)..(440): NCBI GI: 238485312 Blast Desc: conserved [Aspergillus flavus NRRL3357] gi|220698773|gb|EED55112.1| conserved [Aspergillus flavus NRRL3357]
  misc_feature (291)..(440): NCBI GI: 119483088 Blast Desc: NFIA_027490 [Neosartorya fischeri NRRL 181] gi|119409727|gb|EAW19675.1| conserved [Neosartorya fischeri NRRL 181]
  misc_feature (291)..(428): NCBI GI: 169772077 Blast Desc: [Aspergillus oryzae RIB40] gi|83768367|dbj|BAE58506.1| protein product [Aspergillus oryzae]
MLTSVSIPSSCLTETWLSSNQNGDASIVLGNPRDEACWFPPQQDLSITLSPAVCPHGYTSACNATPLTDASQTVWARCPTCDNYGVFDCVTDFPTRTPQAMELMDTDSLGNTIVRTITTCCNINAHSIRVAFHSSDLNTSPTTTSPSHNLISHTDPSHSISASETSTTPNPEGKRGTKLSTAAAIATGACACIVVLIIFGSISWIMRSSIIKKKKVSQSVVQETSGSNKREAFNAPKSRDFVELNVVQPAGELSAVRPPAELGRFRDLPRESTAHDTDWDADETDPEDQRRVVFSKTSTTIYGHPSTGGVLILSPCNAVELNFLGLDRLETAKRSPDANEEDRHCAQMRKLGARWFRSMYHFRTMPYFGPLKFRRLKVVIAAWPQNDPGIWVLAFRDCDEAGSEGVGRVWNTVDMEERCDVIKRLGGTYHADPALCPDLHLFEDDDSVNDGYLLNRPHQLSSVPTMAQVAIEHSMFASDMFAPGSR

SEQ ID NO: 39388 - DNA, 456 bp, Muscodor strobelii
  misc_feature: SGI cDNA ID NO. 573704
  misc_feature: Encodes the peptide sequence at SEQ ID NO 39389
atgcgttccaccatcctcccacttaccgccctgcttggcgttgctaccgcgcttcccgcctcgcatactactaggcagaccgaggtctgggctgtcagcgacttcgatattctcagcagcaaatggacgggtgaggccacaatcggcttcatgaccgatgcatcgagcgtggcaagcgacacggataaatattcgtgtagtgcgaaggtgacacccgatgcggacggcggcatcccccagatcacgcgctccccatgcgacgccaagggcacgaccttcagcttcaacccgtacacggatgattccaccagcgtctcgtctctacaaatctttaccaccggcgcggcagaaaaggaaggtgtcgccatcttcaggcgagacgccctcattctgaagaacggcactgagcgatgggtcggaagccctaacttcggtatcaccaacatcttcggttag

SEQ ID NO: 39389 - protein, 151 aa, Muscodor strobelii
  misc_feature: SGI Peptide ID NO. 573704
MRSTILPLTALLGVATALPASHTTRQTEVWAVSDFDILSSKWTGEATIGFMTDASSVASDTDKYSCSAKVTPDADGGIPQITRSPCDAKGTTFSFNPYTDDSTSVSSLQIFTTGAAEKEGVAIFRRDALILKNGTERWVGSPNFGITNIFG

SEQ ID NO: 39390 - DNA, 876 bp, Muscodor strobelii
  misc_feature: SGI EST ID NO. CUFF.94830.0
  misc_feature: Variant of the nucleotide sequence at SEQ ID NO 39388
ataacaagcaaccggatcctatcgcatcatcacctaaacctgatacttagctactctgcaccaggttgatctttatcacaactcacagggctattataatcaccaaaactctgtcaagatgcgttccaccatcctcccacttaccgccctgcttggcgttgctaccgcgcttcccgcctcgcatactactaggcagaccgaggtctgggctgtcagcgacttcgatattctcagcagcaaatggacgggtgaggccacaatcggcttcatgaccgatgcatcgagcgtggcaagcgacacggataaatattcgtgtagtgcgaaggtgacacccgatgcggacggcggcatcccccagatcacgcgctccccatgcgacgccaagggcacgaccttcagcttcaacccgtacacggatgattccaccagcgtctcgtctctacaaatctttaccaccggcgcggcagaaaaggaaggtgtcgccatcttcaggcgagacgccctcattctgaagaacggcactgagcgatgggtcggaagccctaacttcggtatcaccaacatcttcggttagactagtgcgcttggctgtacgatcgaaatcgggttagaatggggtattagaatgtaaatggtgagcgcgcctcacaggactcgagtccctgcgctccgggatttagacagaaggcgttcatggttgacagaatgaatggggagtcaactgcaagttttcattcagccagtaattctccagatgcgcatcacagcagaaagttgaacaatcacttcttgactcttagattgcactgataattagaaatgttttattccattttaatatgtctggcgtttccgcccatatgaattgaaatgaaa

SEQ ID NO: 39391 - DNA, 531 bp, Muscodor strobelii
  misc_feature: SGI cDNA ID NO. 573705
  misc_feature: Encodes the peptide sequence at SEQ ID NO 39392
atgctaccatccctgggcgaccaacgagcctatgtaaaccaggcttgccagatgttacgaccccgcctacagggaactcattcatcctatgacctggcagatggattttccacgcgcgcaattgtggatcctaaggataaagtctctatcatatgggatttgcaggatctcaaacagcgctatggctcggagatgagcaatagatatgttatgaaaactctagggtcaaagaaatgggagaatgtagccagatcagtagatgtggcatgtctgctcttacgcgaggcgttgtccattgcgggtaatggagactggctccaggcgaactacagccctgcggaggaattgaaggccgatgccctctatcagttcatgcaggatcaactcgcgaacctccgcaatacctactattcgggacaagagagtgaagggagtaagttcatcgacgacgaaatcaagtttctagaggaagagaggacacaagaaagcgctatcacatgtgaaagattacttgggcatagttcgcggtag

SEQ ID NO: 39392 - protein, 176 aa, Muscodor strobelii
  misc_feature: SGI Peptide ID NO. 573705
MLPSLGDQRAYVNQACQMLRPRLQGTHSSYDLADGFSTRAIVDPKDKVSIIWDLQDLKQRYGSEMSNRYVMKTLGSKKWENVARSVDVACLLLREALSIAGNGDWLQANYSPAEELKADALYQFMQDQLANLRNTYYSGQESEGSKFIDDEIKFLEEERTQESAITCERLLGHSSR

SEQ ID NO: 39393 - DNA, 473 bp, Muscodor strobelii
  misc_feature: SGI EST ID NO. CUFF.94849.0
  misc_feature: Variant of the nucleotide sequence at SEQ ID NO 39391
caggatctcaaacagcgctatggctcggagatgagcaatagatatgttatgaaaactctagggtcaaagaaatgggagaatgtagccagatcagtagatgtggcatgtctgctcttacgcgaggcgttgtccattgcgggtaatggagactggctccaggcgaactacagccctgcggaggaattgaaggccgatgccctctatcagttcatgcaggatcaactcgcgaacctccgcaatacctactattcgggacaagagagtgaagggagtaagttcatcgacgacgaaatcaagtttctagaggaagagaggacacaagaaagcgctatcacatgtgaaagattacttgggcatagttcgcggtagacttgctagtatgatacggaaacaaaaacgcagctctagggcatgatgatatcagagccaaccagccgatcagcactcattcttagcattcgggttcaacgtta

SEQ ID NO: 39394 - DNA, 1938 bp, Muscodor strobelii
  misc_feature: SGI cDNA ID NO. 573706
  misc_feature: Encodes the peptide sequence at SEQ ID NO 39395
atggctgaaggagacgagaaacatctcactgggcggaccctgagttgggttcaaagccctctcatctacgaattcaagaagcacgatcatagcgattttgatccattgcaagatattgcatcttcggcgggcaatgcctcgcatatgccgcgcttcctgaagcggtcggccccaactaatgcagagatgttttatgatctgtggttcgttgccaacatagcaatctttacaacccaacactcgataaacgacctagcgaccttgcggtcatacattggttacatcagcgtattatggtcaacttggcttctcgccagtttatacgacgtgcgttaccttaccgatagtgtctcgagtcgtctcattttagccgttcaagccggcgtaatgatcgggttcgctgttgtcgctgtacagttcacaccagatgagcagatcaagtccgttttccaagcaacttcccttattcttatggtgtctagactgctattggccttgcagtactctatcattctttggcacgtgaggcacttcaataaccatgggatgcggccatttgccatcacggtcgcattgtgcttggctgccgctattatctacttgggtgtctctttccgctttacgaacgctaaaaacagccgagcgtacctgacgtggtatgtcgttgcagcgtttgaagtcgtactgcaccttgggctatctctattctttcgagctctcactttcgatggtacatatctaaccgagcgaattgctgggtcgactttgttcatgctcggagaaggagtgaatgggatcgctgaaaatgtcgtgacaattgtgtcgaacaacggctggaattcggccacgattggaggattgacatccggtatcgcgacgatatacttcgttttcatgacttacttcgactggattgtgaatcatgatcgcctgaaggggattccattactactttggactattctgcactatccatttcacgttctcatgttgctcttcatggaaggactcgctcagttcttgatcatgttcaaggtggttgaagcattgttgaagtcattcaatagttttgtcgataagattggctttgcgtccgacactgagtccgtcatcgaagtgttcaactccaccgccaatcagctctggtctgattaccccacgagcttcatatatacctctactgtggtggataagataatagcgaacgtctctactttcccagatgcattcttcactggtgatcagccggttcaaaactcagacgagctttctctctggtattccgaggacatcgacaacttcctcagcagcatttctaatgcagtcttcatcacttataaagtacaagggacatctgatctgggcacaaaatccaccgtcggagatggcgcagcggacgcgcaaaatgctgccgtcgatgaagtattgaatcgcctagatctcactttcgtgagcacattcatcgctgccggcctcaccctcgtctttctggccttactccactctctcatgctgtctagacggtcatggacattggcgcacggcgtccgagtcggcttaatactcctcactgccattgcgctcggactcctatcgctcctcgattacagtactaatctagacttcgtcacaacagcttggcctttacctacattatcactgatcttctttttcgtggttatcgttacacactttccccgtgctcctcctgcgtcgtcactgcttttcttcgggcgctcgcaacagcctggaacgaaatcaaaggttaacgacaaatcgtacatacagcttgagccacagcgtgctgttccgacagacctagaatatcagagtcaatacggttatggtggccagtctacgcacgagaagatggctaccacaacagagcaggagcataattatccccctgcagtgtatggggagcgtcgatatgaatga

SEQ ID NO: 39395 - protein, 645 aa, Muscodor strobelii
  misc_feature: SGI Peptide ID NO. 573706
  misc_feature (3)..(610): NCBI GI: 256726850 Blast Desc: NECHADRAFT_33885 [Nectria haematococca mpVI 77-13-4]
  misc_feature (3)..(613): NCBI GI: 46123709 Blast Desc: FG06232.1 [Gibberella zeae PH-1]
  misc_feature (8)..(588): NCBI GI: 256721358 Blast Desc: NECHADRAFT_82397 [Nectria haematococca mpVI 77-13-4]
  misc_feature (27)..(547): NCBI GI: 156041226 Blast Desc: SS1G_11592 [Sclerotinia sclerotiorum 1980] gi|154695975|gb|EDN95713.1| SS1G_11592 [Sclerotinia sclerotiorum 1980]
  misc_feature (130)..(593): NCBI GI: 171681024 Blast Desc: protein product [Podospora anserina] gi|170940470|emb|CAP65697.1| protein product [Podospora anserina]
  misc_feature (14)..(562): NCBI GI: 261198228 Blast Desc: conserved [Ajellomyces dermatitidis SLH14081] gi|239595479|gb|EEQ78060.1| conserved [Ajellomyces dermatitidis SLH14081] gi|239615673|gb|EEQ92660.1| conserved [Ajellomyces
  misc_feature (24)..(562): NCBI GI: 258572688 Blast Desc: [Uncinocarpus reesii 1704] gi|237905376|gb|EEP79777.1| [Uncinocarpus reesii 1704]
  misc_feature (41)..(562): NCBI GI: 240108850 Blast Desc: CPC735_023550 [Coccidioides posadasii C735 delta SOWgp]
  misc_feature (21)..(565): NCBI GI: 226282894 Blast Desc: conserved [Paracoccidioides brasiliensis Pb01]
  misc_feature (41)..(562): NCBI GI: 119175784 Blast Desc: CIMG_09682 [Coccidioides immitis RS]
MAEGDEKHLTGRTLSWVQSPLIYEFKKHDHSDFDPLQDIASSAGNASHMPRFLKRSAPTNAEMFYDLWFVANIAIFTTQHSINDLATLRSYIGYISVLWSTWLLASLYDVRYLTDSVSSRLILAVQAGVMIGFAVVAVQFTPDEQIKSVFQATSLILMVSRLLLALQYSIILWHVRHFNNHGMRPFAITVALCLAAAIIYLGVSFRFTNAKNSRAYLTWYVVAAFEVVLHLGLSLFFRALTFDGTYLTERIAGSTLFMLGEGVNGIAENVVTIVSNNGWNSATIGGLTSGIATIYFVFMTYFDWIVNHDRLKGIPLLLWTILHYPFHVLMLLFMEGLAQFLIMFKVVEALLKSFNSFVDKIGFASDTESVIEVFNSTANQLWSDYPTSFIYTSTVVDKIIANVSTFPDAFFTGDQPVQNSDELSLWYSEDIDNFLSSISNAVFITYKVQGTSDLGTKSTVGDGAADAQNAAVDEVLNRLDLTFVSTFIAAGLTLVFLALLHSLMLSRRSWTLAHGVRVGLILLTAIALGLLSLLDYSTNLDFVTTAWPLPTLSLIFFFVVIVTHFPRAPPASSLLFFGRSQQPGTKSKVNDKSYIQLEPQRAVPTDLEYQSQYGYGGQSTHEKMATTTEQEHNYPPAVYGERRYE

SEQ ID NO: 39396 - DNA, 806 bp, Muscodor strobelii
  misc_feature: SGI EST ID NO. CUFF.94863.0
  misc_feature: Variant of the nucleotide sequence at SEQ ID NO 39394
gttacatcagcgtattatggtcaacttggcttctcgccagtttatacgacgtgcgttaccttaccgatagtgtctcgagtcgtctcattttagccgttcaagccggcgtaatgatcgggttcgctgttgtcgctgtacagttcacaccagatgagcagatcaagtccgttttccaagcaacttgtatgtccccgaggtcccttttgtcgcgaacgaatgctcatgatcacccttagcccttattcttatggtgtctagactgctattggccttgcagtactctatcattctttggcacgtgaggcacttcaataaccatgggatgcggccatttgccatcacggtcgcattgtgcttggctgccgctattatctacttgggtgtctctttccgctttacgaacgctaaaaacagccgagcgtacctgacgtggtatgtcgttgcagcgtttgaagtcgtactgcaccttgggctatctctattctttcgagctctcactttcgatggtacatatctaaccgagcgaattgctgggtcgactttgttcatgctcggagaaggagtgaatgggatcgctgaaaatgtcgtgacaattgtgtcgaacaacggctggaattcggccacgattggaggattgacatccggtatcgcgacgatatacttcgttttcatgacttacttcgactggattgtgaatcatgatcgcctgaaggggattccattactactttggactattctgcactatccatttcacgttctcatgttgctcttcatggaaggactcgctcagttcttgatcatgt

SEQ ID NO: 39397 - DNA, 1320 bp, Muscodor strobelii
  misc_feature: SGI cDNA ID NO. 573707
  misc_feature: Encodes the peptide sequence at SEQ ID NO 39398
atgtggaccacaacgtactcaccagagacagggcccgttgtacgggtcaatcctcgggaggtacatgtgagagatccgtacttctacgatgaggtttatgccccatcgtcgcgaagacgggacaaagattccgctttcgttggcgaactcggttttaagtcgtctatgcttgcgacaattgatcatgacctccatcgtcatcgtcgagcaatgctcaacaatttcttttccaagcagtctgtccaaagactgtcgcccctaatacaggaaaaagtggacaaactcatgatgcgatttgaacgaatacatcatgaaggcgccattgtgaccctggatgatggatattctgctttaaccggagacatcatatcgcagtacgcctggggccagagtgctgattatctcgagcacgccacgttcaagaacgatatcagagcagctctaaatgagctcacttcgttctcccacgtcaacaggttttttccatcattagggaacacgttgctgaacatgccgcgctggttcctgagtagaatccggccaggtgctgccgcactcttagacatgcaggacatggttaccgaatctaggaggaaaacaacgaaggggaagaatcagacccttttccatgccttgtcggatacgagcgtaccgcctgaagagcgaacgcaccgccgaatggcagatgagggcatggtggtcgttgttgcaggtaccgagacaacagctagaactttgacggttgcgtcctatcacctattccacgagaacgagtcgatcctgatgaagttacgtgacgagctgcgcgtggtgatgccgactccggcgacgaaaccatgttgctcagatctagaacaactcccatatctaaacgccgtggtctgtgaggcaattcgtctctcgcatgggcccatcttcaggtcgactcgggttgctcccgacgaagcattgatacatgaggatgtccaaataccaccaggaacgccggtcagcatgtctacatactttgtgcacatggatcccactatcttcccagatccacagagcttcaagcccgagcgctggatagaggcagcagagcatggccagaatctcaaaaggtttattgttgcattttcccggggtagtaggatctgtcttggtatgaacctcgcttatgcggagctctttatgacactagctgcgttgattcggcgctttgatatagagttgtatgagagtcacccggatgacgttcgtgttgatcatgagatggggcttccagtatcaaaaaacaatttcgctgtgcgagcaagaatcaccaacgtcttcacggactag

SEQ ID NO: 39398 - protein, 439 aa, Muscodor strobelii
  misc_feature: SGI Peptide ID NO. 573707
  misc_feature (1)..(429): Pfam Id: PF00067 Pfam Desc: Cytochrome P450
  misc_feature (237)..(406): Pfam Id: PF00067 Pfam Desc: Cytochrome P450
  misc_feature (11)..(439): NCBI GI: 119472265 Blast Desc: benzoate 4-monooxygenase cytochrome P450 [Neosartorya fischeri NRRL 181] gi|119406456|gb|EAW16407.1| benzoate 4-monooxygenase cytochrome P450 [Neosartorya fischeri NRRL 181]
  misc_feature (9)..(439): NCBI GI: 212536396 Blast Desc: benzoate 4-monooxygenase cytochrome P450, [Penicillium marneffei ATCC 18224] gi|210070753|gb|EEA24843.1| benzoate 4-monooxygenase cytochrome P450, [Penicillium marneffei ATCC
  misc_feature (11)..(439): NCBI GI: 121713434 Blast Desc: benzoate 4-monooxygenase cytochrome P450 [Aspergillus clavatus NRRL 1] gi|119402481|gb|EAW12902.1| benzoate 4-monooxygenase cytochrome P450 [Aspergillus clavatus NRRL 1]
  misc_feature (11)..(439): NCBI GI: 238494890 Blast Desc: benzoate 4-monooxygenase cytochrome P450, [Aspergillus flavus NRRL3357] gi|220695331|gb|EED51674.1| benzoate 4-monooxygenase cytochrome P450, [Aspergillus flavus NRRL3357]
  misc_feature (11)..(427): NCBI GI: 255954549 Blast Desc: Pc21g09910 [Penicillium chrysogenum Wisconsin 54-1255] gi|211589738|emb|CAP95888.1| Pc21g09910 [Penicillium chrysogenum Wisconsin 54-1255]
  misc_feature (9)..(436): NCBI GI: 259488148 Blast Desc: TPA: cytochrome P450, (Eurofung) [Aspergillus nidulans FGSC A4]
  misc_feature (11)..(439): NCBI GI: 238501248 Blast Desc: cytochrome P450, [Aspergillus flavus NRRL3357] gi|220692095|gb|EED48442.1| cytochrome P450, [Aspergillus flavus NRRL3357]
  misc_feature (11)..(436): NCBI GI: 238497800 Blast Desc: cytochrome P450, [Aspergillus flavus NRRL3357] gi|220693409|gb|EED49754.1| cytochrome P450, [Aspergillus flavus NRRL3357]
  misc_feature (11)..(436): NCBI GI: 145245901 Blast Desc: An12g01150 [Aspergillus niger] gi|134079913|emb|CAK41045.1| protein product [Aspergillus niger]
  misc_feature (11)..(439): NCBI GI: 169781396 Blast Desc: [Aspergillus oryzae RIB40] gi|83773903|dbj|BAE64028.1| protein product [Aspergillus oryzae]
  misc_feature (31)..(403): SWISSPROT Homolog: EC 1.14.14.1 Unspecific monooxygenase
MWTTTYSPETGPVVRVNPREVHVRDPYFYDEVYAPSSRRRDKDSAFVGELGFKSSMLATIDHDLHRHRRAMLNNFFSKQSVQRLSPLIQEKVDKLMMRFERIHHEGAIVTLDDGYSALTGDIISQYAWGQSADYLEHATFKNDIRAALNELTSFSHVNRFFPSLGNTLLNMPRWFLSRIRPGAAALLDMQDMVTESRRKTTKGKNQTLFHALSDTSVPPEERTHRRMADEGMVVVVAGTETTARTLTVASYHLFHENESILMKLRDELRVVMPTPATKPCCSDLEQLPYLNAVVCEAIRLSHGPIFRSTRVAPDEALIHEDVQIPPGTPVSMSTYFVHMDPTIFPDPQSFKPERWIEAAEHGQNLKRFIVAFSRGSRICLGMNLAYAELFMTLAALIRRFDIELYESHPDDVRVDHEMGLPVSKNNFAVRARITNVFTD

SEQ ID NO: 39399 - DNA, 2019 bp, Muscodor strobelii
  misc_feature: SGI EST ID NO. CUFF.94867.0
  misc_feature: Variant of the nucleotide sequence at SEQ ID NO 39397
gtgcaggacatggttaccgaatctaggaggaaaacaacgaaggggaagaatcagacccttttccatgccttgtcggatacgagcgtaccgcctgaagagcgaacgcaccgccgaatggcagatgagggcatggtggtcgttgttgcaggtaccgagacaacagctagaactttgacggttgcgtcctatcacctattccacgagaacgagtcgatcctgatgaagttacgtgacgagctgcgcgtggtgatgccgactccggcgacgaaaccatgttgctcagatctagaacaactcccatatctaaacgccgtggtctgtgaggcaattcgtctctcgcatgggcccatcttcaggtcgactcgggttgctcccgacgaagcattgatacatgaggatgtccaaataccaccaggaacgccggtcagcatgtctacatactttgtgcacatggatcccactatcttcccagatccacagagcttcaagcccgagcgctggatagaggcagcagagcatggccagaatctcaaaaggtttattgttgcattttcccggggtagtaggatctgtcttggtatgaacctcgcttatgcggagctctttatgacactagctgcgttgattcggcgctttgatatagagttgtatgagagtcacccggatgacgttcgtgttgatcatgagatggggcttccagtatcaaaaaacaatttcgctgtgcgagcaagaatcaccaacgtcttcacggactagcctgggaaagtcaatggcatgctagtgtgcaaggcctaagtgccaatggccataaggacagctagaacgaaggcatctcataggacgcgtaggagcgatatgatcagtcatggaatgaaagatcatgatgtcggttaaacgtcactaaggattcagaataaatattttgaaagcactgtggatctttcctcgtagggggatgtcttggagatgtttccgatgcaaagaacaccgcccgctagcgccgaagtcaaagtgactttgttgtagcggattgagaattggcgacagaacataaaggatgacaagtaaagcattaatgccaattgtgtaaatacctttactgatccgtagcgtcgcccgtttccgtgaggtctgagccgttaaaaagaggcaccagcatcaaagtttttgataacagcgccaaagaaatccagacctaatcattcatatcgacgctccccatacactgcagggggataattatgctcctgctctgttgtggtagccatcttctcgtgcgtagactggccaccataaccgtattgactctgatattctaggtctgtcggaacagcacgctgtggctcaagctgtatgtacgatttgtcgttaacctttgatttcgttccaggctgttgcgagcgcccgaagaaaagcagtgacgacgcaggaggagcacggggaaagtgtgtaacgataaccacgaaaaagaagatcagtgataatgtaggtaaaggccaagctgttgtgacgaagtctagattagtactgtaatcgaggagcgataggagtccgagcgcaatggcagtgaggagtattaagccgactcggacgccgtgcgccaatgtccatgaccgtctagacagcatgagagagtggagtaaggccagaaagacgagggtgaggccggcagcgatgaatgtgctcacgaaagtgagatctaggcgattcaatacttcatcgacggcagcattttgcgcgtccgctgcgccatctccgacggtggattttgtgcccagatcagatgtcccttgtactttataagtgatgaagactgcattagaaatgctgctgaggaagttgtcgatgtcctcggaataccagagagaaagctcgtctgagttttgaaccggctgatcaccagtgaagaatgcatctgggaaagtagagacgttcgctattatcttatccaccacagtagaggtatatatgaagctcgtggggtaatcagaccagagctgattggcggtggagttgaac

SEQ ID NO: 39400 - DNA, 1116 bp, Muscodor strobelii
  misc_feature: SGI cDNA ID NO. 573708
  misc_feature: Reduced expression when VOC is produced
  misc_feature: Encodes the peptide sequence at SEQ ID NO 39401
atgatcgaccagtactatgacaacaacgagaaggatattacaatacaaaaatctttaacggacgctctcggagacaacggcgatgatatcttgaataaaattcttactaacaatccttcattcactgcaaatacgggacggttagaggtattcgatgccattgcggcagagtgcgccaagcaggaaatttatctgcatcttgacaaccacgtttcaaaggccagttggtgctgtagcccgctggacggtaactcatggttcaatgatacgtatttttatgttgacaattggacaaggggattgtcattcatggccgaccgcgcacaaaattggacgagcctcacatcaatggcgctacgaaacgagcttcgcattcctgcaacaaatatccagctatccgacacctacaactgggagacatggtacaaatacatgcgccagggtgccgatgccattcattcagccaacggcgataccctgattttcctctcgggtctggactccgataagaatctctcggcagtcgttcaaggcactgcacttttgcctgggagccaaactttcagtcttgacgacttctcgggatacggcgacaagatcgttctcgagttgcacgaatatgccaatatcttggggacaccgtcaagcaattgtacagttctgacaaaccagctgtatgatgcagggttttcgacactctctagcagcgccgtgaataagctacccatggttgttacggaattcggcttcgttcaaaactcatcgcttgctcaagatccctatgctaaatgtattatcgactattttacctcgcaacatgcaggctggatgatctggtcactgtcgggatcttactacatccgtgagggcacacaagactacgatgagcagtggggtctattgacgcatgactggtcatcttttagggcaccgagtttcgtcaatgacttattgaagcctgccgtaaaccagagcttagcggctatcaccgatgatggcggtgactcgggagactcgtcagggggtgatggagagtcaaaagctgcacaaaccaacagtttcaacatcatcagcttctgtgcagccttaactgcatttctcattttgttacattag

SEQ ID NO: 39401 - protein, 371 aa, Muscodor strobelii
  misc_feature: SGI Peptide ID NO. 573708
  misc_feature (4)..(286): Pfam Id: PF00150 Pfam Desc: Cellulase (glycosyl hydrolase family 5)
  misc_feature (196)..(286): Pfam Id: PF00150 Pfam Desc: Cellulase (glycosyl hydrolase family 5)
  misc_feature (1)..(327): NCBI GI: 85094362 Blast Desc: NCU05882 [Neurospora crassa OR74A] gi|28921329|gb|EAA30637.1| conserved [Neurospora crassa OR74A]
  misc_feature (1)..(327): NCBI GI: 116206102 Blast Desc: CHGG_02344 [Chaetomium globosum CBS 148.51] gi|88182941|gb|EAQ90409.1| CHGG_02344 [Chaetomium globosum CBS 148.51]
  misc_feature (1)..(327): NCBI GI: 39942588 Blast Desc: MGG_03374 [Magnaporthe grisea 70-15] gi|145015611|gb|EDK00101.1| MGG_03374 [Magnaporthe grisea 70-15]
  misc_feature (1)..(328): NCBI GI: 67904358 Blast Desc: AN9166.2 [Aspergillus nidulans FGSC A4] gi|40742809|gb|EAA61999.1| AN9166.2 [Aspergillus nidulans FGSC A4] gi|259485409|tpe|CBF82407.1| TPA: cellulase family protein
  misc_feature (1)..(322): NCBI GI: 156045355 Blast Desc: SS1G_09866 [Sclerotinia sclerotiorum 1980] gi|154694261|gb|EDN93999.1| SS1G_09866 [Sclerotinia sclerotiorum 1980]
  misc_feature (1)..(322): NCBI GI: 154318702 Blast Desc: BC1G_02740 [Botryotinia fuckeliana B05.10] gi|150857870|gb|EDN33062.1| BC1G_02740 [Botryotinia fuckeliana B05.10]
  misc_feature (1)..(331): NCBI GI: 256730390 Blast Desc: NECHADRAFT_45063 [Nectria haematococca mpVI 77-13-4]
  misc_feature (1)..(331): NCBI GI: 145607579 Blast Desc: MGG_10423 [Magnaporthe grisea 70-15] gi|145015106|gb|EDJ99674.1| MGG_10423 [Magnaporthe grisea 70-15]
  misc_feature (1)..(327): NCBI GI: 261360991 Blast Desc: beta-1,6-galactanase [Verticillium albo-atrum VaMs.102]
  misc_feature (1)..(327): NCBI GI: 145234717 Blast Desc: An03g01050 [Aspergillus niger] gi|134057680|emb|CAK38078.1| protein product [Aspergillus niger]
  misc_feature: Useful for introducing or modulating the production of volatile compounds
MIDQYYDNNEKDITIQKSLTDALGDNGDDILNKILTNNPSFTANTGRLEVFDAIAAECAKQEIYLHLDNHVSKASWCCSPLDGNSWFNDTYFYVDNWTRGLSFMADRAQNWTSLTSMALRNELRIPATNIQLSDTYNWETWYKYMRQGADAIHSANGDTLIFLSGLDSDKNLSAVVQGTALLPGSQTFSLDDFSGYGDKIVLELHEYANILGTPSSNCTVLTNQLYDAGFSTLSSSAVNKLPMVVTEFGFVQNSSLAQDPYAKCIIDYFTSQHAGWMIWSLSGSYYIREGTQDYDEQWGLLTHDWSSFRAPSFVNDLLKPAVNQSLAAITDDGGDSGDSSGGDGESKAAQTNSFNIISFCAALTAFLILLH

SEQ ID NO: 39402 - DNA, 2598 bp, Muscodor strobelii
  misc_feature: SGI EST ID NO. CUFF.94982.0
  misc_feature: Variant of the nucleotide sequence at SEQ ID NO 39400
taacaatagaccaattactgacactgaccaaaggactaacgtcagcaactggagctgtggctgtggggttacgggtttcatctcatgccatgtcgccaccaaaatacgagctgtgcagcaggccgcgttgatctgcgccactgaaacggcctaagcgtgcatgtccaccacactcgtcatcgttttcgccagtctttcaacgttcgttgataatagactatccttcattcaaggtcattcccaacatcgcagattcaagagctcgcgatggtcagaccaagatgctctatgtggctagctagctggctggcggccagtcccctcgcttcgtgtacggagatacggcgtcgagcgtcatggccgaatggtccattcgttacctcagggcgatggatcaacgatgcgaccggtacaaaagtcacatatgctggagttaattggtcaggatctttagaggcgatgattcccgaaggacttcaatatcaatcaattgaggcaatcatttcaaagatcaagagcttgggtatgaatgcggttcgattgacatacgcgaccgagatgatcgaccagtactatgacaacaacgagaaggatattacaatacaaaaatctttaacggacgctctcggagacaacggcgatgatatcttgaataaaattcttactaacaatccttcattcactgcaaatacgggacggttagaggtgcagctaatttaacatgggtgtgtcaaagccagtgaactaaccatttgacaggtattcgatgccattgcggcagagtgcgccaagcaggaaatttatctgcatcttgacaaccacgtttcaaaggccagttggtgctgtagcccgctggacggtaactcatggttcaatgatacgtatttttatgttgacaattggacaaggggattgtcattcatggccgaccgcgcacaaaattggacgagcctcacatcaatggcgctacgaaacgagcttcgcattcctgcaacaaatatccagctatccgacacctacaactgggagacatggtacaaatacatgcgccagggtgccgatgccattcattcagccaacggcgataccctgattttcctctcgggtctggactccgataagaatctctcggcagtcgttcaaggcactgcacttttgcctgggagccaaactttcagtcttgacgacttctcgggatacggcgacaagatcgttctcgagttgcacgaatatgccaatatcttggggacaccgtcaagcaattgtacagttctgacaaaccagctgtatgatgcagggttttcgacactctctagcagcgccgtgaataagctacccatggttgttacggaattcggcttcgttcaaaactcatcgcttgctcaagatccctatgctaaatgtattatcgactattttacctcgcaacatgcaggctggatgatctggtcactgtcgggatcttactacatccgtgagggcacacaagactacgatgagcagtggggtctattgacgcatgactggtcatcttttagggcaccgagtttcgtcaatgacttattgaagcctgccgtaaaccagagcttagcggctatcaccgatgatggcggtgactcgggagactcgtcagggggtgatggagagtcaaaagctgcacaaaccaacagtttcaacatcatcagcttctgtgcagccttaactgcatttctcattttgttacattagactctagcgcatcacaaaaataatactttcgccccatcattctaccgtcacatgggaccctaacgggtatctgcaggactttgaggcaagattcccgtgccgctgccccacgtccgtaccagagtgtcgggtctttagcactagctaggtgataggtaatacgcgattgcgcacaatcctacagagggcttaatcacaaattcagcacgtggagtgcatcacaacgtcaatctgccttcccattggacgctactaaatgcagtttgttgtcagaacgtcgacaaaattgaatccacattgttttgttgtctctttcggtccctcaaatagcctgttggccacacaatgacaacggcgccaatgattttttcaccctcgcttccgaccagtggattcattatggcaggatgtaccgagaatggtccattgacgagccccgcatcgatactgatgcagcattctgttttcggagtctatcttagcgttacagtgatgtcgaatccttccgatcgccgggacctcactactcagcagatactatttggtcctatcatgttcactcgcaaagacaggtagcgagtatgtcctttcgaatgtgacggaattcacaaatgtcccgctaccaaaatcatctctgctcaaagccgtcccagcttgccatattcctcttcgcttacatatcacgcttccagatctctcgacttggagacggcttgacgctacgatgtaaaacaagaattatgccgatgcccagagcttcatcccaaaccttattcgcacgggtcatctccactgaatgcaactcaatttctttttccgatacatatctgctcaagctctatgctcatcaggtgatagcttgcgtcgcgg

SEQ ID NO: 39403 - DNA, 2055 bp, Muscodor strobelii
  misc_feature: SGI cDNA ID NO. 573709
  misc_feature: Elevated expression when VOC is produced
  misc_feature: Encodes the peptide sequence at SEQ ID NO 39404
atgcagcccctacgattgctatactcgaacgagaaagatggactcggcgacggtgcaggagtcgacattattgctgtccacggcctcaatccccggggcaagccggacgtagatcatgcctgggatacgtggcgaacccccgacgggccggatggtcgactttggcttcgtgacgatcttcccgaccatgtcaccgagtcgcgaatatttctctacgagtacaatgcctctatggtctacggcaaggaccgagatacctttgtcgataaggccaacgagctcctcgaggccatcagcaaagaacgaattggtgccgaatctcgacctattctattcctctgtcacagtataggtggcttattggtcaaacaagctctcattaacgcgtatgataatcccgagtatacggcaacgagcactgctacatcagggctcgcattctttgccacgcctcataacggcggagacggaatgttagtaagtctcggagagcttaccgctaaagtggccattgctgcagggtttcagaaaggcgacgatgtgctcgagacattgaaagaaggtagcatcttttccgatattatgcaagagcgttggcagcgccaactcctacaatacgatattatctctttctggggaggtaatgacagtatcgtgccgagggagagtgcaaggctagcaaggctaggatggtctggtgatcgtgagaatgttgttaaactgaacgctgatcataatggcatttgcaaatttggaacaagccaaaatgatcaagacaatctcaaacttgtgatgatagatgtcagagagatctacatgaatgccaggaagcaattccactatcgtcgatcaaaaaacgcggcagaggaacgtctgaaacttcatttagacaatatcaaggatttgaagcctcccgaaaatttaaccgaactggttcaagatcgtatctggccgttctatgccaactggttgcacgaagtcctcgggccttgtactcgtgcagctgagttcgaatgggacgacgatagcgaaaggcctatttcagttgagatatatatcacatgcaagaaccctcccaccgcgtcgttacgggagcttattgaatactctacatatgaccttgtccctcgcgcgtttcgaaaacaaatgcgtctcctgattgggaaaggatctactacgtgttcgatgaacttgaaaatgggtgattgcatcgcacgctctgaagcagtagtgacgaataggggccgagtcctttcccaagggagctcagggccttggttacgaacttcgagttcagatgtgtatctgtacaccaatgagcacgtagtcagagaaagcagggaccccaacatgttcgtaatgacttatcctagatgtctacgcattggaaaagtcgttttgacatcagaatcggacgatgagaaccaagataacgctttcatgaagtcacataaccctgaagtgcttgagagcatacggagaggtcatcgtttccttgctgattggacaatggtcaaatttgaccaaggtccaactaaggcagttgagtcaccgaaaagcttcgaaggttggccctgttctcacatcaatgatatcattcatattccacgcaggggaagtgcattagcaagaggtgctggtgacagatcgggcatgagtggcccattggaagccacatacgccactgaattccgaggtgacgggttgccgacaatattgagcaaggaagcgtgggggagcaatactgaggatcttgcggtttggtcttcaagtcgacctaaaggagtctcgaatgatgcttggtacaattatggcattggaattcctggtgattcaggagcaggtgtagtcgactgtaaaagcggaaagatttgtggcttggtcgtgggtcagacaaaatatgaggcactcaaacatagacaggcgcttatcatcgatatgaaggatgtcatcgctgatacaatggtcaagcagtcgctgataggacatggacaggcgcccttgggtgaactggaacttatcccgtgcggctgcgacaatgtcagagtaagttag

SEQ ID NO: 39404 - protein, 684 aa, Muscodor strobelii
  misc_feature: SGI Peptide ID NO. 573709
  misc_feature (4)..(275): NCBI GI: 212529704 Blast Desc: ankyrin repeat-containing protein, [Penicillium marneffei ATCC 18224] gi|210074407|gb|EEA28494.1| ankyrin repeat-containing protein, [Penicillium marneffei ATCC 18224]
  misc_feature (12)..(275): NCBI GI: 115401654 Blast Desc: [Aspergillus terreus NIH2624] gi|114190356|gb|EAU32056.1| [Aspergillus terreus NIH2624]
  misc_feature (21)..(253): NCBI GI: 121706306 Blast Desc: F-box domain protein [Aspergillus clavatus NRRL 1] gi|119399562|gb|EAW09990.1| F-box domain protein [Aspergillus clavatus NRRL 1]
  misc_feature (20)..(253): NCBI GI: 238494910 Blast Desc: LipA and NB-ARC domain protein [Aspergillus flavus NRRL3357] gi|220695341|gb|EED51684.1| LipA and NB-ARC domain protein [Aspergillus flavus NRRL3357]
  misc_feature (20)..(253): NCBI GI: 119490172 Blast Desc: tetratricopeptide repeat domain protein [Neosartorya fischeri NRRL 181] gi|119411159|gb|EAW21102.1| tetratricopeptide repeat domain protein [Neosartorya fischeri NRRL 181]
  misc_feature (21)..(253): NCBI GI: 145241588 Blast Desc: An09g01220 [Aspergillus niger] gi|134077979|emb|CAK49044.1| protein product [Aspergillus niger]
  misc_feature (21)..(253): NCBI GI: 255938427 Blast Desc: Pc13g15900 [Penicillium chrysogenum Wisconsin 54-1255] gi|211584604|emb|CAP92659.1| Pc13g15900 [Penicillium chrysogenum Wisconsin 54-1255]
  misc_feature (21)..(252): NCBI GI: 116204231 Blast Desc: CHGG_09999 [Chaetomium globosum CBS 148.51] gi|88176127|gb|EAQ83595.1| CHGG_09999 [Chaetomium globosum CBS 148.51]
  misc_feature (4)..(251): NCBI GI: 255935037 Blast Desc: Pc13g00980 [Penicillium chrysogenum Wisconsin 54-1255] gi|211583165|emb|CAP91167.1| Pc13g00980 [Penicillium chrysogenum Wisconsin 54-1255]
  misc_feature (89)..(250): NCBI GI: 67523741 Blast Desc: AN2326.2 [Aspergillus nidulans FGSC A4] gi|40745281|gb|EAA64437.1| AN2326.2 [Aspergillus nidulans FGSC A4] gi|259487721|tpe|CBF86612.1| TPA: LipA and NB-ARC domain FGSC
  misc_feature: Useful for introducing or modulating the production of volatile compounds
MQPLRLLYSNEKDGLGDGAGVDIIAVHGLNPRGKPDVDHAWDTWRTPDGPDGRLWLRDDLPDHVTESRIFLYEYNASMVYGKDRDTFVDKANELLEAISKERIGAESRPILFLCHSIGGLLVKQALINAYDNPEYTATSTATSGLAFFATPHNGGDGMLVSLGELTAKVAIAAGFQKGDDVLETLKEGSIFSDIMQERWQRQLLQYDIISFWGGNDSIVPRESARLARLGWSGDRENVVKLNADHNGICKFGTSQNDQDNLKLVMIDVREIYMNARKQFHYRRSKNAAEERLKLHLDNIKDLKPPENLTELVQDRIWPFYANWLHEVLGPCTRAAEFEWDDDSERPISVEIYITCKNPPTASLRELIEYSTYDLVPRAFRKQMRLLIGKGSTTCSMNLKMGDCIARSEAVVTNRGRVLSQGSSGPWLRTSSSDVYLYTNEHVVRESRDPNMFVMTYPRCLRIGKVVLTSESDDENQDNAFMKSHNPEVLESIRRGHRFLADWTMVKFDQGPTKAVESPKSFEGWPCSHINDIIHIPRRGSALARGAGDRSGMSGPLEATYATEFRGDGLPTILSKEAWGSNTEDLAVWSSSRPKGVSNDAWYNYGIGIPGDSGAGVVDCKSGKICGLVVGQTKYEALKHRQALIIDMKDVIADTMVKQSLIGHGQAPLGELELIPCGCDNVRVS

SEQ ID NO: 39405 - DNA, 2168 bp, Muscodor strobelii
  misc_feature: SGI EST ID NO. CUFF.94880.0
  misc_feature: Variant of the nucleotide sequence at SEQ ID NO 39403
caactactgagcaccagctcgataacttgtctttgatgttttcattacactatactatattgagacatcttcaacacttgctagcgcgtttactgatcaagaaatgcccctacgattgctatactcgaacgagaaagatggactcggcgacggtgcaggagtcgacattattgctgtccacggcctcaatccccggggcaagccggacgtagatcatgcctgggatacgtggcgaacccccgacgggccggatggtcgactttggcttcgtgacgatcttcccgaccatgtcaccgagtcgcgaatatttctctacgagtacaatgcctctatggtctacggcaaggaccgagatacctttgtcgataaggccaacgagctcctcgaggccatcagcaaagaacgaattggtgccgaatctcgacctattctattcctctgtcacagtataggtggcttattggtcaaacaagctctcattaacgcgtatgataatcccgagtatacggcaacgagcactgctacatcagggctcgcattctttgccacgcctcataacggcggagacggaatgttagtaagtctcggagagcttaccgctaaagtggccattgctgcagggtttcagaaaggcgacgatgtgctcgagacattgaaagaaggtagcatcttttccgatattatgcaagagcgttggcagcgccaactcctacaatacgatattatctctttctggggaggtaatgacagtatcgtgccgagggagagtgcaaggctagcaaggctaggatggtctggtgatcgtgagaatgttgttaaactgaacgctgatcataatggcatttgcaaatttggaacaagccaaaatgatcaagacaatctcaaacttgtgatgatagatgtcagagagatctacatgaatgccaggaagcaattccactatcgtcgatcaaaaaacgcggcagaggaacgtctgaaacttcatttagacaatatcaaggatttgaagcctcccgaaaatttaaccgaactggttcaagatcgtatctggccgttctatgccaactggttgcacgaagtcctcgggccttgtactcgtgcagctgagttcgaatgggacgacgatagcgaaaggcctatttcagttgagatatatatcacatgcaagaaccctcccaccgcgtcgttacgggagcttattgaatactctacatatgaccttgtccctcgcgcgtttcgaaaacaaatgcgtctcctgattgggaaaggatctactacgtgttcgatgaacttgaaaatgggtgattgcatcgcacgctctgaagcagtagtgacgaataggggccgagtcctttcccaagggagctcagggccttggttacgaacttcgagttcagatgtgtatctgtacaccaatgagcacgtagtcagagaaagcagggaccccaacatgttcgtaatgacttatcctagatgtctacgcattggaaaagtcgttttgacatcagaatcggacgatgagaaccaagataacgctttcatgaagtcacataaccctgaagtgcttgagagcatacggagaggtcatcgtttccttgctgattggacaatggtcaaatttgaccaaggtccaactaaggcagttgagtcaccgaaaagcttcgaaggttggccctgttctcacatcaatgatatcattcatattccacgcaggggaagtgcattagcaagaggtgctggtgacagatcgggcatgagtggcccattggaagccacatacgccactgaattccgaggtgacgggttgccgacaatattgagcaaggaagcgtgggggagcaatactgaggatcttgcggtttggtcttcaagtcgacctaaaggagtctcgaatgatgcttggtacaattatggcattggaattcctggtgattcaggagcaggtgtagtcgactgtaaaagcggaaagatttgtggcttggtcgtgggtcagacaaaatatgaggcactcaaacatagacaggcgcttatcatcgatatgaaggatgtcatcgctgatacaatggtcaagcagtcgctgataggacatggacaggcgcccttgggtgaactggaacttatcccgtgcggctgcgacaatgtcagagtaagttaggaacggctcgctg

SEQ ID NO: 39406 - DNA, 1869 bp, Muscodor strobelii
  misc_feature: SGI cDNA ID NO. 573710
  misc_feature: Encodes the peptide sequence at SEQ ID NO 39407
atgtctccccctttgtccaacaaccaacctctcacgccccagcgccagagtcaacagccccttcacgtcaacccgtcgacgccctctggtcgctccctcgtccgccccgtcgtccctgacaccataactgtcggcagcgtcctggcccctgcagcatcggccgccaacgacctctccaaccccccgtccgcctcttccgcgaccaccagcttccagatcgactggccttccgatggtggtccttcctccgcctctgccgccaaccgccgtcccgaagacatcgagatggacgccataacacccacaggccaccggcgccgccgtagtacgctgagcgccagcttacagcacaacaggaggacgtcaacgtcgagaccacgtgctgccagcatcaagcatgccggagatgtcgagcctaagatatcagaagaggaccagcggctgttggactcacggaaggataccagagacgacgacatattaacggacgaagatttacacgatgacgaggaaaccggcttgacaaaagcagacagacgtcgtaaggagaaaaagaggcggcggaacacgaggctagaccagaggattgtcaaggacaaattgacagatgacgagcgtaaggaggccaacaagaatattgccaagaagctggccgtcaatgccgggctgatagggctgtggtacatgttttcgttgtcgatatcattatataacaagtggatgtttgattccgggaaactcaactttccatttcccctattcacgacctcgatgcacatgctcgtccaatttgctcttgccagcttagtcttgtatctcataccctctctacggcctggctatgcacagcacacctcagattcaggccgctcgaggcacgaagccgagcccgccggagaacgtccggtcatgacaaagctcttttacttgacgaggatagggccttgtggtgcggccacaggtctagatattgggttgggtaacacatcgttgaagtttataacattgacattctacacaatgtgtaaatcctcagccctggcttttgtcctactcttcgctttcctcttccgcttggaaaccccgacgtggaggctcgtgactattatcgccatcatgacagtcggcgttatcatgatggtcacaggcgaagttaaattccatctgggaggattcttcctcatcatttcttccgctttcttctcaggtttccgctggggcctcacccagatcctcttactccgacatcccgccacctcaaacccattctctagtatctttttccttactcctataatgttcgccacactcttgcttatcgcattccccgtcgaaggcgcctgggagtttctcgagggtatacagacactgagcggtgaatggggctggttcagagctcccctgcttctcctttttcctggaacgatcgcttttctcatgacttccgccgaattcgctctgctgcagcgaagtagcgttgtcactctctcgatcgccggcatcttcaaggaggtcgtcaccataatcgtcgcggcacttgtgttcgacgacaaactaaccccaatcaacatatctggtctcctggtcactttgggcgccattgccgcttacaattacatcaaactcacagccatgcgtgatgaggttcaacacgatgtccattcgtcgaaacacccgcaagatccctctgggtcgtctactgattacctcagcgattcggacgacgaggacgcagggctacttgcgaacaaggaggacagtgaaagtgaagaggataaccacatcacaattgacggagatttaatcccaaaatcgaagactcccaggccacaagatgagatcaggccccacagtgttcgagaggactaa

SEQ ID NO: 39407 - protein, 622 aa, Muscodor strobelii
  misc_feature: SGI Peptide ID NO. 573710
  misc_feature (391)..(539): Pfam Id: PF03151 Pfam Desc: Triose-phosphate Transporter family
  misc_feature (217)..(545): Pfam Id: PF08449 Pfam Desc: UAA transporter family
  misc_feature (94)..(604): NCBI GI: 261356334 Blast Desc: solute carrier family 35 member C2 [Verticillium albo-atrum VaMs.102]
  misc_feature (50)..(586): NCBI GI: 46108454 Blast Desc: FG01109.1 [Gibberella zeae PH-1]
  misc_feature (50)..(622): NCBI GI: 171687809 Blast Desc: protein product [Podospora anserina] gi|170943866|emb|CAP69518.1| protein product [Podospora anserina]
  misc_feature (122)..(603): NCBI GI: 256735127 Blast Desc: NECHADRAFT_65553 [Nectria haematococca mpVI 77-13-4]
  misc_feature (83)..(581): NCBI GI: 145613916 Blast Desc: MGG_11246 [Magnaporthe grisea 70-15] gi|145020930|gb|EDK05059.1| MGG_11246 [Magnaporthe grisea 70-15]
  misc_feature (90)..(604): NCBI GI: 156045377 Blast Desc: SS1G_09877 [Sclerotinia sclerotiorum 1980] gi|154694272|gb|EDN94010.1| SS1G_09877 [Sclerotinia sclerotiorum 1980]
  misc_feature (158)..(578): NCBI GI: 239615595 Blast Desc: nucleotide-sugar transporter [Ajellomyces dermatitidis ER-3]
  misc_feature (158)..(578): NCBI GI: 261199628 Blast Desc: nucleotide-sugar transporter [Ajellomyces dermatitidis SLH14081] gi|239594423|gb|EEQ77004.1| nucleotide-sugar transporter [Ajellomyces dermatitidis SLH14081]
  misc_feature (95)..(578): NCBI GI: 240278139 Blast Desc: solute carrier family 35 member C2 [Ajellomyces capsulatus H143]
  misc_feature (98)..(550): NCBI GI: 70991703 Blast Desc: nucleotide-sugar transporter [Aspergillus fumigatus Af293] gi|66848333|gb|EAL88662.1| nucleotide-sugar transporter, [Aspergillus fumigatus Af293]
MSPPLSNNQPLTPQRQSQQPLHVNPSTPSGRSLVRPVVPDTITVGSVLAPAASAANDLSNPPSASSATTSFQIDWPSDGGPSSASAANRRPEDIEMDAITPTGHRRRRSTLSASLQHNRRTSTSRPRAASIKHAGDVEPKISEEDQRLLDSRKDTRDDDILTDEDLHDDEETGLTKADRRRKEKKRRRNTRLDQRIVKDKLTDDERKEANKNIAKKLAVNAGLIGLWYMFSLSISLYNKWMFDSGKLNFPFPLFTTSMHMLVQFALASLVLYLIPSLRPGYAQHTSDSGRSRHEAEPAGERPVMTKLFYLTRIGPCGAATGLDIGLGNTSLKFITLTFYTMCKSSALAFVLLFAFLFRLETPTWRLVTIIAIMTVGVIMMVTGEVKFHLGGFFLIISSAFFSGFRWGLTQILLLRHPATSNPFSSIFFLTPIMFATLLLIAFPVEGAWEFLEGIQTLSGEWGWFRAPLLLLFPGTIAFLMTSAEFALLQRSSVVTLSIAGIFKEVVTIIVAALVFDDKLTPINISGLLVTLGAIAAYNYIKLTAMRDEVQHDVHSSKHPQDPSGSSTDYLSDSDDEDAGLLANKEDSESEEDNHITIDGDLIPKSKTPRPQDEIRPHSVRED

SEQ ID NO: 39408 - DNA, 3301 bp, Muscodor strobelii
  misc_feature: SGI EST ID NO. CUFF.94886.0
  misc_feature: Variant of the nucleotide sequence at SEQ ID NO 39406
gcgcaggtgagttctggtgaagatgcatcgaatccgctttccgctgctgatcccctgaattcgaggccccttccgaggccccttccactattctggcaaacccgggtgtgcctgccaatgggtggactcaactggactcactgttactgcgttagcgtagcttgtctcacttcccccgatgtgacgctgggagatcatcacgcgacaagcatccattgtacatactaatgccgttgagcatcgaaatgcaaaccgaatacttctctgcatcatccagtcactgtttcaataccgtttgtttgttccactagttctacgccgcgtgccagcattgaggaattgcaacagatacttaccacacacagcatatcatccattgtcaactgacctcagccatccatcatcgatttcgctttaaaacctgttatgacttgcattgatctgggcattattactagtctgcctcatcctcggcacatcactggctgatcgaccgcatgaggtacccataacatcatagcgttagccctgcgggaatgaaatccttctgtcgacgatagaaattcgagaatcctggggaacgggcataagtcaccgcagttggacccatcgacctggctctcccagtcacctcgtcccgccagcccttccccctttcccgctagtcctgcagacacgtcgacccgccattggggccaggagatgtgtttgacatcaaggctgcggtgtctgctctagttgcatgccctttttttcgctgctccacgcgaccctgctccgtatccagtatccagtgtccagtccatcccgtccctcggccagtgaacaatgacggtgccagccaagcttgtgaccgcccattcgccgtcgctgtgaagccgtggcacagtcccgtccatatcctttccccgtttacgtacaataattctcatccctagattggaccatgtctccccctttgtccaacaaccaacctctcacgccccagcgccagagtcaacagccccttcacgtcaacccgtcgacgccctctggtcgctccctcgtccgccccgtcgtccctgacaccataactgtcggcagcgtcctggcccctgcagcatcggccgccaacgacctctccaaccccccgtccgcctcttccgcgaccaccagcttccagatcgactggccttccgatggtggtccttcctccgcctctgccgccaaccgccgtcccgaagacatcgagatggacgccataacacccacaggccaccggcgccgccgtagtacgctgagcgccagcttacagcacaacaggaggacgtcaacgtcgagaccacgtgctgccagcatcaagcatgccggagatgtcgagcctaagatatcagaagaggaccagcggctgttggactcacggaaggataccagagacgacgacatattaacggacgaagatttacacgatgacgaggaaaccggcttgacaaaagcagacagacgtcgtaaggagaaaaagaggcggcggaacacgaggctagaccagaggattgtcaaggacaaattgacagatgacgagcgtaaggaggccaacaagaatattgccaagaagctggccgtcaatgccgggctgatagggctgtggtacatgttttcgttgtcgatatcattatataacaagtggatgtttgattccgggaaactcaactttccatttcccctattcacgacctcgatgcacatgctcgtccaatttgctcttgccagcttagtcttgtatctcataccctctctacggcctggctatgcacagcacacctcagattcaggccgctcgaggcacgaagccgagcccgccggagaacgtccggtcatgacaaagctcttttacttgacgaggatagggccttgtggtgcggccacaggtctagatattgggttgggtaacacatcgttgaagtttataacattgacattctacacaatgtgtaaatcctcagccctggcttttgtcctactcttcgctttcctcttccgcttggaaaccccgacgtggaggctcgtgactattatcgccatcatgacagtcggcgttatcatgatggtcacaggcgaagttaaattccatctgggaggattcttcctcatcatttcttccgctttcttctcaggtttccgctggggcctcacccagatcctcttactccgacatcccgccacctcaaacccattctctagtatctttttccttactcctataatgttcgccacactcttgcttatcgcattccccgtcgaaggcgcctgggagtttctcgagggtatacagacactgagcggtgaatggggctggttcagagctcccctgcttctcctttttcctggaacgatcgcttttctcatgacttccgccgaattcgctctgctgcagcgaagtagcgttgtcactctctcgatcgccggcatcttcaaggaggtcgtcaccataatcgtcgcggcacttgtgttcgacgacaaactaaccccaatcaacatatctggtctcctggtcactttgggcgccattgccgcttacaattacatcaaactcacagccatgcgtgatgaggttcaacacgatgtccattcgtcgaaacacccgcaagatccctctgggtcgtctactgattacctcagcgattcggacgacgaggacgcagggctacttgcgaacaaggaggacagtgaaagtgaagaggataaccacatcacaattgacggagatttaatcccaaaatcgaagactcccaggccacaagatgagatcaggccccacagtgttcgagaggactaatcctaccactcgctgaatctttccattttctcttttactgcatgtgctattaccagcattataacatataaggcgtatatacggacagagtcatgtgtacatttttcaacagaattcgacatgagcacgggcatccaaaattacgaccggtgttcggtttgctcttaaggaatactacttcctacggcctcgaggcgtttctgaaggccgttctatagaagggaggggctagcaagggccagcaaagtctcagattggggaggacagtagcttatcatagacaggaaggaaggaagatatgagatacccactggatacagagcattttccctcgttggattggatcatggggactctgtttgcattatgtgatagatgtagcatctaggaacgagcttgactgctcggaatggagaattgaatgggttgaagggattggttttatttggacttcatcgacttgttgaacgtggtgtgattactgcc

SEQ ID NO: 39409 - DNA, 2499 bp, Muscodor strobelii
  misc_feature: SGI cDNA ID NO. 573711
  misc_feature: Encodes the peptide sequence at SEQ ID NO 39410
atggatccccttgtagctccaagactggccttagatgaaaggtgggaggctggtagcctgaaactacgcgctgaattcctcaaacgactctatacgtcaccttacaaggagcacaaggatagaaacccggagcgggcagatggcacttgtgaatggttcacaggacacccgctcttcaaaaactggcaacaagaaacttcggcgcctctttgggtctctgctgacccaggttgtggcaaatccgtgttagccaaatatttgatagacgacgtcttcccctcgaacactaccaggacgacatgttatttcttctttaaggacgacttcgaagaccagcgagttttagaaggcgcgttctgctgtattttacaccagctgtttacccagagaccttcgctactcttggatagcatccttgaagacttcgaggaacagggtgaccagctttttacatctttctcagagctatggcgcatcctcaatggggctgcggcgatcagtgccgaaaccaatgacgaaataatatgcgttttagacgcgttagacgaatgcgtgagctcgacacgtctcgttaacgctttgacagaacagtacagtaagaagaacgcagtatctacactgaagtttctcgtgaccagtcgtccgtactctcgaatccagcgagacttccgagatctccaaaattctcaacctaccattcacctaagtggagagagccaggaagaggtggacaaaattgcgcaagaagtccttgtttccatccagcaacgtatagaagagcgtggtgaaatcatccatcaatttgatgatataacgaaacaaatcttatgtgaggagctaactgtcttcgataatcgatcgcacttatgggctaggctcatacttgatacgatatacaaagccatctttcttagtaaaagcgatttgcgtaatactattcgcagtttgccccctacagtcgaagatgcatatgaaaatattcttcaaaagagccgtgactcgggaaaggccaggattattctgcacttcgttattgcagcgaacaggccgctacgtctctctgagatggctgtcgcgctgacgttacaagcagacaattaccaacgtcttcaagacttgcaaaaagatcttgtaccatcagatttcctatctaatgcgatccgagaaacctacggtcttttcgttgttgttgaagattcccgaatcttccttctacatcaaacggcaagagagttcctagttcgaactccacacgagttgcctggagttagcactgctttaccatcttggcggcattcgtttgacgttacagaatcacatcgcctgctttcagaaatttgcattcgctatctgctccttactgactttcaaagcccggttggagacgaaagcgccccgaattcggatgaagaagacgctttcgccttccgggaatatgccgcaagcaactgggcagatcattatcgcgaagcaaacattgcggatggtaccaagctgcaagctttggcacggcagttatgcgacgtaaagtcgccggcttgtacgcattggctaaaattatacggggagaatcgagtgcaagaaccagaacttcaccacgaattactcgactcattattgatcacatcctattttggcttaagtgacttagtccgaattattcttcatcaaaataaaatgcgtcttgatacgacaggtggttccagtcagcgaaccgctctatcatgggccagcgagaagggatatcacttgatagtgcagcagctccttgatcgagtaccgaaacaccaagtaatcatgaaagacagtttatctgtcttttcgcctactatcgtaaataaaagagacaggcgcggcaggtctccgctatggtattctgcagcgggcggacatctgacgattgtcagtcaactgcttctaaagggtgccaaagttgatgtgcaggacgaaagtggcctaacaccgctactatgggcatcgcatcacggataccacggtatcgttacacttctgttacagaatggtgctcaacagcaaacagactccaaatatctagaaactagggactcgaaaggtcaaactccacttcatagatctgctggcaaaggggacgaatctcttgtgaaaattctgctgagctgcggtgctgagatcgatgcccaagacagaagcggccaaacagctctgattgtagcctcgaaatgcgggcacaacgacgtagtcacgcagctcctagactgcggtgccaaaatggaacttcgaacccatgatgacaggacggccctcatgtatgcctcagagcttggcaagaacgacgtaattaagcagctactagaccgtggtgcagatatcaatgctcgggacatcaaaggattcacggctctaattttggcctcagaatgtgggcgcgaaaacgtagtcacgcagctcttagactacggtaccaaaatgaatcttcgaacccatcagaaagggaaatttttcgaagtcctctcttag

SEQ ID NO: 39410 - protein, 832 aa, Muscodor strobelii
  misc_feature: SGI Peptide ID NO. 573711
  misc_feature (757)..(789): Pfam Id: PF00023 Pfam Desc: Ankyrin repeat
  misc_feature (691)..(723): Pfam Id: PF00023 Pfam Desc: Ankyrin repeat
  misc_feature (790)..(822): Pfam Id: PF00023 Pfam Desc: Ankyrin repeat
  misc_feature (724)..(756): Pfam Id: PF00023 Pfam Desc: Ankyrin repeat
  misc_feature (618)..(650): Pfam Id: PF00023 Pfam Desc: Ankyrin repeat
  misc_feature (651)..(683): Pfam Id: PF00023 Pfam Desc: Ankyrin repeat
  misc_feature (651)..(676): Pfam Id: PF00023 Pfam Desc: Ankyrin repeat
  misc_feature (21)..(814): NCBI GI: 159123470 Blast Desc: Ankyrin repeat protein [Aspergillus fumigatus A1163]
  misc_feature (26)..(811): NCBI GI: 145246768 Blast Desc: An12g05680 [Aspergillus niger] gi|134080354|emb|CAK46276.1| protein product [Aspergillus niger]
  misc_feature (25)..(812): NCBI GI: 238500305 Blast Desc: ankyrin repeat-containing protein, [Aspergillus flavus NRRL3357] gi|220693140|gb|EED49486.1| ankyrin repeat-containing protein, [Aspergillus flavus NRRL3357]
  misc_feature (25)..(814): NCBI GI: 115400003 Blast Desc: conserved [Aspergillus terreus NIH2624] gi|114191256|gb|EAU32956.1| conserved [Aspergillus terreus NIH2624]
  misc_feature (35)..(826): NCBI GI: 154310142 Blast Desc: BC1G_06991 [Botryotinia fuckeliana B05.10] gi|150851552|gb|EDN26745.1| BC1G_06991 [Botryotinia fuckeliana B05.10]
  misc_feature (26)..(712): NCBI GI: 145245835 Blast Desc: An12g00850 [Aspergillus niger] gi|134079883|emb|CAK41015.1| protein product [Aspergillus niger]
  misc_feature (23)..(811): NCBI GI: 255956295 Blast Desc: Pc21g19090 [Penicillium chrysogenum Wisconsin 54-1255] gi|211590611|emb|CAP96806.1| Pc21g19090 [Penicillium chrysogenum Wisconsin 54-1255]
  misc_feature (24)..(817): NCBI GI: 116201761 Blast Desc: CHGG_08765 [Chaetomium globosum CBS 148.51] gi|88177283|gb|EAQ84751.1| CHGG_08765 [Chaetomium globosum CBS 148.51]
  misc_feature (27)..(798): NCBI GI: 238508602 Blast Desc: WD-repeat protein, [Aspergillus flavus NRRL3357] gi|220688381|gb|EED44734.1| WD-repeat protein, [Aspergillus flavus NRRL3357]
  misc_feature (25)..(814): NCBI GI: 256730108 Blast Desc: NECHADRAFT_82774 [Nectria haematococca mpVI 77-13-4]
MDPLVAPRLALDERWEAGSLKLRAEFLKRLYTSPYKEHKDRNPERADGTCEWFTGHPLFKNWQQETSAPLWVSADPGCGKSVLAKYLIDDVFPSNTTRTTCYFFFKDDFEDQRVLEGAFCCILHQLFTQRPSLLLDSILEDFEEQGDQLFTSFSELWRILNGAAAISAETNDEIICVLDALDECVSSTRLVNALTEQYSKKNAVSTLKFLVTSRPYSRIQRDFRDLQNSQPTIHLSGESQEEVDKIAQEVLVSIQQRIEERGEIIHQFDDITKQILCEELTVFDNRSHLWARLILDTIYKAIFLSKSDLRNTIRSLPPTVEDAYENILQKSRDSGKARIILHFVIAANRPLRLSEMAVALTLQADNYQRLQDLQKDLVPSDFLSNAIRETYGLFVVVEDSRIFLLHQTAREFLVRTPHELPGVSTALPSWRHSFDVTESHRLLSEICIRYLLLTDFQSPVGDESAPNSDEEDAFAFREYAASNWADHYREANIADGTKLQALARQLCDVKSPACTHWLKLYGENRVQEPELHHELLDSLLITSYFGLSDLVRIILHQNKMRLDTTGGSSQRTALSWASEKGYHLIVQQLLDRVPKHQVIMKDSLSVFSPTIVNKRDRRGRSPLWYSAAGGHLTIVSQLLLKGAKVDVQDESGLTPLLWASHHGYHGIVTLLLQNGAQQQTDSKYLETRDSKGQTPLHRSAGKGDESLVKILLSCGAEIDAQDRSGQTALIVASKCGHNDVVTQLLDCGAKMELRTHDDRTALMYASELGKNDVIKQLLDRGADINARDIKGFTALILASECGRENVVTQLLDYGTKMNLRTHQKGKFFEVLS

SEQ ID NO: 39411 - DNA, 655 bp, Muscodor strobelii
  misc_feature: SGI EST ID NO. CUFF.94891.0
  misc_feature: Variant of the nucleotide sequence at SEQ ID NO 39409
tgtcagtcaactgcttctaaagggtgccaaagttgatgtgcaggacgaaagtggcctaacaccgctactatgggcatcgcatcacggataccacggtatcgttacacttctgttacagaatggtgctcaacagcaaacagactccaaatatctagaaactagggactcgaaaggtcaaactccacttcatagatctgctggcaaaggggacgaatctcttgtgaaaattctgctgagctgcggtgctgagatcgatgcccaagacagaagcggccaaacagctctgattgtagcctcgaaatgcgggcacaacgacgtagtcacgcagctcctagactgcggtgccaaaatggaacttcgaacccatgatgacaggacggccctcatgtatgcctcagagcttggcaagaacgacgtaattaagcagctactagaccgtggtgcagatatcaatgctcgggacatcaaaggattcacggctctaattttggcctcagaatgtgggcgcgaaaacgtagtcacgcagctcttagactacggtaccaaaatgaatcttcgaacccatcagaaagggaaatttttcgaagtcctctcttagagtgacgcagttaaccggttcatagatagaagcggttctgtaggtctacctgcttcc

SEQ ID NO: 39412 - DNA, 1872 bp, Muscodor strobelii
  misc_feature: SGI cDNA ID NO. 573712
  misc_feature: Reduced expression when VOC is produced
  misc_feature: Encodes the peptide sequence at SEQ ID NO 39413
atggcccaagacagttcaacagtccaaccttatcccataagtccaaacggcaacccgcagcgctatttctatctcggctcgagaaagaacagtcagatcagcccaactaaatcagaatcgagctccttcgccgaaaccgaatcaaagcgtagcctagacacctttgcttcccaccagcggacatattcgaccactagtcaggaaagccgtgacctatccagtccagaaactacgccatccgtcacaagggtgtcactgggcaagcttccctcatcgcaagtcgctgaagttggtggccacgacttgctcgtcgtgaagaatcccagccgaacaccaaagacggctacaatctctacatcacctactacacccacattcgaagcatcatcccaaattccgagcggcccagcctatcaaggcagttccccgcgcaaagtcttcaaacggaaaggctctctgctgaaaacggatgtgaaaatgggcgagccgacggagagtaaaacctacgcagaatcggtgtctaatgggcatccaactgattctcgtcaggagacagagaaggaccagagagaggactcatttgtcaacattgaccatacacaacagtctaccgacggacaagcgttttccgaaaaggagccaataccaaaagtcaacggcatacaagcaaatgggtccagaaagctaaacagtagcgcatcccagatcgtcacagcaagctattccagggcccttaaatcgggccttagcagcgatgacgagccaaagagcaacgacgacgacgagtcatacccagaccttgacgaaatgggaatggatgaaatacaccagacgccgactaggaagtctaacggtggcataaggtgggcgccctggaatgttccgttcaaacgccgaggacagacattagtcgtcttgatgcattcgatgagcatcgtcgcaacggtatctgtgttcttcgctttctgcgccaacccatttgtttggccgttgctgcttctctatctgttacatgtcctcagctccaaggcagcaacagacggatcgctcaaatttcggtccgagtggtttcgcaacagcttcatatggcatttcttcgccgactactatcctgccaggctccacaagacacacgatttaccaccgacgcggaagtacatctttggctatcacccgcacggcatcatctctcacggagcctgggcggctttcgcgacggaggcacttgggtttgctgagaaatttcccggtatcaccaatagtttgttgacattagagtcaaactttcggataccattctaccgcgaatatgtcctaggaatgggcgttcggtccgtatcaaaagagtccatcgtcaacatcctcaacagaggtgggctgaacggcgaaggcatgggacgcgctgttaccatcgtcgtaggcggagctcgggaatcgctgcaagctcatcctcgaacactcaacctcatcttaagggagcgcaaaggcttcatcaagctagcagtccgctgcggcgccgacttagtgcccgtcctagcgtttggcgagaacgacctctatgatcagctccaggcccatgagcaccccatgatgcataagatacagatgtttatactcaaggtttggaagttcacgctgccgttcctgcacgggaggggtatttttaattatgacgttggatttatgccgtatcgcaggccgctgaacatcgtggttggggcgccgattaaagtacggcagtctaactcggtgagtcaggaggagattgataggttgcatgggttgtatattgcggagctggagaagctgtgggataggtataaggatgagttcgcgcctgataggagggaggatatgcgtattttgccttga

SEQ ID NO: 39413 - protein, 623 aa, Muscodor strobelii
  misc_feature: SGI Peptide ID NO. 573712
  misc_feature (319)..(620): Pfam Id: PF03982 Pfam Desc: Diacylglycerol acyltransferase
  misc_feature (351)..(611): Pfam Id: PF03982 Pfam Desc: Diacylglycerol acyltransferase
  misc_feature (250)..(622): NCBI GI: 38567182 Blast Desc: related to diacylglycerol acyltransferase type 2a [Neurospora crassa]
  misc_feature (250)..(622): NCBI GI: 164427816 Blast Desc: NCU02665 [Neurospora crassa OR74A] gi|157071895|gb|EAA36202.2| conserved [Neurospora crassa OR74A]
  misc_feature (211)..(622): NCBI GI: 171684385 Blast Desc: protein product [Podospora anserina] gi|170942153|emb|CAP67805.1| protein product [Podospora anserina]
  misc_feature (164)..(622): NCBI GI: 261357355 Blast Desc: diacylglycerol O-acyltransferase 2B [Verticillium albo-atrum VaMs.102]
  misc_feature (232)..(622): NCBI GI: 256734301 Blast Desc: NECHADRAFT_74422 [Nectria haematococca mpVI 77-13-4]
  misc_feature (219)..(622): NCBI GI: 46108934 Blast Desc: FG01349.1 [Gibberella zeae PH-1]
  misc_feature (280)..(622): NCBI GI: 242775737 Blast Desc: diacylglycerol acyltransferase type 2A [Talaromyces stipitatus ATCC 10500] gi|218722319|gb|EED21737.1| diacylglycerol acyltransferase type 2A [Talaromyces stipitatus ATCC 10500]
  misc_feature (198)..(622): NCBI GI: 259481078 Blast Desc: TPA: diacylglycerol acyltransferase type 2A (AFU_orthologue; AFUA_7G03700) [Aspergillus nidulans FGSC A4]
  misc_feature (282)..(622): NCBI GI: 212532507 Blast Desc: diacylglycerol acyltransferase type 2A [Penicillium marneffei ATCC 18224] gi|210071774|gb|EEA25863.1| diacylglycerol acyltransferase type 2A [Penicillium marneffei ATCC 18224]
  misc_feature (286)..(621): NCBI GI: 238844819 Blast Desc: diacylglycerol o-acyltransferase [Microsporum canis CBS 113480]
  misc_feature (288)..(622): SWISSPROT Homolog: EC 2.3.1.20 Diacylglycerol O-acyltransferase
  misc_feature: Useful for introducing or modulating the production of volatile compounds
MAQDSSTVQPYPISPNGNPQRYFYLGSRKNSQISPTKSESSSFAETESKRSLDTFASHQRTYSTTSQESRDLSSPETTPSVTRVSLGKLPSSQVAEVGGHDLLVVKNPSRTPKTATISTSPTTPTFEASSQIPSGPAYQGSSPRKVFKRKGSLLKTDVKMGEPTESKTYAESVSNGHPTDSRQETEKDQREDSFVNIDHTQQSTDGQAFSEKEPIPKVNGIQANGSRKLNSSASQIVTASYSRALKSGLSSDDEPKSNDDDESYPDLDEMGMDEIHQTPTRKSNGGIRWAPWNVPFKRRGQTLVVLMHSMSIVATVSVFFAFCANPFVWPLLLLYLLHVLSSKAATDGSLKFRSEWFRNSFIWHFFADYYPARLHKTHDLPPTRKYIFGYHPHGIISHGAWAAFATEALGFAEKFPGITNSLLTLESNFRIPFYREYVLGMGVRSVSKESIVNILNRGGLNGEGMGRAVTIVVGGARESLQAHPRTLNLILRERKGFIKLAVRCGADLVPVLAFGENDLYDQLQAHEHPMMHKIQMFILKVWKFTLPFLHGRGIFNYDVGFMPYRRPLNIVVGAPIKVRQSNSVSQEEIDRLHGLYIAELEKLWDRYKDEFAPDRREDMRILP

SEQ ID NO: 39414 - DNA, 4636 bp, Muscodor strobelii
  misc_feature: SGI EST ID NO. CUFF.95172.1
  misc_feature: Variant of the nucleotide sequence at SEQ ID NO 39412
ggaggctatccttgggatctcactcgtcttagaggacaccgacagggatctggtattctaagcctggctagcagcgccaagagccgcgttaaccaccattaaaccttcataacgtctcacaaggcgcggcaagcaacgaggtgctgagacactttgacccgacattgtcttatcgacgaacaaactcccactagtctagtctcgcacctatggtagcgggcgcatttaacatgagcgacaatgcttaaacggctctgctgttgtctcccctttgatgatgaatcaagacccgaacatcactaccggccaactaaaatggctgaccttagcatccgcaatctcacagcaacaccacttgaacttaagatcgtcgagcgctttgatggccatcccaatggcgaggaaaagaaattatctagcctcgcacataaaataaatcctttcaactcatccaagccggagcccgtgagcaaaacggtaaaaatacagggcgagggcaagaatcctgaagatgtttcgtttccgatgagtcccttcgcaacctgtgtcacggatgtccgcccaccggaacccggacaggaggttttgcgattaacatttgagtctgagggctaccgataccaagcagacatcccaagcgcgtcccaacgcagcacggtgatgacgagattggatggcgcacccaacgagtacacagttgtctatgttgaagcaggtagttgcttagccatcttcagctccgctcatctctccagttggatgcgggagctaagtgatgagtatcccttgacagcactttcaatacccgggacgcacaacagcccgacatgtcatgtcgcattaccatcagtccgatgccaggccgtcggcatacgagaacagctagaaaatggtgttcggttctttgatattcgggttaatgtaaatcgggataacgacgacctgacgctagtccatagcgcattccccatctcccttacggggagcaagtatttcaaagaattaattgacgtcgtctactcctaccttgatgccaatccctcggagacgttaatcatgagcatcaagagagaaggtacaggaagaggcacagatcaaaaactgtctctagttctcaaagagaaatacaaccacgacgagaagcgatggtacacagagccgaggttaccaaaactcggcgaagtccgtggcaggattattctactacgacgacatcacaacgaccagagtcttaacaaagaatggggcggccgcggttggggtcttgatgccagcgcatggcccgacaactgcgaagacgggcttttaggcagtggaatagcgcgtgtacaggatttttacgagatagaccagtccaccaacatccagaagaagatcggactggcggagaagcatctcgagcgcgcagcggagggcgtttgccacttaccaggaacagaaggctatcgtaaagatgcaccgattacacccttcttcatcaacttcctaagcgcaagtaatttcttccgagctaactgctggccagaaaagatcgcggccaaggtcaatccagcaattattcaatatctctgtacaacacatggtgaggacggtaaaggttctcttggattgaaagttggtgatgctgcgacgggcatcgttgtcaccgactgggttggatttcacggcaattgggacctcatccgatgtatcgttgggtggaacgctaagcttcagttgaagcagtgattttggcgtaacataggtatatgatagcatatatatacgttccgtatagttatctatcttgtatagaaattttccttgaatagatcgcaactaagtcgaggacgtttgagcaaggagtactcaaggactcgacccatgtcgcaagggtctcatcgggacagcttcactgcagtgttgaactttcagctgccgcctgcattcgtgtacctaaggtagcgggcctgtcagggcgggaagccagatccacaggccactctaccgagcgcgcccagccacaaaggaccgtcaccagagcgtcacgtcacagcacaggacaacgtcattggaggtccttcggtgcttcgagttgcacaccaaaccaacttcagctcttgtgtcccacaccctcgcccgatctcacgttgctaatgcgagtattgcgtcttcggtgtattcgacgtaatccatctcgatcttttcctacggcattcctttcttttttttgaaaagctctcttggctagcttcacaaatgtacatgtaaaatgcagctgtttgcgactaggttttgatactgtctcactgtacctcggtatcccagcctgagcgaacctacagcctcgataatgacctaataactctcgggcgcttcatatacatctttaccgattgcgcactcgctatctaggttcatctttcgaagctacagattaaactcaaagcccggcccgccatttgtcgcagatggcccaagacagttcaacagtccaaccttatcccataagtccaaacggcaacccgcagcgctatttctatctcggctcgagaaagaacagtcagatcagcccaactaaatcagaatcgagctccttcgccgaaaccgaatcaaagcgtagcctagacacctttgcttcccaccagcggacatattcgaccactagtcaggaaagccgtgacctatccagtccagaaactacgccatccgtcacaagggtgtcactgggcaagcttccctcatcgcaagtcgctgaagttggtggccacgacttgctcgtcgtgaagaatcccagccgaacaccaaagacggctacaatctctacatcacctactacacccacattcgaagcatcatcccaaattccgagcggcccagcctatcaaggcagttccccgcgcaaagtcttcaaacggaaaggctctctgctgaaaacggatgtgaaaatgggcgagccgacggagagtaaaacctacgcagaatcggtgtctaatgggcatccaactgattctcgtcaggagacagagaaggaccagagagaggactcatttgtcaacattgaccatacacaacagtctaccgacggacaagcgttttccgaaaaggagccaataccaaaagtcaacggcatacaagcaaatgggtccagaaagctaaacagtagcgcatcccagatcgtcacagcaagctattccagggcccttaaatcgggccttagcagcgatgacgagccaaagagcaacgacgacgacgagtcatacccagaccttgacgaaatgggaatggatgaaatacaccagacgccgactaggaagtctaacggtggcataaggtgggcgccctggaatgttccgttcaaacgccgaggacagacattagtcgtcttgatgcattcgatgagcatcgtcgcaacggtatctgtgttcttcgctttctgcgccaacccatttgtttggccgttgctgcttctctatctgttacatgtcctcagctccaaggcagcaacagacggatcgctcaaatttcggtccgagtggtttcgcaacagcttcatatggcatttcttcgccgactactatcctgccaggctccacaagacacacgatttaccaccgacgcggaagtacatctttggctatcacccgcacggcatcatctctcacggagcctgggcggctttcgcgacggaggcacttgggtttgctgagaaatttcccggtatcaccaatagtttgttgacattagagtcaaactttcggataccattctaccgcgaatatgtcctaggaatgggcgttcggtccgtatcaaaagagtccatcgtcaacatcctcaacagaggtgggctgaacggcgaaggcatgggacgcgctgttaccatcgtcgtaggcggagctcgggaatcgctgcaagctcatcctcgaacactcaacctcatcttaagggagcgcaaaggcttcatcaagctagcagtccgctgcggcgccgacttagtgcccgtcctagcgtttggcgagaacgacctctatgatcagctccaggcccatgagcaccccatgatgcataagatacagatgtttatactcaaggtttggaagttcacgctgccgttcctgcacgggaggggtatttttaattatgacgttggatttatgccgtatcgcaggccgctgaacatcgtggttggggcgccgattaaagtacggcagtctaactcggtgagtcaggaggagattgataggttgcatgggttgtatattgcggagctggagaagctgtgggataggtataaggatgagttcgcgcctgataggagggaggatatgcgtattttgccttgagttgggatttttagatataaatttgtggtattggtatggttatggttatggtgtattatgatagcgtcggtggtttattggtagcattcctaggtggatataggcagttctatgcattggaattggtgtataaagatggaatacattgatttgtgactgggacggtttttcttgtctcctgggttttgtttaatacgatgtatgattttaaccacggggcttctcttttgagtgtttttgtgagtgcgacttattgatatttcgctccttgactcattttgatttcatataatatgttctcctatatcacttcc

SEQ ID NO: 39415 - DNA, 1413 bp, Muscodor strobelii
  misc_feature: SGI cDNA ID NO. 573713
  misc_feature: Encodes the peptide sequence at SEQ ID NO 39416
atggctgaccttagcatccgcaatctcacagcaacaccacttgaacttaagatcgtcgagcgctttgatggccatcccaatggcgaggaaaagaaattatctagcctcgcacataaaataaatcctttcaactcatccaagccggagcccgtgagcaaaacggtaaaaatacagggcgagggcaagaatcctgaagatgtttcgtttccgatgagtcccttcgcaacctgtgtcacggatgtccgcccaccggaacccggacaggaggttttgcgattaacatttgagtctgagggctaccgataccaagcagacatcccaagcgcgtcccaacgcagcacggtgatgacgagattggatggcgcacccaacgagtacacagttgtctatgttgaagcaggtagttgcttagccatcttcagctccgctcatctctccagttggatgcgggagctaagtgatgagtatcccttgacagcactttcaatacccgggacgcacaacagcccgacatgtcatgtcgcattaccatcagtccgatgccaggccgtcggcatacgagaacagctagaaaatggtgttcggttctttgatattcgggttaatgtaaatcgggataacgacgacctgacgctagtccatagcgcattccccatctcccttacggggagcaagtatttcaaagaattaattgacgtcgtctactcctaccttgatgccaatccctcggagacgttaatcatgagcatcaagagagaaggtacaggaagaggcacagatcaaaaactgtctctagttctcaaagagaaatacaaccacgacgagaagcgatggtacacagagccgaggttaccaaaactcggcgaagtccgtggcaggattattctactacgacgacatcacaacgaccagagtcttaacaaagaatggggcggccgcggttggggtcttgatgccagcgcatggcccgacaactgcgaagacgggcttttaggcagtggaatagcgcgtgtacaggatttttacgagatagaccagtccaccaacatccagaagaagatcggactggcggagaagcatctcgagcgcgcagcggagggcgtttgccacttaccaggaacagaaggctatcgtaaagatgcaccgattacacccttcttcatcaacttcctaagcgcaagtaatttcttccgagctaactgctggccagaaaagatcgcggccaaggtcaatccagcaattattcaatatctctgtacaacacatggtgaggacggtaaaggttctcttggattgaaagttggtgatgctgcgacgggcatcgttgtcaccgactgggttggatttcacggcaattgggacctcatccgatgtatcgttgggtggaacgctaagcttcagttgaagcagtga

SEQ ID NO: 39416 - protein, 470 aa, Muscodor strobelii
  misc_feature: SGI Peptide ID NO. 573713
  misc_feature (161)..(300): Pfam Id: PF00388 Pfam Desc: Phosphatidylinositol-specific phospholipase C, X domain
  misc_feature (180)..(300): Pfam Id: PF00388 Pfam Desc: Phosphatidylinositol-specific phospholipase C, X domain
  misc_feature (1)..(470): NCBI GI: 256735289 Blast Desc: NECHADRAFT_57455 [Nectria haematococca mpVI 77-13-4]
  misc_feature (1)..(470): NCBI GI: 46106429 Blast Desc: FG00423.1 [Gibberella zeae PH-1]
  misc_feature (1)..(469): NCBI GI: 39945702 Blast Desc: MGG_04834 [Magnaporthe grisea 70-15] gi|145021317|gb|EDK05446.1| MGG_04834 [Magnaporthe grisea 70-15]
  misc_feature (1)..(470): NCBI GI: 156053133 Blast Desc: SS1G_06734 [Sclerotinia sclerotiorum 1980] gi|154704512|gb|EDO04251.1| SS1G_06734 [Sclerotinia sclerotiorum 1980]
  misc_feature (4)..(470): NCBI GI: 239608624 Blast Desc: phosphatidylinositol phospholipase C [Ajellomyces dermatitidis ER-3]
  misc_feature (4)..(470): NCBI GI: 212542399 Blast Desc: phosphatidylinositol phospholipase C [Penicillium marneffei ATCC 18224] gi|210066261|gb|EEA20354.1| phosphatidylinositol phospholipase C [Penicillium marneffei ATCC
  misc_feature (4)..(470): NCBI GI: 261191821 Blast Desc: phosphatidylinositol phospholipase C [Ajellomyces dermatitidis SLH14081] gi|239589634|gb|EEQ72277.1| phosphatidylinositol phospholipase C [Ajellomyces dermatitidis
  misc_feature (4)..(470): NCBI GI: 255947566 Blast Desc: Pc22g05150 [Penicillium chrysogenum Wisconsin 54-1255] gi|211591567|emb|CAP97803.1| Pc22g05150 [Penicillium chrysogenum Wisconsin 54-1255]
  misc_feature (4)..(470): NCBI GI: 258567842 Blast Desc: conserved [Uncinocarpus reesii 1704] gi|237906111|gb|EEP80512.1| conserved [Uncinocarpus reesii 1704]
  misc_feature (4)..(470): NCBI GI: 240105282 Blast Desc: Phosphatidylinositol-specific phospholipase C, X domain containing protein [Coccidioides posadasii C735 delta SOWgp]
  misc_feature (146)..(418): SWISSPROT Homolog: EC 4.6.1.13 Phosphatidylinositol diacylglycerol-lyase
MADLSIRNLTATPLELKIVERFDGHPNGEEKKLSSLAHKINPFNSSKPEPVSKTVKIQGEGKNPEDVSFPMSPFATCVTDVRPPEPGQEVLRLTFESEGYRYQADIPSASQRSTVMTRLDGAPNEYTVVYVEAGSCLAIFSSAHLSSWMRELSDEYPLTALSIPGTHNSPTCHVALPSVRCQAVGIREQLENGVRFFDIRVNVNRDNDDLTLVHSAFPISLTGSKYFKELIDVVYSYLDANPSETLIMSIKREGTGRGTDQKLSLVLKEKYNHDEKRWYTEPRLPKLGEVRGRIILLRRHHNDQSLNKEWGGRGWGLDASAWPDNCEDGLLGSGIARVQDFYEIDQSTNIQKKIGLAEKHLERAAEGVCHLPGTEGYRKDAPITPFFINFLSASNFFRANCWPEKIAAKVNPAIIQYLCTTHGEDGKGSLGLKVGDAATGIVVTDWVGFHGNWDLIRCIVGWNAKLQLKQ

SEQ ID NO: 39417 - DNA, 4636 bp, Muscodor strobelii; identical to SEQ ID NO: 39414
  misc_feature: SGI EST ID NO. CUFF.95172.1
  misc_feature: Variant of the nucleotide sequence at SEQ ID NO 39415

SEQ ID NO: 39418 - DNA, 672 bp, Muscodor strobelii
  misc_feature: SGI cDNA ID NO. 573714
  misc_feature: Encodes the peptide sequence at SEQ ID NO 39419
atgagcatcaagagagaaggtacaggaagaggcacagatcaaaaactgtctctagttctcaaagagaaatacaaccacgacgagaagcgatggtacacagagccgaggttaccaaaactcggcgaagtccgtggcaggattattctactacgacgacatcacaacgaccagagtcttaacaaagaatggggcggccgcggttggggtcttgatgccagcgcatggcccgacaactgcgaagacgggcttttaggcagtggaatagcgcgtgtacaggatttttacgagatagaccagtccaccaacatccagaagaagatcggactggcggagaagcatctcgagcgcgcagcggagggcgtttgccacttaccaggaacagaaggctatcgtaaagatgcaccgattacacccttcttcatcaacttcctaagcgcaagtaatttcttccgagctaactgctggccagaaaagatcgcggccaaggtcaatccagcaattattcaatatctctgtacaacacatggtgaggacggtaaaggttctcttggattgaaagttggtgatgctgcgacgggcatcgttgtcaccgactgggttggatttcacggcaattgggacctcatccgatgtatcgttgggtggaacgctaagcttcagttgaagcagtga

SEQ ID NO: 39419 - protein, 223 aa, Muscodor strobelii
  misc_feature: SGI Peptide ID NO. 573714
  misc_feature (1)..(223): NCBI GI: 256735289 Blast Desc: NECHADRAFT_57455 [Nectria haematococca mpVI 77-13-4]
  misc_feature (1)..(222): NCBI GI: 39945702 Blast Desc: MGG_04834 [Magnaporthe grisea 70-15] gi|145021317|gb|EDK05446.1| MGG_04834 [Magnaporthe grisea 70-15]
  misc_feature (1)..(223): NCBI GI: 46106429 Blast Desc: FG00423.1 [Gibberella zeae PH-1]
  misc_feature (1)..(223): NCBI GI: 164424913 Blast Desc: NCU09135 [Neurospora crassa OR74A] gi|157070712|gb|EAA29671.2| conserved [Neurospora crassa OR74A]
  misc_feature (1)..(223): NCBI GI: 156053133 Blast Desc: SS1G_06734 [Sclerotinia sclerotiorum 1980] gi|154704512|gb|EDO04251.1| SS1G_06734 [Sclerotinia sclerotiorum 1980]
  misc_feature (1)..(222): NCBI GI: 171695264 Blast Desc: protein product [Podospora anserina] gi|170947874|emb|CAP60038.1| protein product [Podospora anserina]
  misc_feature (1)..(223): NCBI GI: 240105282 Blast Desc: Phosphatidylinositol-specific phospholipase C, X domain containing protein [Coccidioides posadasii C735 delta SOWgp]
  misc_feature (1)..(223): NCBI GI: 119194513 Blast Desc: CIMG_01631 [Coccidioides immitis RS]
  misc_feature (1)..(223): NCBI GI: 255947566 Blast Desc: Pc22g05150 [Penicillium chrysogenum Wisconsin 54-1255] gi|211591567|emb|CAP97803.1| Pc22g05150 [Penicillium chrysogenum Wisconsin 54-1255]
  misc_feature (1)..(223): NCBI GI: 115391073 Blast Desc: conserved [Aspergillus terreus NIH2624] gi|114193965|gb|EAU35665.1| conserved [Aspergillus terreus NIH2624]
MSIKREGTGRGTDQKLSLVLKEKYNHDEKRWYTEPRLPKLGEVRGRIILLRRHHNDQSLNKEWGGRGWGLDASAWPDNCEDGLLGSGIARVQDFYEIDQSTNIQKKIGLAEKHLERAAEGVCHLPGTEGYRKDAPITPFFINFLSASNFFRANCWPEKIAAKVNPAIIQYLCTTHGEDGKGSLGLKVGDAATGIVVTDWVGFHGNWDLIRCIVGWNAKLQLKQ

SEQ ID NO: 39420 - DNA, 4636 bp, Muscodor strobelii; identical to SEQ ID NO: 39414
  misc_feature: SGI EST ID NO. CUFF.95172.1
  misc_feature: Variant of the nucleotide sequence at SEQ ID NO 39418

SEQ ID NO: 39421 - DNA, 1512 bp, Muscodor strobelii
  misc_feature: SGI cDNA ID NO. 573715
  misc_feature: Encodes the peptide sequence at SEQ ID NO 39422
atgaggccccagttgatcagtgggaggctccaagcctttagtttatgcctgcggcaaatacgaaaccagtcgaattggtcacgaaaagtgagcatatcggtctctcccaatgcctcgaagtataaagtcttgaacaacctcaagaactatgccctaaaaactgaaaaggattatcctaaagatcaggacactgcttacggcgctgcaattcttgcatcaaaagagttcacaaattggcttgaagatgatgagttcatgaccaatgtcctagccacactcttcatgaggcaggagcacgatcgctcaaatcatcagagcgtaaatgttctcactggcgtggttgacgccctcagtccacaaagcctatctgtccaacctcgcgcaggattttcaataatatctggcctctctaagagcatactcccagatttgtgggacagagaaacattcgcagggccgaatcaggacatcacatcgagcgtatcttctgtgacgaaccctctagtcggcagtaccaatgctctcgagttcacattgccgcttgcaaacacggtgttccagaatggaaggcgatctactctctatgctcgcacatggagtagagatggcgcgggcctgacagagatctcaccgaggattccgaaaacgactcagcggatagggtcacctaaaactacagcagaccacacattatcgctgataccgctgatgcccttgacgcctcctagaaagattgtcgccggccttggcaatattgtgcgtcaagtcgaggttgacggcaacccaacgccagcctcgaaggagcttgaacgaatcgtgcctcggatttttgaaagaagagcacaacgcgatcctgccttcgttccccagtcgattggagtgtggtgctgggtcattccgccccatgtgatggagtctcaaagtttcgccgggctgcggcttttctctgcggactcgacggaggcagagacagatattgcctggcattcaatgaatcttttctcgaaactcctgtcatctggatgccacctacacaaaatcctgagcggtggcggcggctggggagcaaaacaaggtttactgtccttggatccggagactagcttttccttgcctggacaggacgatgatattgaaatgttcatcaaatcattcgaagagagaaacagtgctaatccgacaaacgggatcgtgacacccggctcatcccttctcttctgcgcagagccacattggaccgatacagaagccaaaacgggcccgttgctactaccgtctcaaggaattagcttaggagtgacgccaaatcctgatgaaacaccacaagttgaagatatctccgatgcggttgatataagtgaggaccatttcggggtaacgtctgcgactggcctcttccttagaggcgttcccgaactcgcaggcattagtgggaaagatgaggagcccaatggatctgtgggaaggataatgaccaaggtagacgcgccaaatgcgcagttcttgctttag

SEQ ID NO: 39422 - protein, 503 aa, Muscodor strobelii
  misc_feature: SGI Peptide ID NO. 573715
  misc_feature (166)..(501): NCBI GI: 145603151 Blast Desc: MGG_13826 [Magnaporthe grisea 70-15] gi|145011452|gb|EDJ96108.1| MGG_13826 [Magnaporthe grisea 70-15]
  misc_feature (67)..(499): NCBI GI: 171687539 Blast Desc: protein product [Podospora anserina] gi|170943731|emb|CAP69383.1| protein product [Podospora anserina]
  misc_feature (18)..(467): NCBI GI: 256732664 Blast Desc: NECHADRAFT_38509 [Nectria haematococca mpVI 77-13-4]
  misc_feature (10)..(467): NCBI GI: 46124947 Blast Desc: FG06851.1 [Gibberella zeae PH-1]
  misc_feature (44)..(475): NCBI GI: 116180666 Blast Desc: CHGG_00961 [Chaetomium globosum CBS 148.51] gi|88185258|gb|EAQ92726.1| CHGG_00961 [Chaetomium globosum CBS 148.51]
  misc_feature (70)..(270): NCBI GI: 261356138 Blast Desc: conserved [Verticillium albo-atrum VaMs.102]
  misc_feature (28)..(369): NCBI GI: 154313871 Blast Desc: BC1G_05785 [Botryotinia fuckeliana B05.10] gi|150849367|gb|EDN24560.1| BC1G_05785 [Botryotinia fuckeliana B05.10]
  misc_feature (85)..(366): NCBI GI: 164424261 Blast Desc: NCU07423 [Neurospora crassa OR74A] gi|157070441|gb|EAA29188.2| [Neurospora crassa OR74A]
  misc_feature (69)..(369): NCBI GI: 156061461 Blast Desc: SS1G_02875 [Sclerotinia sclerotiorum 1980] gi|154700277|gb|EDO00016.1| SS1G_02875 [Sclerotinia sclerotiorum 1980]
  misc_feature (171)..(410): NCBI GI: 189208039 Blast Desc: PTRG_10021 [Pyrenophora tritici-repentis Pt-1C-BFP] gi|187976446|gb|EDU43072.1| PTRG_10021 [Pyrenophora tritici-repentis Pt-1C-BFP]
MRPQLISGRLQAFSLCLRQIRNQSNWSRKVSISVSPNASKYKVLNNLKNYALKTEKDYPKDQDTAYGAAILASKEFTNWLEDDEFMTNVLATLFMRQEHDRSNHQSVNVLTGVVDALSPQSLSVQPRAGFSIISGLSKSILPDLWDRETFAGPNQDITSSVSSVTNPLVGSTNALEFTLPLANTVFQNGRRSTLYARTWSRDGAGLTEISPRIPKTTQRIGSPKTTADHTLSLIPLMPLTPPRKIVAGLGNIVRQVEVDGNPTPASKELERIVPRIFERRAQRDPAFVPQSIGVWCWVIPPHVMESQSFAGLRLFSADSTEAETDIAWHSMNLFSKLLSSGCHLHKILSGGGGWGAKQGLLSLDPETSFSLPGQDDDIEMFIKSFEERNSANPTNGIVTPGSSLLFCAEPHWTDTEAKTGPLLLPSQGISLGVTPNPDETPQVEDISDAVDISEDHFGVTSATGLFLRGVPELAGISGKDEEPNGSVGRIMTKVDAPNAQFLL

SEQ ID NO: 39423 - DNA, 1817 bp, Muscodor strobelii
  misc_feature: SGI EST ID NO. CUFF.94906.0
  misc_feature: Variant of the nucleotide sequence at SEQ ID NO 39421
cccagactggttaaatgtggctcaagctagtgtgggggctacctcttccaccgtcgcaatgcaactccagtgccaatgagatctcgcgtttccaatgaatcattcaacacggtcctcagaaaatgaggccccagttgatcagtgggaggctccaagcctttagtttatgcctgcggcaaatacgaaaccagtcgaattggtcacgaaaagtgagcatatcggtctctcccaatgcctcgaagtataaagtcttgaacaacctcaagaactatgccctaaaaactgaaaaggattatcctaaagatcaggacactgcttacggcgctgcaattcttgcatcaaaagagttcacaaattggcttgaagatgatgagttcatgaccaatgtcctagccacactcttcatgaggcaggagcacgatcgctcaaatcatcagagcgtaaatgttctcactggcgtggttgacgccctcagtccacaaagcctatctgtccaacctcgcgcaggattttcaataatatctggcctctctaagagcatactcccagatttgtgggacagagaaacattcgcagggccgaatcaggacatcacatcgagcgtatcttctgtgacgaaccctctagtcggcagtaccaatgctctcgagttcacattgccgcttgcaaacacggtgttccagaatggaaggcgatctactctctatgctcgcacatggagtagagatggcgcgggcctgacagagatctcaccgaggattccgaaaacgactcagcggatagggtcacctaaaactacagcagaccacacattatcgctgataccgctgatgcccttgacgcctcctagaaagattgtcgccggccttggcaatattgtgcgtcaagtcgaggttgacggcaacccaacgccagcctcgaaggagcttgaacgaatcgtgcctcggatttttgaaagaagagcacaacgcgatcctgccttcgttccccagtcgattggagtgtggtgctgggtcattccgccccatgtgatggagtctcaaagtttcgccgggctgcggcttttctctgcggactcgacggaggcagagacagatattgcctggcattcaatgaatcttttctcgaaactcctgtcatctggatgccacctacacaaaatcctgagcggtggcggcggctggggagcaaaacaaggtttactgtccttggatccggagactagcttttccttgcctggacaggacgatgatattgaaatgttcatcaaatcattcgaagagagaaacagtgctaatccgacaaacgggatcgtgacacccggctcatcccttctcttctgcgcagagccacattggaccgatacagaagccaaaacgggcccgttgctactaccgtctcaaggaattagcttaggagtgacgccaaatcctgatgaaacaccacaagttgaagatatctccgatgcggttgatataagtgaggaccatttcggggtaacgtctgcgactggcctcttccttagaggcgttcccgaactcgcaggcattagtgggaaagatgaggagcccaatggatctgtgggaaggataatgaccaaggtagacgcgccaaatgcgcagttcttgctttagaaatcatgcgtacattcagatgtgacccaacacaacacatgcggctaagatgtggtcactggagtggtgtaaaacaactgtatatacaatgtactccaatatgatctatagaatatcatgaataggtagcaagcagaatggtctcataatgtcgcacttcaattcatattagaagtgactttt

SEQ ID NO: 39424 - DNA, 975 bp, Muscodor strobelii
  misc_feature: SGI cDNA ID NO. 573716
  misc_feature: Encodes the peptide sequence at SEQ ID NO 39425
atggatcgcagtcttgacgagattgttgctgagtccaagggcaacaacaatcgcggcggaaaccgtcgtcgccgcggcggcggtggtggcagcgaccgcagccgacagcctcgagaacgcgactcttacccgcgcgatggcgtaagaaagtccactagagaagactccagaggtctagactccgattgggtccacgacaagttcgagggctttgactcccgcgatcgtccccgaaactcccgccgaagacgtgattcgcccgagcagtcagtcaaccctacaaccatcatccctgcccgcagccttgcttacttcttccacagagacagccgaggcaccaagatccgcgtcgagaacttgcattacgacctctccagagaagacctcgatggcctcttcaacaagatcggacccgtcgccaagctagacctactctacgaccgagcaggacgctcggaaggtgtcgcatatgtcacttacgaagatcgcgaagatgcttccgaagcaatgcgtgaatacaacggcgccaacgccaagggacaacccatccgcatgagcttcgtcaactcagctcctagacgcaaccccttcgacaacgcccacatgcctggcaggcctcttgcagagcgcgttactcgcgcgcgatctcgatcccccaatggccgtggaggtgaaagaatcgatcgctacgtcccagaaggcggtcgccggtctcgcagccccagaccccagcgccaacgtggcggcagacgcgcgggagccagacgcgagaacaacagcaacaataacggaggagagaattcaggacgcgccacaggtcgtgatggtcgccccaagaagacacaggaggagctggatgctgagatggcggattacttcggcaccagtggtggtaatgaggctgcgccggagaagagcgagactaccgctgcccctgcggctgcggctgtggatgatatcgatatgatcgagtag

SEQ ID NO: 39425 - protein, 324 aa, Muscodor strobelii
  misc_feature: SGI Peptide ID NO. 573716
  misc_feature (115)..(185): Pfam Id: PF00076 Pfam Desc: RNA recognition motif. (a.k.a. RRM, RBD, or RNP domain)
  misc_feature (1)..(324): NCBI GI: 256733109 Blast Desc: NECHADRAFT_104111 [Nectria haematococca mpVI 77-13-4]
  misc_feature (1)..(322): NCBI GI: 85090449 Blast Desc: NCU07421 [Neurospora crassa OR74A] gi|28919783|gb|EAA29186.1| NCU07421 [Neurospora crassa OR74A]
  misc_feature (43)..(324): NCBI GI: 171687535 Blast Desc: protein product [Podospora anserina] gi|170943729|emb|CAP69381.1| protein product [Podospora anserina]
  misc_feature (1)..(324): NCBI GI: 46124955 Blast Desc: FG06855.1 [Gibberella zeae PH-1]
  misc_feature (1)..(323): NCBI GI: 39944834 Blast Desc: MGG_04399 [Magnaporthe grisea 70-15] gi|145011449|gb|EDJ96105.1| MGG_04399 [Magnaporthe grisea 70-15]
  misc_feature (1)..(324): NCBI GI: 119183879 Blast Desc: conserved [Coccidioides immitis RS]
  misc_feature (1)..(324): NCBI GI: 119479649 Blast Desc: RNA binding domain protein [Neosartorya fischeri NRRL 181] gi|119408007|gb|EAW17956.1| RNA binding domain protein [Neosartorya fischeri NRRL 181]
  misc_feature (1)..(324): NCBI GI: 121713216 Blast Desc: RNA binding protein, [Aspergillus clavatus NRRL 1] gi|119402372|gb|EAW12793.1| RNA binding protein, [Aspergillus clavatus NRRL 1]
  misc_feature (1)..(324): NCBI GI: 240109724 Blast Desc: RNA recognition motif containing protein [Coccidioides posadasii C735 delta SOWgp]
  misc_feature (49)..(324): NCBI GI: 258570675 Blast Desc: UREG_03658 [Uncinocarpus reesii 1704] gi|237904411|gb|EEP78812.1| UREG_03658 [Uncinocarpus reesii 1704]
MDRSLDEIVAESKGNNNRGGNRRRRGGGGGSDRSRQPRERDSYPRDGVRKSTREDSRGLDSDWVHDKFEGFDSRDRPRNSRRRRDSPEQSVNPTTIIPARSLAYFFHRDSRGTKIRVENLHYDLSREDLDGLFNKIGPVAKLDLLYDRAGRSEGVAYVTYEDREDASEAMREYNGANAKGQPIRMSFVNSAPRRNPFDNAHMPGRPLAERVTRARSRSPNGRGGERIDRYVPEGGRRSRSPRPQRQRGGRRAGARRENNSNNNGGENSGRATGRDGRPKKTQEELDAEMADYFGTSGGNEAAPEKSETTAAPAAAAVDDIDMIE

SEQ ID NO: 39426 - DNA, 2194 bp, Muscodor strobelii
  misc_feature: SGI EST ID NO. CUFF.95128.6
  misc_feature: Variant of the nucleotide sequence at SEQ ID NO 39424
cttttatattcctgtcgcatatataccatcttcaaaatggatcgcagtcttgacgagattgttgctgagtccaagggcaacaacaatcgcggcggaaaccgtcgtcgccgcggcggcggtggtggcagcgaccgcagccgacagcctcgagaacgcgactcttacccgcgcgatggcgtaagaaagtccactagagaagactccagaggtctagactccgattgggtccacgacaagttcgagggctttgactcccgcgatcgtccccgaaactcccgccgaagacgtgattcgcccgagcaagacagccgaggcaccaagatccgcgtcgagaacttgcattacgacctctccagagaagacctcgatggcctcttcaacaagatcggacccgtcgccaagctagacctactctacgaccgagcaggacgctcggaaggtgtcgcatatgtcacttacgaagatcgcgaagatgcttccgaagcaatgcgtgaatacaacggcgccaacgccaagggacaacccatccgcatgagcttcgtcaactcagctcctagacgcaaccccttcgacaacgcccacatgcctggcaggcctcttgcagagcgcgttactcgcgcgcgatctcgatcccccaatggccgtggaggtgaaagaatcgatcgctacgtcccagaaggcggtcgccggtctcgcagccccagaccccagcgccaacgtggcggcagacgcgcgggagccagacgcgagaacaacagcaacaataacggaggagagaattcaggacgcgccacaggtcgtgatggtcgccccaagaagacacaggaggagctggatgctgagatggcggattacttcggcaccagtggtggtaatgaggctgcgccggagaagagcgagactaccgctgcccctgcggctgcggctgtggatgatatcgatatgatcgagtagcgcccgcctcatggcgcgtattgatgttgcataggtggcatggattacctatattgtacagaactacgagtgtggcatgactgactgaataaagctcagtttatagacgaaatactatgtgtctcttttatggcatacttctactctggatgaattggttgaaacatgttggtggtctatgtttaatgtttatgctaaccctaacactacatctccccttaatgatgcttttaggtagacgtcgatgtctagatttagatctagatgtactgttaactgtctgcttgcgctcttgttgggtaattggtaagatgggctccatggttgctggtgagatccgagcggagtatgctgtggtgcggagtggactgggggcttttgatggtttgttcttgaagctggcgatcgcttacgggatctgctgggttttgtcgagagtgtagtggaatcaggtggtgggatttggactgggggccgttggtctggcgacaaggacggttgtgaagctgggtgaacttgggttgtggctggtgcttgcatttctgcctctgaattcaaagtcgcagacaatacaggctgtctaacttccggtcctggagctcctctcagcatactcgtttccttcataacattacttccattctcaactttcccatcccaacccgtccccgtcacaatttcaggcgccggagctggaacggaaaccgaaccactttcttgtgcatcaccggcgtttctatcgaccacaccactaggacgaagtggacttagtgtttggtcgccgtcgacgtggataaaagatgtctgatccggtgtaagagacccgtgcatagcggccggcgaccatacgtattggtcttgccacatggactgcaggtgttggaaggctgagggttggagccatattgtcgttccttcgctgggcgttcgcttgtgtgtgtttgggagagggtttagtgttggggttttgggatggggtggtgaagattgtgcaggtgaggttaggggagatgagggtgatgattggagatgtgatggtatgctaggtgagaatgaagattggttggaggtggttgtcgttgtggttttggagttgatattattgggactattattattatgagtatgctgaggttcgacgtggcaatggtttaatttattcacattgtcgacgtgcgtgatcggaaggatagggagccgtggtggtcggcgttttggtgaccgcgccatcagatattag

SEQ ID NO: 39427 - DNA, 972 bp, Muscodor strobelii
  misc_feature: SGI cDNA ID NO. 573717
  misc_feature: Encodes the peptide sequence at SEQ ID NO 39428
atggcatcctcacttgccaagatcggcgtcatctccatcggcgacatgggcatgggaatcgccaagttgctcatcgcaaacggattctctgtagctacgaattgcaaaggtcgcagcaatgacacaatagagagggcgaagagcgcaaaggtagagctcttcaactccgacgaggacctcgcccaggcgtgcgacgtcatcctctccgttgtcccacctcgggatgccgacacaacggcacaacgcatcgtcgacgccgtgaccggcccctttcggcggagcagtccgttctacttcgcagatttgaacgccgttgcaccatccacaacgaggactatcgcggcgctctttgagcaaacgcggggtcaggtgcgcttcattgacggcgctatcataggcggtccgccatctccgaaactgggctcctccgatgaactaactgggaagtggaacgtcccgagtatccctacttccggtccttacaagattagtgaaatccctgggtatggagagaggctgtccgcgaccctgaacatgagacacgtctcggacgagatcggcgcagcctcaggtctcaagatgtgcttcgcaagcttaagtaaagggttcatcgcactcgccatccagtcattcaccactgccaaatccctcggcgttctcaacgagttagaatccgagatgcaacaacacaacccggatgcgttcaaaagagcggccaatggtgtcgtcggtatggcaccaaaggcttatcgctgggtgagggagatggaagagattgcccttactttcaacgaagagggaggtttcccgcaagatactttccagggcgtcgcaaaagtctacaaggctgtcgctgaggatacagagcttggaaaggagaagatcggggagaggaagagagggctcgatgttaatgatatggctgcggcgatgagtgaggggttagagtctaagaagaagaagaatgactag

SEQ ID NO: 39428 - protein, 323 aa, Muscodor strobelii
  misc_feature: SGI Peptide ID NO. 573717
  misc_feature (214)..(286): Pfam Id: PF09130 Pfam Desc: Domain of function (DUF1932)
  misc_feature (7)..(175): Pfam Id: PF03807 Pfam Desc: NADP oxidoreductase coenzyme F420-dependent
  misc_feature (5)..(149): Pfam Id: PF03446 Pfam Desc: NAD binding domain of 6-phosphogluconate dehydrogenase
  misc_feature (7)..(121): Pfam Id: PF03807 Pfam Desc: NADP oxidoreductase coenzyme F420-dependent
  misc_feature (5)..(72): Pfam Id: PF03446 Pfam Desc: NAD binding domain of 6-phosphogluconate dehydrogenase
  misc_feature (5)..(320): NCBI GI: 256733108 Blast Desc: NECHADRAFT_68400 [Nectria haematococca mpVI 77-13-4]
  misc_feature (7)..(316): NCBI GI: 46124949 Blast Desc: FG06852.1 [Gibberella zeae PH-1]
  misc_feature (5)..(323): NCBI GI: 39944832 Blast Desc: MGG_04398 [Magnaporthe grisea 70-15] gi|145011450|gb|EDJ96106.1| MGG_04398 [Magnaporthe grisea 70-15]
  misc_feature (1)..(316): NCBI GI: 145241920 Blast Desc: An09g02920 [Aspergillus niger] gi|134078148|emb|CAK40229.1| protein product [Aspergillus niger]
  misc_feature (3)..(323): NCBI GI: 154313865 Blast Desc: BC1G_05782 [Botryotinia fuckeliana B05.10] gi|150849364|gb|EDN24557.1| BC1G_05782 [Botryotinia fuckeliana B05.10]
  misc_feature (3)..(323): NCBI GI: 156061457 Blast Desc: SS1G_02873 [Sclerotinia sclerotiorum 1980] gi|154700275|gb|EDO00014.1| SS1G_02873 [Sclerotinia sclerotiorum 1980]
  misc_feature (5)..(323): NCBI GI: 171687537 Blast Desc: protein product [Podospora anserina] gi|170943730|emb|CAP69382.1| protein product [Podospora anserina]
  misc_feature (6)..(321): NCBI GI: 85090451 Blast Desc: NCU07422 [Neurospora crassa OR74A] gi|28919784|gb|EAA29187.1| [Neurospora crassa OR74A]
  misc_feature (8)..(313): NCBI GI: 242800561 Blast Desc: conserved [Talaromyces stipitatus ATCC 10500] gi|218716959|gb|EED16380.1| conserved [Talaromyces stipitatus ATCC 10500]
  misc_feature (8)..(313): NCBI GI: 212540868 Blast Desc: conserved [Penicillium marneffei ATCC 18224] gi|210067888|gb|EEA21980.1| conserved [Penicillium marneffei ATCC 18224]
MASSLAKIGVISIGDMGMGIAKLLIANGFSVATNCKGRSNDTIERAKSAKVELFNSDEDLAQACDVILSVVPPRDADTTAQRIVDAVTGPFRRSSPFYFADLNAVAPSTTRTIAALFEQTRGQVRFIDGAIIGGPPSPKLGSSDELTGKWNVPSIPTSGPYKISEIPGYGERLSATLNMRHVSDEIGAASGLKMCFASLSKGFIALAIQSFTTAKSLGVLNELESEMQQHNPDAFKRAANGVVGMAPKAYRWVREMEEIALTFNEEGGFPQDTFQGVAKVYKAVAEDTELGKEKIGERKRGLDVNDMAAAMSEGLESKKKKND

SEQ ID NO: 39429 - DNA, 1984 bp, Muscodor strobelii
  misc_feature: SGI EST ID NO. CUFF.94913.0
  misc_feature: Variant of the nucleotide sequence at SEQ ID NO 39427
tcctagccgggtccagggtcaatcaatcatgccgctgggtgcaattacagcctgcttctcggagagtttccgcatctaggctactgtgtttcgacaacgcgaacccgaggtacgattccgaacacgctctcccaactaattgggaaaatacgcaaatgtaagttcatactcaacatccttccatcaccaatctgtaagagttcaggatagttgagttttcaaacgaaagccgttgctacagagcgccagggaaacgcgctgacgacaaccggggtggagaacccgaaatccgttggagattccactacctacgatgtattggcaggttggaaaattgctgcctggtggcttacgactctgctgccaatgaaaacaacacgaatatcgtcagccatggtctatgtcggccgcaatataactatctatgaagcggatgcgagctgccgtcggctgtgatgtgacatgaatgtggaacgtgatgaggcttgtagccgagattcatcctcaatgacgcataaatggctttgttcaggtcgccgttccgaagcgtggtggcctgcactatcacattgcaagagtcaaggctcaacagcatttttcctgggttcatagaacattgaacgcctctcaagacgtagacgtataacgggttacaagactttcatatcgtatctacaaccttcaaggtgctcgtcttattaagcttcgccgttgtcttttagctcggcatgcaagcggttgtggattacaaaccatcggcgatatgcagtggatcttgagtcctgtaacacaacgccggcgcgaggtgcataggtgacgggacatggtgcatgtacagggactgtctctgtttctgatcatctagctacagcaaaatttgacatgatattcgggagttattggaatccttagcaacgacatagagttcacgtcaaaatggcatcctcacttgccaagatcggcgtcatctccatcggcgacatgggcatgggaatcgccaagttgctcatcgcaaacggattctctgtagctacgaattgcaaaggtcgcagcaatgacacaatagagagggcgaagagcgcaaaggtagagctcttcaactccgacgaggacctcgcccaggcgtgcgacgtcatcctctccgttgtcccacctcgggatgccgacacaacggcacaacgcatcgtcgacgccgtgaccggcccctttcggcggagcagtccgttctacttcgcagatttgaacgccgttgcaccatccacaacgaggactatcgcggcgctctttgagcaaacgcggggtcaggtgcgcttcattgacggcgctatcataggcggtccgccatctccgaaactgggctcctccgatgaactaactgggaagtggaacgtcccgagtatccctacttccggtccttacaagattagtgaaatccctgggtatggagagaggctgtccgcgaccctgaacatgagacacgtctcggacgagatcggcgcagcctcaggtctcaagatgtgcttcgcaagcttaagtaaagggttcatcgcactcgccatccagtcattcaccactgccaaatccctcggcgttctcaacgagttagaatccgagatgcaacaacacaacccggatgcgttcaaaagagcggccaatggtgtcgtcggtatggcaccaaaggcttatcgctgggtgagggagatggaagagattgcccttactttcaacgaagagggaggtttcccgcaagatactttccagggcgtcgcaaaagtctacaaggctgtcgctgaggatacagagcttggaaaggagaagatcggggagaggaagagagggctcgatgttaatgatatggctgcggcgatgagtgaggggttagagtctaagaagaagaagaatgactagagtagatctcatcttatagaacatcaacttgctagtctatgccttcggaaaaatcattgaatgtcttcaacatttg

SEQ ID NO: 39430 - DNA, 1668 bp, Muscodor strobelii
  misc_feature: SGI cDNA ID NO. 573718
  misc_feature: Encodes the peptide sequence at SEQ ID NO 39431
atgtcggtcttcccttatcctttgcgagggatagccgctgtatcactggcgacgagctatgtcctggtcgctcatacatcaacattgtggaaacttgggtatatcagtacttttgccttggcgtgggtttcgcaatcgctcatctgggcattttgggtcgtgattctgtggccaaaactattttctccgcttcgaagccttcctgaaccaagcgggaattcgtggttcaatggccaatggggtagaattcgtcgtgaacctacgggaacgcccatgagagactgggtggctactgtacccaacgagggtgtcatgaagtatcttggtctcttcaattctgagcgtgtacttgtcacaggacctaaagcactggcggaggtgctcgtcacgaagaactatgacttcgagaagccagcaagctggaggcacacgattgggcgcatcctcggcgtgggcatcctgctcgccgagggtgatgagcacaagagacagcgaaagaatctcatgccggcatttgcctttcgacatgtcaaggacctttatcctaccttttggcgtaagactcgcgaaggtgtagatgctatggtacgagacatccgaactgaaaccgcgaaccagcccaatgaagcaccaaagactgcagtcatagaagttggtcaatggacgtctcgagttgcacttgacatcattggtgttgctggcctcggtcgtgatttcggagcgattaaagaccagaactctgaactcatgatgacataccgaagactcttctcacctaacaaacaagctcagattttggcttttcttggcatgatcttccctgagcgattgcttaccttattgcccgtaaaccacaacaacaatatcaatcacgcgtcacagtacatccgttctgtatgccatggactcattgcagataagaaacagaaaatggctcgcaaagaaccgacagagcatgatatcctttccgttgccttagaatcaggcgggtttacagacgaggaacttgtggatcaactcatgactttccttgccgcgggacatgagacaacagctacatcaatgacctgggcaatctaccagctctctagaatgcctgaagttcaagctaaacttaggcaagagatccacgagaaactgcccccgattgactcgggcacagacatcacgagcatggatatcgaccatatgccctatctcaacgctgtttgcaacgaagtcatgcgctattggtctcccgtgcctttaactcttcgcgatacagctcgtgagacttctattctcggacacgtaattcccaaaggcgttagagttatcatgtgtcctgcagcaactcatttcgatacagagctctggggccccgatgcgcgtgaatttaatcccgagcggtggatgccaacgggaagcgatgataagagagcggcgagtggaggggctgaaagcaattacgcattcatgacattcttacatgggccgaggagttgcattggccaaaatttcgcaaaggccgaatttgcgtgtatcctggccggttggattggtcgattctcttttgagctcaagaacaaggaggagatggacgagaagaaggtcgaagtcaaaggcggcatcactgcccgcccatcgaaggggatgtatgtacatgcgacgattgttgatgggtggtaa

SEQ ID NO: 39431 - protein, 555 aa, Muscodor strobelii
  misc_feature: SGI Peptide ID NO. 573718
  misc_feature (68)..(548): Pfam Id: PF00067 Pfam Desc: Cytochrome P450
  misc_feature (116)..(548): Pfam Id: PF00067 Pfam Desc: Cytochrome P450
  misc_feature (7)..(555): NCBI GI: 116180286 Blast Desc: CHGG_00771 [Chaetomium globosum CBS 148.51] gi|88185068|gb|EAQ92536.1| CHGG_00771 [Chaetomium globosum CBS 148.51]
  misc_feature (11)..(555): NCBI GI: 46108332 Blast Desc: FG01048.1 [Gibberella zeae PH-1]
  misc_feature (10)..(555): NCBI GI: 256735154 Blast Desc: NECHADRAFT_98771 [Nectria haematococca mpVI 77-13-4]
  misc_feature (7)..(555): NCBI GI: 171687955 Blast Desc: protein product [Podospora anserina] gi|170943939|emb|CAP69591.1| protein product [Podospora anserina]
  misc_feature (8)..(555): NCBI GI: 145603111 Blast Desc: MGG_04469 [Magnaporthe grisea 70-15] gi|145011426|gb|EDJ96082.1| MGG_04469 [Magnaporthe grisea 70-15]
  misc_feature (94)..(555): NCBI GI: 154299019 Blast Desc: BC1G_11822 [Botryotinia fuckeliana B05.10] gi|150857525|gb|EDN32717.1| BC1G_11822 [Botryotinia fuckeliana B05.10]
  misc_feature (64)..(555): NCBI GI: 156058097 Blast Desc: SS1G_04780 [Sclerotinia sclerotiorum 1980] gi|154702565|gb|EDO02304.1| SS1G_04780 [Sclerotinia sclerotiorum 1980]
  misc_feature (52)..(553): NCBI GI: 169618405 Blast Desc: SNOG_12393 [Phaeosphaeria nodorum SN15] gi|111059086|gb|EAT80206.1| SNOG_12393 [Phaeosphaeria nodorum SN15]
  misc_feature (7)..(547): NCBI GI: 189201141 Blast Desc: cytochrome P450 78A3 [Pyrenophora tritici-repentis Pt-1C-BFP] gi|187984006|gb|EDU49494.1| cytochrome P450 78A3 [Pyrenophora tritici-repentis Pt-1C-BFP]
  misc_feature (49)..(533): NCBI GI: 145229611 Blast Desc: An01g06910 [Aspergillus niger] gi|134055222|emb|CAK43809.1| protein product [Aspergillus niger]
  misc_feature (32)..(516): SWISSPROT Homolog: EC 1.14.13.30 Leukotriene-B(4) 20-monooxygenase
MSVFPYPLRGIAAVSLATSYVLVAHTSTLWKLGYISTFALAWVSQSLIWAFWVVILWPKLFSPLRSLPEPSGNSWFNGQWGRIRREPTGTPMRDWVATVPNEGVMKYLGLFNSERVLVTGPKALAEVLVTKNYDFEKPASWRHTIGRILGVGILLAEGDEHKRQRKNLMPAFAFRHVKDLYPTFWRKTREGVDAMVRDIRTETANQPNEAPKTAVIEVGQWTSRVALDIIGVAGLGRDFGAIKDQNSELMMTYRRLFSPNKQAQILAFLGMIFPERLLTLLPVNHNNNINHASQYIRSVCHGLIADKKQKMARKEPTEHDILSVALESGGFTDEELVDQLMTFLAAGHETTATSMTWAIYQLSRMPEVQAKLRQEIHEKLPPIDSGTDITSMDIDHMPYLNAVCNEVMRYWSPVPLTLRDTARETSILGHVIPKGVRVIMCPAATHFDTELWGPDAREFNPERWMPTGSDDKRAASGGAESNYAFMTFLHGPRSCIGQNFAKAEFACILAGWIGRFSFELKNKEEMDEKKVEVKGGITARPSKGMYVHATIVDGW

SEQ ID NO: 39432 - DNA, 2333 bp, Muscodor strobelii
  misc_feature: SGI EST ID NO. CUFF.94915.0
  misc_feature: Variant of the nucleotide sequence at SEQ ID NO 39430
tggctctccacaagtgggcggcgagatccaagaatcattgatatggcaaatgctttcaactcctcaaacctactttagttgccgtcttgccgtcttgcttcataatgcccagcaagaaccacttttgcttcgatataacttcaattctgggggctgtgccaagctgaaatcctcgctaatctacaaacggatctgaaacgtcgattgaacgtatcgaatgatatcagaagctgtcaacttcaatcttgtccggcataactatatctaatctctccgactatttacgcgtagctgcgctccaaatcaaacgtaattttctttgatctcaacatcttcaactttgcatagaattctttctcgcttccattagccatgtcggtcttcccttatcctttgcgagggatagccgctgtatcactggcgacgagctatgtcctggtcgctcatacatcaacattgtggaaacttgggtatatcagtacttttgccttggcgtgggtttcgcaatcgctcatctgggcattttgggtcgtgattctgtggccaaaactattttctccgcttcgaagccttcctgaaccaagcgggaattcgtggttcaatggccaatggggtagaattcgtcgtgaacctacgggaacgcccatgagagactgggtggctactgtacccaacgagggtgtcatgaagtatcttggtctcttcaattctgagcgtgtacttgtcacaggacctaaagcactggcggaggtgctcgtcacgaagaactatgacttcgagaagccagcaagctggaggcacacgattgggcgcatcctcggcgtgggcatcctgctcgccgagggtgatgagcacaagagacagcgaaagaatctcatgccggcatttgcctttcgacatgtcaaggacctttatcctaccttttggcgtaagactcgcgaaggtgtagatgctatggtacgagacatccgaactgaaaccgcgaaccagcccaatgaagcaccaaagactgcagtcatagaagttggtcaatggacgtctcgagttgcacttgacatcattggtgttgctggcctcggtcgtgatttcggagcgattaaagaccagaactctgaactcatgatgacataccgaagactcttctcacctaacaaacaagctcagattttggcttttcttggcatgatcttccctgagcgattgcttaccttattgcccgtaaaccacaacaacaatatcaatcacgcgtcacagtacatccgttctgtatgccatggactcattgcagataagaaacagaaaatggctcgcaaagaaccgacagagcatgatatcctttccgttgccttagaatcaggcgggtttacagacgaggaacttgtggatcaactcatgactttccttgccgcgggacatgagacaacagctacatcaatgacctgggcaatctaccagctctctagaatgcctgaagttcaagctaaacttaggcaagagatccacgagaaactgcccccgattgactcgggcacagacatcacgagcatggatatcgaccatatgccctatctcaacgctgtttgcaacgaagtcatgcgctattggtctcccgtgcctttaactcttcgcgatacagctcgtgagacttctattctcggacacgtaattcccaaaggcgttagagttatcatgtgtcctgcagcaactcatttcgatacagagctctggggccccgatgcgcgtgaatttaatcccgagcggtggatgccaacgggaagcgatgataagagagcggcgagtggaggggctgaaagcaattacgcattcatgacattcttacatgggccgaggagttgcattggccaaaatttcgcaaaggccgaatttgcgtgtatcctggccggttggattggtcgattctcttttgagctcaagaacaaggaggagatggacgagaagaaggtcgaagtcaaaggcggcatcactgcccgcccatcgaaggggatgtatgtacatgcgacgattgttgatgggtggtaattggtacatatggaaggattggagtctgtatattgtgttttcactcctaatggccgactgaaaacgaatgcgcccggaaaaatacggagaggatcgatatctcgggatcgaatctcgcaggcaccgtgcgaaggagcacagcgaaacatcaaatgaaagtgcgcatatctgtttatgcatattaatatgccgtaaaaaaacattaagaagtcatagcacataaaggtgattcaaggcgagagggcacattatgagcctcaggatcactagcaaaaatccaactcaaatttcac

SEQ ID NO: 39433 - DNA, 837 bp, Muscodor strobelii
  misc_feature: SGI cDNA ID NO. 573719
  misc_feature: Encodes the peptide sequence at SEQ ID NO 39434
atgaaggacttcttcggaaaatacgctcagtttactaatcctgttcataataattcctatccaaccatctctcctcaacgacctgagttgtctcaagttggcaaaactgtccttgtgaccggaggtggcagtggcattggctatggcattgctcgtggctttgtcagagcatcggcagccaaagtgattattttaggccggcgagccagtgttctcgccaaagccgcggagagcctcagacaagaaggcgagaagaccgaagtcattggatctccttgcgatattgcagacaagtcggcagtggacgcactctggcagaaattgaaggaggagggcacagtcgttgatgtgttggcactcaacgcagccggatttccgcccgtcaagcctctacttgattgtggtgtggaagagatttggaaagtctacgacatgaattatctggtccacgtatcaacggcttcggttcatgatttcaatctcggtgtagagcaaccgggctatggtttaaccaagaattcatttcaactggcgctccagctcatcacaatgcacaccccgcctgagaaaatgcaggtcatctgctaccatcctggtgcaatcttcacggagactgccatcgaaaagggttggaccgaagatatgattccttgggaccatgttgatctacctggccacttcgccgtctgggctgctacccccgaagctaggttcttacatggacgctttgtctgggcatcgtgggatgttgaaaagctgcagactggagatatcagaaaacagatcgacgaagatcccacgtacttgcagattggtgttcacggggtaaaaaggtaa

SEQ ID NO: 39434 - protein, 278 aa, Muscodor strobelii
  misc_feature: SGI Peptide ID NO. 573719
  misc_feature (35)..(182): Pfam Id: PF00106 Pfam Desc: short chain dehydrogenase
  misc_feature (35)..(144): Pfam Id: PF00106 Pfam Desc: short chain dehydrogenase
  misc_feature (36)..(112): Pfam Id: PF08659 Pfam Desc: KR domain
  misc_feature (11)..(277): NCBI GI: 238495098 Blast Desc: short-chain dehydrogenase, [Aspergillus flavus NRRL3357] gi|220695435|gb|EED51778.1| short-chain dehydrogenase, [Aspergillus flavus NRRL3357]
  misc_feature (15)..(276): NCBI GI: 256723821 Blast Desc: NECHADRAFT_92278 [Nectria haematococca mpVI 77-13-4]
  misc_feature (11)..(277): NCBI GI: 119473989 Blast Desc: NADP(+)-dependent dehydrogenase, [Neosartorya fischeri NRRL 181] gi|119407023|gb|EAW16973.1| NADP(+)-dependent dehydrogenase, [Neosartorya fischeri NRRL 181]
  misc_feature (16)..(276): NCBI GI: 156056454 Blast Desc: SS1G_05581 [Sclerotinia sclerotiorum 1980] gi|154703363|gb|EDO03102.1| SS1G_05581 [Sclerotinia sclerotiorum 1980]
  misc_feature (16)..(276): NCBI GI: 46112781 Blast Desc: FG02892.1 [Gibberella zeae PH-1]
  misc_feature (16)..(276): NCBI GI: 46139675 Blast Desc: FG11352.1 [Gibberella zeae PH-1]
  misc_feature (12)..(277): NCBI GI: 256726987 Blast Desc: NECHADRAFT_91096 [Nectria haematococca mpVI 77-13-4]
  misc_feature (16)..(276): NCBI GI: 256732342 Blast Desc: NECHADRAFT_41583 [Nectria haematococca mpVI 77-13-4]
  misc_feature (15)..(276): NCBI GI: 256732316 Blast Desc: NECHADRAFT_80781 [Nectria haematococca mpVI 77-13-4]
  misc_feature (16)..(271): NCBI GI: 154320856 Blast Desc: BC1G_01900 [Botryotinia fuckeliana B05.10] gi|150853589|gb|EDN28781.1| BC1G_01900 [Botryotinia fuckeliana B05.10]
MKDFFGKYAQFTNPVHNNSYPTISPQRPELSQVGKTVLVTGGGSGIGYGIARGFVRASAAKVIILGRRASVLAKAAESLRQEGEKTEVIGSPCDIADKSAVDALWQKLKEEGTVVDVLALNAAGFPPVKPLLDCGVEEIWKVYDMNYLVHVSTASVHDFNLGVEQPGYGLTKNSFQLALQLITMHTPPEKMQVICYHPGAIFTETAIEKGWTEDMIPWDHVDLPGHFAVWAATPEARFLHGRFVWASWDVEKLQTGDIRKQIDEDPTYLQIGVHGVKR

SEQ ID NO: 39435 - DNA, 1362 bp, Muscodor strobelii
  misc_feature: SGI cDNA ID NO. 573720
  misc_feature: Encodes the peptide sequence at SEQ ID NO 39436
atggagatcgcgtatacatggcgaagggcctgcgaggcctgtaccaaagccaagcgtcagtgcacaaaacaagtccctaagtgtcggcgttgcacaaataggggactaaagtgcacctatcgtccgccgagaagtatcaacactttcgataggacggaagcgggtgaggatggggctgctgataaagccgacgggccttccgctgacgtgctttccgtgcatgacccggtattagtaccaaatgcaacggaaagcttaggcaatgaactctcaccgcttcaaacactgcgggatgacaacttcacgttgccatcgccaaacatcgatacttttggtggcgaccaaggaagtcaaatatcctccgatgttacgcaggatctcaaagggatatggttcctaagcccggagtcatgggccgtggaaatgtcagagcctcttgtcacaagcacgcgtgacgtcgatgaatcactcaaaacctacattgagcaggcgaaatcatggatgcgccagtgggctgcgcaaggtcatagtgcactccatcatcgagaactatattcgtttcgtatgcctcgccatactcaagatgcgtacactgcgatgaccgcgtatatgggaaagaccaaggagaatgaaagaatggttcatcgagtactagaagagcgtgtctctcaactgctccaagattacacagtcgagagtgcactgtgtagtgccgatggtctgagtatatttgatcatctatgctatgttcaagctctgttgtgctaccaggtcgtccgtctcttcgacggcgatatccgaatgcaggcgcaagctgaggctatgaactcaacgctgaaactctggaacaaacaaatgttggagactgcaaagaacagcctttcgcgtcccgagctttttctagacatttcgccatttgatgtgggttattactcaaattctacgaacgagctgtcgcctcagtcactccaacaattaacctggcgggcttggatcatcgctgaaagtgttcgtcggacgtggaacgttgccagtgttgtgatgggaacggtgcgtataaaaagaccctgcgacacttattgcgtgaccgcatttccgagctataacttcttcagactaggctggtcagagtgtccaggccgcgtaagaacaacaatgcgcaaaaccctttgggatttacagtcaagctatgcctggactagggacctcagagacactgggccactatttgtctccgcggcagagatgcctactttttttgagaaaacgtccccggcagaggttgatgaattcaacttggcggtcttgagcatatacggcatggatgagaacgtaaagtggctaatggaaaaaggacagtag

SEQ ID NO: 39436 - protein, 453 aa, Muscodor strobelii
  misc_feature: SGI Peptide ID NO. 573720
  misc_feature (9)..(47): Pfam Id: PF00172 Pfam Desc: Fungal Zn(2)-Cys(6) binuclear cluster domain
  misc_feature (8)..(447): NCBI GI: 256721547 Blast Desc: NECHADRAFT_78504 [Nectria haematococca mpVI 77-13-4]
  misc_feature (8)..(438): NCBI GI: 256720318 Blast Desc: NECHADRAFT_56119 [Nectria haematococca mpVI 77-13-4]
  misc_feature (10)..(451): NCBI GI: 242795089 Blast Desc: conserved [Talaromyces stipitatus ATCC 10500] gi|218719096|gb|EED18516.1| conserved [Talaromyces stipitatus ATCC 10500]
  misc_feature (10)..(445): NCBI GI: 145607962 Blast Desc: MGG_09786 [Magnaporthe grisea 70-15] gi|145015431|gb|EDJ99967.1| MGG_09786 [Magnaporthe grisea 70-15]
  misc_feature (9)..(448): NCBI GI: 256721824 Blast Desc: NECHADRAFT_53241 [Nectria haematococca mpVI 77-13-4]
  misc_feature (11)..(451): NCBI GI: 171680960 Blast Desc: protein product [Podospora anserina] gi|170940438|emb|CAP65665.1| protein product [Podospora anserina]
  misc_feature (6)..(448): NCBI GI: 242813475 Blast Desc: TSTA_101720 [Talaromyces stipitatus ATCC 10500] gi|218714513|gb|EED13936.1| TSTA_101720 [Talaromyces stipitatus ATCC 10500]
  misc_feature (66)..(447): NCBI GI: 212536184 Blast Desc: conserved [Penicillium marneffei ATCC 18224] gi|210070647|gb|EEA24737.1| conserved [Penicillium marneffei ATCC 18224]
  misc_feature (8)..(452): NCBI GI: 225561211 Blast Desc: conserved [Ajellomyces capsulatus G186AR]
  misc_feature (9)..(452): NCBI GI: 154274522 Blast Desc: [Ajellomyces capsulatus NAm1] gi|150414552|gb|EDN09914.1| [Ajellomyces capsulatus NAm1]
MEIAYTWRRACEACTKAKRQCTKQVPKCRRCTNRGLKCTYRPPRSINTFDRTEAGEDGAADKADGPSADVLSVHDPVLVPNATESLGNELSPLQTLRDDNFTLPSPNIDTFGGDQGSQISSDVTQDLKGIWFLSPESWAVEMSEPLVTSTRDVDESLKTYIEQAKSWMRQWAAQGHSALHHRELYSFRMPRHTQDAYTAMTAYMGKTKENERMVHRVLEERVSQLLQDYTVESALCSADGLSIFDHLCYVQALLCYQVVRLFDGDIRMQAQAEAMNSTLKLWNKQMLETAKNSLSRPELFLDISPFDVGYYSNSTNELSPQSLQQLTWRAWIIAESVRRTWNVASVVMGTVRIKRPCDTYCVTAFPSYNFFRLGWSECPGRVRTTMRKTLWDLQSSYAWTRDLRDTGPLFVSAAEMPTFFEKTSPAEVDEFNLAVLSIYGMDENVKWLMEKGQ

SEQ ID NO: 39437 - DNA, 1140 bp, Muscodor strobelii
  misc_feature: SGI cDNA ID NO. 573721
  misc_feature: Elevated expression when VOC is produced
  misc_feature: Encodes the peptide sequence at SEQ ID NO 39438
atgtcacttacgccagagcagattcaatactatgaagaacacgctagcgatagcttacagccgaattttattgcagccatcgctgtcggcttaggcctcgcctatatccttgttggattgcgcatatatgcgcgtttagctggaaaggcttcgttcggtcttgacgactggctcattgttacagcactagtgccgctcacagcctacgctatcattgcctggtatcaagtcagcattgggcaagggaggcatatcctcttcgtcactaacataccggccttcattcaaggctatgtggcggctattgttgcgtacgcattgtgtgttgtcttgaccaagatttcgatactttgcttctacggccgaatattcgcgcctgtgaagagtctcaagtacttgtcttgggcactaggcatctttaccgtcgcctacaacttagctctcatcttggtgaccgcccttgaatgcattccactgtctgctctgtggactggagagcctgcaccatgtatcgatacgctgccgcctttcactgcgcttggtgttatcaacgtagtcacagacttcgccatacttgtacttcctgtccgtcaggttcttcgacttcatctgtcgcgtgtacgccgtgtccaacttagcggaatctttttgctgggtgcacttgtgtgcgtgttcggaattatacgtattgtggttctagcaacagcaccaccaggcgaccaaagctataatcaaaccccgtcgggaatatggtccttctgcgaaattgcgtttggcatcgttgccgcttgcttgccgactttagcaaatgtggctacgcgagcgtatatctccaagttctcgtcctctgtgatgaatgcactatccctctcttttcgccggtcgcatagctccagtggcaacaatacaaaagtcagcgagtctaggacacgcgccacgcgaagcgatgagggcgagtttactcagttatctgatttttcgcttcctagggaacatagttgtgactctaacgagatcgggcatagctatggcaacgtgtcttcattcgccgctggtagtcattcagaacgctggggagcagacagtccccagccgcctgggattgtagtcaaaaaggagatcgttcaaatggtccactaa

SEQ ID NO: 39438 - protein, 379 aa, Muscodor strobelii
  misc_feature: SGI Peptide ID NO. 573721
  misc_feature (24)..(341): NCBI GI: 212533581 Blast Desc: integral membrane protein [Penicillium marneffei ATCC 18224] gi|210072311|gb|EEA26400.1| integral membrane protein [Penicillium marneffei ATCC 18224]
  misc_feature (22)..(279): NCBI GI: 156051376 Blast Desc: SS1G_07095 [Sclerotinia sclerotiorum 1980] gi|154704873|gb|EDO04612.1| SS1G_07095 [Sclerotinia sclerotiorum 1980]
  misc_feature (13)..(322): NCBI GI: 119473771 Blast Desc: integral membrane protein, [Neosartorya fischeri NRRL 181] gi|119406914|gb|EAW16864.1| integral membrane protein, [Neosartorya fischeri NRRL 181]
  misc_feature (13)..(322): NCBI GI: 146323145 Blast Desc: integral membrane protein Pth11-like [Aspergillus fumigatus Af293] gi|129556487|gb|EAL86403.2| integral membrane protein Pth11-like, [Aspergillus fumigatus Af293] integral A1163]
  misc_feature (24)..(313): NCBI GI: 115401548 Blast Desc: conserved [Aspergillus terreus NIH2624] gi|114190303|gb|EAU32003.1| conserved [Aspergillus terreus NIH2624]
  misc_feature (27)..(315): NCBI GI: 261353889 Blast Desc: conserved [Verticillium albo-atrum VaMs.102]
  misc_feature (24)..(320): NCBI GI: 85113520 Blast Desc: NCU00700 [Neurospora crassa OR74A] gi|28926320|gb|EAA35298.1| [Neurospora crassa OR74A]
  misc_feature (15)..(378): NCBI GI: 46126571 Blast Desc: FG07663.1 [Gibberella zeae PH-1]
  misc_feature (13)..(302): NCBI GI: 121720078 Blast Desc: conserved [Aspergillus clavatus NRRL 1] gi|119404949|gb|EAW15311.1| conserved [Aspergillus clavatus NRRL 1]
  misc_feature (34)..(280): NCBI GI: 115384956 Blast Desc: conserved [Aspergillus terreus NIH2624] gi|114196717|gb|EAU38417.1| conserved [Aspergillus terreus NIH2624]
  misc_feature: Useful for introducing or modulating the production of volatile compounds
MSLTPEQIQYYEEHASDSLQPNFIAAIAVGLGLAYILVGLRIYARLAGKASFGLDDWLIVTALVPLTAYAIIAWYQVSIGQGRHILFVTNIPAFIQGYVAAIVAYALCVVLTKISILCFYGRIFAPVKSLKYLSWALGIFTVAYNLALILVTALECIPLSALWTGEPAPCIDTLPPFTALGVINVVTDFAILVLPVRQVLRLHLSRVRRVQLSGIFLLGALVCVFGIIRIVVLATAPPGDQSYNQTPSGIWSFCEIAFGIVAACLPTLANVATRAYISKFSSSVMNALSLSFRRSHSSSGNNTKVSESRTRATRSDEGEFTQLSDFSLPREHSCDSNEIGHSYGNVSSFAAGSHSERWGADSPQPPGIVVKKEIVQMVH

SEQ ID NO: 39439 - DNA, 2133 bp, Muscodor strobelii
  misc_feature: SGI EST ID NO. CUFF.94927.0
  misc_feature: Variant of the nucleotide sequence at SEQ ID NO 39437
aggtgatatgcggttccgattggttacggcagagcaaatcgctcatccaatcacctatgttagttcaacgtacggaaatcgaaggttcagagaaggtagactacctcagaatctatcaatgacacgttagcagtcatcatgataagacactgcctgcctgccgctatgactctttcgcgcagcaagtgtagataggatcggccctaacagtattgcccagtattggaaggcactggctcttttatgccccatccaaacaattctttctttacccaacgagctaattcggtactaccagattcagctcgttgacgtctcgttgccggcgatctaacaatctatgagatcaaaactgatgccccttaccaattcgacccccacctgacgttgaccggttcctcgcagaactttcattgaagataactatacagatcgatttcaactctcattgagaaatggtctttcatgatctttaatactctactcgatcgcattccaacaatccgaagactgccacgactcgcacgccagtcttgaatctagcatgttcacacattccttactcgacgacaactcgacatcgtctcgttttcgagagagcatcaatatccagaggacgaagctagacatcgtcttctctcataatgtcacttacgccagagcagattcaatactatgaagaacacgctagcgatagcttacagccgaattttattgcagccatcgctgtcggcttaggcctcgcctatatccttgttggattgcgcatatatgcgcgtttagctggaaaggcttcgttcggtcttgacgactggctcattgttacagcactagtgccgctcacagcctacgctatcattgcctggtatcaagtcagcattgggcaagggaggcatatcctcttcgtcactaacataccggccttcattcaaggctatgtggcggctattgttgcgtacgcattgtgtgttgtcttgaccaagatttcgatactttgcttctacggccgaatattcgcgcctgtgaagagtctcaagtacttgtcttgggcactaggcatctttaccgtcgcctacaacttagctctcatcttggtgaccgcccttgaatgcattccactgtctgctctgtggactggagagcctgcaccatgtatcgatacgctgccgcctttcactgcgcttggtgttatcaacgtagtcacagacttcgccatacttgtacttcctgtccgtcaggttcttcgacttcatctgtcgcgtgtacgccgtgtccaacttagcggaatctttttgctgggtgcacttgtgtgcgtgttcggaattatacgtattgtggttctagcaacagcaccaccaggcgaccaaagctataatcaaaccccgtcgggaatatggtccttctgcgaaattgcgtttggcatcgttgccgcttgcttgccgactttagcaaatgtggctacgcgagcgtatatctccaagttctcgtcctctgtgatgaatgcactatccctctcttttcgccggtcgcatagctccagtggcaacaatacaaaagtcagcgagtctaggacacgcgccacgcgaagcgatgagggcgagtttactcagttatctgatttttcgcttcctagggaacatagttgtgactctaacgagatcgggcatagctatggcaacgtgtcttcattcgccgctggtagtcattcagaacgctggggagcagacagtccccagccgcctgggattgtagtcaaaaaggagatcgttcaaatggtccactaaatgtatcattaatcaaaccactaattgtcaacatgagcgcctatcgtatttcgtcgtatgcagagatcataaggctgttagcttcgtatccatatccgagcgcagtgaccggcgatttgattaacgatctgttttcattgccgatgcaataattcggaggtcagtgtcggggatttaggcatgatctcctctatctcgctcgctcgacttacagtatcaacttcattcactgcagtatcgcctgtatttattgcctccctcctgtttcatatttatagcgaaatagtttgaatgaatgggtatactcgatgtctaagaacagattgagtttatacccatgcgtcatgtc

SEQ ID NO: 39440 - DNA, 1710 bp, Muscodor strobelii
  misc_feature: SGI cDNA ID NO. 573722
  misc_feature: Encodes the peptide sequence at SEQ ID NO 39441
atggtcggcctgcgatacatagggcggaatgcggtggctacattgctgcttgcgggcaggcatgtcgacgcctacgatcttgatgttcaatccacatcctcgattctctcagtcgcaaagcagatggcgtcagacttgatatcgttctactctggcaatcacccaggagggatacctggtcttcttccgcagccatattactggtgggagggcggtgcgttaatgggcgctctgatcgactactggtattacactggtgatacgacgtacaacgatcttactatccagggcatgttgcaccaagtcgggccgtataacgattacatgccgccgaatcagacgctcacggaaggaaacgacgatcaaggattctggggcatggccgcaatgagtgccgcagaagtcaattttccgaacccaccgagtaataaacctcaatggcttgccctagcccaagctgtcttcaatactcaagccgcacgatgggatcaacagcactgcaatggtggcttacggtggcagatatttacttggaacaatgggtacgactacaagaactccatctcacaagcctgcttctttaacatcgctgcacgactcgcgctctataccggaaatgtcacatacgcagagtgggcggtgaagacatgggactggatggcgggcgtcggtttcttggggcccacgtaccggatttacgatggtgcgcacactacggataactgttcagccatcacgccttatgagttctcctacaatgtcggcgcattcatgctcggcgcggcggccatggtcgagtattcgaaccagacaggaaattcgggcgacactgcgctatggcataagcgcgttgacggactactggacagcgccgagcttatcttcttctttggcatcaatgacaatgataaaatcatgatcgagatcgcatgcgagccggtcaatctctgtgacactgatcagctttccttcaaagcctacctcagccgttggatggcggctaccacgaaatgggcgccttggacattgacgaaaatcaagaagttgctgcgtaactccgccgaagctgccgcaaagcaatgcacgggcggcgccaatggtcgcatgtgcgggctgaaatgggctaataatagcggactgtgggatggcaccactggagtagggcagcagatggctgctatggaagttgttctagcaaatatgatacatgatgcgaaaccacccgtcacgaacactactggtggcacaagtgagggtgaccccagcgcgggtggttcggacaatggacgcatcgacccagtagggtggcattatggccccatccgggatggagatcgagccggtgctgcgttggtgacagtcattgtccttgcggcgttcctgaccgcgcttgtctttatgcttgctgatgagaataagagcttcaatgagaattggggcgagtttaggtctacggttagtcttggaaacgttgtgccggtgtctggggatgagaggagagagagcgagaagggaaaggggaaggagttgtgggattcgagtgcggagaatagcccagtggatgttgttcccccaataaatactgctcttgagcaaagggaggtaaagaggaaatccgtgagcgggccggcgatggagggcaggggaagggagctgattgggggttcgagcagtctttattctattcgtcatgtgaaggaggacgtgtga

SEQ ID NO: 39441 - protein, 569 aa, Muscodor strobelii
  misc_feature: SGI Peptide ID NO. 573722
  misc_feature (26)..(413): Pfam Id: PF03663 Pfam Desc: Glycosyl hydrolase family 76
  misc_feature (12)..(475): NCBI GI: 16945405 Blast Desc: conserved [Neurospora crassa]
  misc_feature (34)..(475): NCBI GI: 164429647 Blast Desc: NCU02032 [Neurospora crassa OR74A] gi|157073562|gb|EAA35418.2| conserved [Neurospora crassa OR74A]
  misc_feature (42)..(506): NCBI GI: 171684939 Blast Desc: protein product [Podospora anserina] gi|170942430|emb|CAP68082.1| protein product [Podospora anserina]
  misc_feature (11)..(489): NCBI GI: 145610010 Blast Desc: MGG_02793 [Magnaporthe grisea 70-15] gi|145017393|gb|EDK01756.1| MGG_02793 [Magnaporthe grisea 70-15]
  misc_feature (11)..(489): NCBI GI: 149210129 Blast Desc: MGCH7_ch7g546 [Magnaporthe grisea 70-15] gi|86196501|gb|EAQ71139.1| MGCH7_ch7g546 [Magnaporthe grisea 70-15]
  misc_feature (47)..(449): NCBI GI: 116193605 Blast Desc: CHGG_06520 [Chaetomium globosum CBS 148.51] gi|88182433|gb|EAQ89901.1| CHGG_06520 [Chaetomium globosum CBS 148.51]
  misc_feature (34)..(470): NCBI GI: 256734118 Blast Desc: NECHADRAFT_35107 [Nectria haematococca mpVI 77-13-4]
  misc_feature (12)..(470): NCBI GI: 154310531 Blast Desc: BC1G_07186 [Botryotinia fuckeliana B05.10] gi|150851517|gb|EDN26710.1| BC1G_07186 [Botryotinia fuckeliana B05.10]
  misc_feature (10)..(470): NCBI GI: 156055516 Blast Desc: SS1G_05110 [Sclerotinia sclerotiorum 1980] gi|154702894|gb|EDO02633.1| SS1G_05110 [Sclerotinia sclerotiorum 1980]
  misc_feature (10)..(471): NCBI GI: 242815456 Blast Desc: cell wall glycosyl hydrolase Dfg5, [Talaromyces stipitatus ATCC 10500] gi|218714911|gb|EED14334.1| cell wall glycosyl hydrolase Dfg5, [Talaromyces stipitatus ATCC 10500]
  misc_feature (15)..(468): SWISSPROT Homolog: EC 3.2.1.101 Mannan endo-1,6-alpha-mannosidase
MVGLRYIGRNAVATLLLAGRHVDAYDLDVQSTSSILSVAKQMASDLISFYSGNHPGGIPGLLPQPYYWWEGGALMGALIDYWYYTGDTTYNDLTIQGMLHQVGPYNDYMPPNQTLTEGNDDQGFWGMAAMSAAEVNFPNPPSNKPQWLALAQAVFNTQAARWDQQHCNGGLRWQIFTWNNGYDYKNSISQACFFNIAARLALYTGNVTYAEWAVKTWDWMAGVGFLGPTYRIYDGAHTTDNCSAITPYEFSYNVGAFMLGAAAMVEYSNQTGNSGDTALWHKRVDGLLDSAELIFFFGINDNDKIMIEIACEPVNLCDTDQLSFKAYLSRWMAATTKWAPWTLTKIKKLLRNSAEAAAKQCTGGANGRMCGLKWANNSGLWDGTTGVGQQMAAMEVVLANMIHDAKPPVTNTTGGTSEGDPSAGGSDNGRIDPVGWHYGPIRDGDRAGAALVTVIVLAAFLTALVFMLADENKSFNENWGEFRSTVSLGNVVPVSGDERRESEKGKGKELWDSSAENSPVDVVPPINTALEQREVKRKSVSGPAMEGRGRELIGGSSSLYSIRHVKEDV

SEQ ID NO: 39442 - DNA, 2901 bp, Muscodor strobelii
  misc_feature: SGI EST ID NO. CUFF.94934.0
  misc_feature: Variant of the nucleotide sequence at SEQ ID NO 39440
gttgattgaagctttcgacgacacgcgccccaacagccaagcgagaaaagcatatccaatgccttctgtcacttttatttggcgatttctcgtccacagcataagtatattatcatttcggtatactctgttcacgagagtcccttggtggccgaattgagagaatgtgacaccgctgtcagcaagatcctcagatgcgccggcatttgaattaagttccaggcatgccagctccagcgcaaagttacacggtgcctgtgacgtatgaaatgtgcgcaacacaccgagatatgcatgattcgtccacagcaaccgagcaagagctcgctaaattgtgcttgtgttcgcatgagcctctaccgccttctgacatgctcgcggacttgaccatggcctcgattcgtttatgttaactcaaatgccactcgtggctattatcagcagctctgggctgtcatagatacaggccgtctgctcaggtcgatcggtcctgtgtgacttcagagttgtgcttgtcattccaagtcactcctgctgtgttcattgaaacagcggtcatggaataaggcctggctttgcaactacgcctactggtcttgccgaatttctaggttccgtttcgaatcatcgccatattaccgaggcatcggtcagtatcgccagaccttctgtctctctttgttgcctctacgtgttttgcttgatcacgtcatttccttcacgctcgtttgtgctcgatcactgtatctacgtgaggccaagatcaaaactatctgttcaatttctccgagcatcattcagcattgtcccgcgaatcacgactcccatggcgatgagttcattgccgtcagtacctatgaatgtgtcacagacagaataggccacgtcctacttgcctagcgaatgctctggatctgtagggtgcccggttaagaactcgagcctggcaaggagagcaaagcatacccgacagtaacattgcattggcctagttgtaatgtggaattgaaaatctgctacttactgattttgaaagccaagaaagcgatcatctcggcacaagatggtcggcctgcgatacatagggcggaatgcggtggctacattgctgcttgcgggcaggcatgtcgacgcctacgatcttgatgttcaatccacatcctcgattctctcagtcgcaaagcagatggcgtcagacttgatatcgttctactctggcaatcacccaggagggatacctggtcttcttccgcagccatattactggtgggagggcggtgcgttaatgggcgctctgatcgactactggtattacactggtgatacgacgtacaacgatcttactatccagggcatgttgcaccaagtcgggccgtataacgattacatgccgccgaatcagacgctcacggaaggaaacgacgatcaaggattctggggcatggccgcaatgagtgccgcagaagtcaattttccgaacccaccgagtaataaacctcaatggcttgccctagcccaagctgtcttcaatactcaagccgcacgatgggatcaacagcactgcaatggtggcttacggtggcagatatttacttggaacaatgggtacgactacaagaactccatctcacaagcctgcttctttaacatcgctgcacgactcgcgctctataccggaaatgtcacatacgcagagtgggcggtgaagacatgggactggatggcgggcgtcggtttcttggggcccacgtaccggatttacgatggtgcgcacactacggataactgttcagccatcacgccttatgagttctcctacaatgtcggcgcattcatgctcggcgcggcggccatggtcgagtattcgaaccagacaggaaattcgggcgacactgcgctatggcataagcgcgttgacggactactggacagcgccgagcttatcttcttctttggcatcaatgacaatgataaaatcatgatcgagatcgcatgcgagccggtcaatctctgtgacactgatcagctttccttcaaagcctacctcagccgttggatggcggctaccacgaaatgggcgccttggacattgacgaaaatcaagaagttgctgcgtaactccgccgaagctgccgcaaagcaatgcacgggcggcgccaatggtcgcatgtgcgggctgaaatgggctaataatagcggactgtgggatggcaccactggagtagggcagcagatggctgctatggaagttgttctagcaaatatgatacatgatgcgaaaccacccgtcacgaacactactggtggcacaagtgagggtgaccccagcgcgggtggttcggacaatggacgcatcgacccagtagggtggcattatggccccatccgggatggagatcgagccggtgctgcgttggtgacagtcattgtccttgcggcgttcctgaccgcgcttgtctttatgcttgctgatgagaataagagcttcaatgagaattggggcgagtttaggtctacggttagtcttggaaacgttgtgccggtgtctggggatgagaggagagagagcgagaagggaaaggggaaggagttgtgggattcgagtgcggagaatagcccagtggatgttgttcccccaataaatactgctcttgagcaaagggaggtaaagaggaaatccgtgagcgggccggcgatggagggcaggggaagggagctgattgggggttcgagcagtctttattctattcgtcatgtgaaggaggacgtgtgagtgaaccgcgtaatgggttatgtaaaaagcttcttttcacacttggcctctgacccgagtgatggattattattctagatgtatggatattggattacgatataatacgatatttgattaagtacgag

SEQ ID NO: 39443 - DNA, 1074 bp, Muscodor strobelii
  misc_feature: SGI cDNA ID NO. 573723
  misc_feature: Encodes the peptide sequence at SEQ ID NO 39444
atggatccggaagctactccgggctgctcggctgattgcagggccgcgtgcgatgagaactcactaccaccatcatcgcctgagtgtcccggacgggcagaacacgcttatgcacacggttggcgacgtgtcgtgatcaactttacgccttcgtggtttagtgtgactatgggcacaggcatagtgtccatactcttgcacaacctgccgtataacgcggcgtggctctactggatatccgttggcgtcttcggcttcaacgttgcgttgttcatcctcttctccgccatttccatactccgatacacaatattccccggaatatggtctgctatgatccgtcaccctgttcagtcgttattcctcggtacaataccaatgggcttggcaaccatcattaacatgattgctttcgtttgcgtcccagcctggggagactgggccgcgacacttgcctgggctctttggtggattgatgtagtccttgcacttgctacaaattgctatctcccattcgtgattatgtataaacacgagtcaacgctctctactatgactgccgcttggctactccctatcgtcgcgacaattgtctccgctgcttctggcgcaatagtcgccagtgtgctgccgaatcgagagcatgccatatggaccgtgaccatttgctacatcctttggggttgcggcgtgccattggctctgttcaccatggttatatactttcagcgtttgactctacaccgattacctccgcgtgaggtcatcgtgtccgtgttcctacctcttggcccgctagggcaaggcgggttcgccattatgcagctcggtcaggatgccctcagccttttcggccgggacgatgacccttacatccccgcggcgtcccttgctggccagattcttttcacggtgggtattcttgttgcactcatcatgtggggcttcgggctcgtttggctcttcttcgctgttgcgtcaatttcgcggagcagatttccctttaatattggatggtgggggttcactttttccattaggcgtattttcgctttcgaccacagcactggctaa

SEQ ID NO: 39444 - protein, 357 aa, Muscodor strobelii
  misc_feature: SGI Peptide ID NO. 573723
  misc_feature (50)..(345): Pfam Id: PF03595 Pfam Desc: C4-dicarboxylate transporter/malic acid transport protein
  misc_feature (50)..(344): Pfam Id: PF03595 Pfam Desc: C4-dicarboxylate transporter/malic acid transport protein
  misc_feature (4)..(346): NCBI GI: 261356394 Blast Desc: sulfite transporter Ssu1 [Verticillium albo-atrum VaMs.102]
  misc_feature (19)..(346): NCBI GI: 121709274 Blast Desc: C4-dicarboxylate transporter/malic acid transport protein, [Aspergillus clavatus NRRL 1] gi|119400516|gb|EAW10941.1| C4-dicarboxylate transporter/malic 1]
  misc_feature (26)..(346): NCBI GI: 76057134 Blast Desc: malate permease [Aspergillus niger]
  misc_feature (26)..(346): NCBI GI: 145245839 Blast Desc: An12g00870 [Aspergillus niger] gi|134079885|emb|CAK41017.1| protein product [Aspergillus niger]
  misc_feature (40)..(344): NCBI GI: 61741459 Blast Desc: sulfite transporter Ssu1 [Aspergillus fumigatus]
  misc_feature (40)..(344): NCBI GI: 70982450 Blast Desc: MFS transporter [Aspergillus fumigatus Af293] gi|66844377|gb|EAL84715.1| MFS transporter, [Aspergillus fumigatus Af293] gi|159123007|gb|EDP48127.1| MFS transporter,
  misc_feature (57)..(344): NCBI GI: 256731286 Blast Desc: NECHADRAFT_49515 [Nectria haematococca mpVI 77-13-4]
  misc_feature (1)..(344): NCBI GI: 256727559 Blast Desc: [Nectria haematococca mpVI 77-13-4]
  misc_feature (57)..(344): NCBI GI: 119489032 Blast Desc: C4-dicarboxylate transporter/malic acid transport protein, [Neosartorya fischeri NRRL 181] gi|119410974|gb|EAW20919.1| C4-dicarboxylate transporter/malic
  misc_feature (30)..(344): NCBI GI: 238498838 Blast Desc: C4-dicarboxylate transporter/malic acid transport protein, [Aspergillus flavus NRRL3357] gi|220693928|gb|EED50273.1| C4-dicarboxylate transporter/malic
MDPEATPGCSADCRAACDENSLPPSSPECPGRAEHAYAHGWRRVVINFTPSWFSVTMGTGIVSILLHNLPYNAAWLYWISVGVFGFNVALFILFSAISILRYTIFPGIWSAMIRHPVQSLFLGTIPMGLATIINMIAFVCVPAWGDWAATLAWALWWIDVVLALATNCYLPFVIMYKHESTLSTMTAAWLLPIVATIVSAASGAIVASVLPNREHAIWTVTICYILWGCGVPLALFTMVIYFQRLTLHRLPPREVIVSVFLPLGPLGQGGFAIMQLGQDALSLFGRDDDPYIPAASLAGQILFTVGILVALIMWGFGLVWLFFAVASISRSRFPFNIGWWGFTFSIRRIFAFDHSTG

SEQ ID NO: 39445 - DNA, 2722 bp, Muscodor strobelii
  misc_feature: SGI EST ID NO. CUFF.94972.1
  misc_feature: Variant of the nucleotide sequence at SEQ ID NO 39443
ctgcggtctgtccaacgcacccgatatccgacaaagacttctgactgtcgcaaatatgaacgtcttggctgaacctcgaaatatttgtgcctccattagcgtgggcttgtagtgataagactaggtaggttcatcactccgagcatgcatgtagattaattgcgaataggcattctcgttgaagccgtcgaccttcttctccctctaaaattggccttgcccatgaacagatttcatttgacttgcacgggagcgatcccttcgctggcgcattcacgtgacgatcaccctcattatccgatttgcagcgcttgccataatactggaccaccgagtcgattcttcgacaacgaagtgatgcagtgcagccatttgtcactgcgagtgactaaacggttcaggacttaaaggaaagatgtggtataaatgcgtaattattatgcttcggccccctggaactcggcgtgtctcgtggaatttcccgcatctcagccggtcgcttttccattcgactcgggaacaagaattatgaattttctgcgcatgctttgggtatgtctcttgttagacagaatcatgccgggatgctttcaaacttggccaaatcccgactgagagcgaaggtgaggtaggctgactcattcttgcaatttgcctgcgctcatgtaacgttgatgccgaaagctgccgtctcttacggctttcgcgcttacggacctgaactgaagatgggcactatacggatataccgaggccgccgatagcctccgatgccgtacgctatgtttccgttgcggatataaagatttgattgagcttgtaaatcgaaatattgattactagaggacagcacgcttgctcatctagcccaatctgacgttgaattcaacgagggtaccgactgttgcgacgacaatataggttgtcttagcgtctgattgctcttggttgcgagctatttcaattttccttgccagaacgtactcgatggatccggaagctactccgggctgctcggctgattgcagggccgcgtgcgatgagaactcactaccaccatcatcgcctgagtgtcccggacgggcagaacacgcttatgcacacggttggcgacgtgtcgtgatcaactttacgccttcgtggtttagtgtgactatgggcacaggcatagtgtccatactcttgcacaacctgccgtataacgcggcgtggctctactggatatccgttggcgtcttcggcttcaacgttgcgttgttcatcctcttctccgccatttccatactccgatacacaatattccccggaatatggtctgctatgatccgtcaccctgttcagtcgttattcctcggtacaataccaatgggcttggcaaccatcattaacatgattgctttcgtttgcgtcccagcctggggagactgggccgcgacacttgcctgggctctttggtggattgatgtagtccttgcacttgctacaaattgctatctcccattcgtgattatgtataaacacgagtcaacgctctctactatgactgccgcttggctactccctatcgtcgcgacaattgtctccgctgcttctggcgcaatagtcgccagtgtgctgccgaatcgagagcatgccatatggaccgtgaccatttgctacatcctttggggttgcggcgtgccattggctctgttcaccatggttatatactttcagcgtttgactctacaccgattacctccgcgtgaggtcatcgtgtccgtgttcctacctcttggcccgctagggcaaggcgggttcgccattatgcagctcggtcaggatgccctcagccttttcggccgggacgatgacccttacatccccgcggcgtcccttgctggccagattcttttcacggtgggtattcttgttgcactcatcatgtggggcttcgggctcgtttggctcttcttcgctgttgcgtcaatttcgcggagcagatttccctttaatattggatggtgggggttcactttttccattaggcgtattttcgctttcgaccacagcactggctaaggagctcccctcggtgttctttaagggactcggtactgctttcagtctcatcgttgtggtcttgtggatcgttgtgagtctaggtacattgaggcatagtttctccggccgcctactccaggcaccatgcattccagattgggaagagaagaagtcaatgagagatgactctccagcgtagtttaaccatcctatccccaatgcaggcaaagaatgtcatgacgttgatgtgaaagccactatcaatacacttgtgtctgatgtacacactaattctggtgccttcaactcttcagactccggtgcaatttgtcgagacgtaaggtgatggacgcgtatcgtcacagattgatgttgcatcaagtctatcatcgccggtctatttgctcggttagtatagtcttgctctgttgttctgctaatcaattcagatacccggtggaggtctttccgttcgaaatgagaacgaagggtccaaagggtcaagcagtctgtattgccatacagactaacctggctcaaatggaattagttggcatagcaccgagatcaaatcacggagcctcgagctgaccattgactctttcacatagttacagccattgtgttgggatattgggttgatcgtcagtcgtctttggttcttcttctcggagaccag

SEQ ID NO: 39446 - DNA, 906 bp, Muscodor strobelii
  misc_feature: SGI cDNA ID NO. 573724
  misc_feature: Encodes the peptide sequence at SEQ ID NO 39447
atgggcacaggcatagtgtccatactcttgcacaacctgccgtataacgcggcgtggctctactggatatccgttggcgtcttcggcttcaacgttgcgttgttcatcctcttctccgccatttccatactccgatacacaatattccccggaatatggtctgctatgatccgtcaccctgttcagtcgttattcctcggtacaataccaatgggcttggcaaccatcattaacatgattgctttcgtttgcgtcccagcctggggagactgggccgcgacacttgcctgggctctttggtggattgatgtagtccttgcacttgctacaaattgctatctcccattcgtgattatgtataaacacgagtcaacgctctctactatgactgccgcttggctactccctatcgtcgcgacaattgtctccgctgcttctggcgcaatagtcgccagtgtgctgccgaatcgagagcatgccatatggaccgtgaccatttgctacatcctttggggttgcggcgtgccattggctctgttcaccatggttatatactttcagcgtttgactctacaccgattacctccgcgtgaggtcatcgtgtccgtgttcctacctcttggcccgctagggcaaggcgggttcgccattatgcagctcggtcaggatgccctcagccttttcggccgggacgatgacccttacatccccgcggcgtcccttgctggccagattcttttcacggtgggtattcttgttgcactcatcatgtggggcttcgggctcgtttggctcttcttcgctgttgcgtcaatttcgcggagcagatttccctttaatattggatggtgggggttcactttttccattaggcgtattttcgctttcgaccacagcactggctaa

SEQ ID NO: 39447 - protein, 301 aa, Muscodor strobelii
  misc_feature: SGI Peptide ID NO. 573724
  misc_feature (1)..(289): Pfam Id: PF03595 Pfam Desc: C4-dicarboxylate transporter/malic acid transport protein
  misc_feature (1)..(288): Pfam Id: PF03595 Pfam Desc: C4-dicarboxylate transporter/malic acid transport protein
  misc_feature (1)..(290): NCBI GI: 261356394 Blast Desc: sulfite transporter Ssu1 [Verticillium albo-atrum VaMs.102]
  misc_feature (1)..(290): NCBI GI: 256731286 Blast Desc: NECHADRAFT_49515 [Nectria haematococca mpVI 77-13-4]
  misc_feature (1)..(290): NCBI GI: 119489032 Blast Desc: C4-dicarboxylate transporter/malic acid transport protein, [Neosartorya fischeri NRRL 181] gi|119410974|gb|EAW20919.1| C4-dicarboxylate transporter/malic
  misc_feature (1)..(290): NCBI GI: 76057134 Blast Desc: malate permease [Aspergillus niger]
  misc_feature (1)..(290): NCBI GI: 145245839 Blast Desc: An12g00870 [Aspergillus niger] gi|134079885|emb|CAK41017.1| protein product [Aspergillus niger]
  misc_feature (1)..(290): NCBI GI: 121709274 Blast Desc: C4-dicarboxylate transporter/malic acid transport protein, [Aspergillus clavatus NRRL 1] gi|119400516|gb|EAW10941.1| C4-dicarboxylate transporter/malic 1]
  misc_feature (1)..(290): NCBI GI: 61741459 Blast Desc: sulfite transporter Ssu1 [Aspergillus fumigatus]
  misc_feature (1)..(290): NCBI GI: 70982450 Blast Desc: MFS transporter [Aspergillus fumigatus Af293] gi|66844377|gb|EAL84715.1| MFS transporter, [Aspergillus fumigatus Af293] gi|159123007|gb|EDP48127.1| MFS transporter,
  misc_feature (1)..(290): NCBI GI: 238498838 Blast Desc: C4-dicarboxylate transporter/malic acid transport protein, [Aspergillus flavus NRRL3357] gi|220693928|gb|EED50273.1| C4-dicarboxylate transporter/malic
  misc_feature (1)..(290): NCBI GI: 169781986 Blast Desc: [Aspergillus oryzae RIB40] gi|83774198|dbj|BAE64323.1| protein product [Aspergillus oryzae]
MGTGIVSILLHNLPYNAAWLYWISVGVFGFNVALFILFSAISILRYTIFPGIWSAMIRHPVQSLFLGTIPMGLATIINMIAFVCVPAWGDWAATLAWALWWIDVVLALATNCYLPFVIMYKHESTLSTMTAAWLLPIVATIVSAASGAIVASVLPNREHAIWTVTICYILWGCGVPLALFTMVIYFQRLTLHRLPPREVIVSVFLPLGPLGQGGFAIMQLGQDALSLFGRDDDPYIPAASLAGQILFTVGILVALIMWGFGLVWLFFAVASISRSRFPFNIGWWGFTFSIRRIFAFDHSTG

SEQ ID NO: 39448 - DNA, 2722 bp, Muscodor strobelii; identical to SEQ ID NO: 39445
  misc_feature: SGI EST ID NO. CUFF.94972.1
  misc_feature: Variant of the nucleotide sequence at SEQ ID NO 39446

SEQ ID NO: 39449 - DNA, 354 bp, Muscodor strobelii
  misc_feature: SGI cDNA ID NO. 573725
  misc_feature: Encodes the peptide sequence at SEQ ID NO 39450
atgtcgaaccaagacgccccctacgatccctacatccccagcggccagcagggcgccggtgctcagcagggcggcaatgccaggactcaggctctccaggctcaaatcgacgacactgttggtgtgatgcgcgagaacatcaataaggtttcccagcgtggcgagcgtctcgatgcccttcaggataagaccgacaaccttgccgtatccgcccagggcttccgtcgtggcgccaaccgtgtccgcaagcagatgtggtggaaggacatgaagatgaggatgtgcctcatcgctggtatcattattctccttgtcatcatcatcgtcccttcagtcatctttggcggcaaataa

SEQ ID NO: 39450 - protein, 117 aa, Muscodor strobelii
  misc_feature: SGI Peptide ID NO. 573725
  misc_feature (25)..(113): Pfam Id: PF00957 Pfam Desc: Synaptobrevin
  misc_feature (4)..(95): NCBI GI: 261353644 Blast Desc: synaptobrevin [Verticillium albo-atrum VaMs.102]
  misc_feature (1)..(97): NCBI GI: 256733618 Blast Desc: NECHADRAFT_92014 [Nectria haematococca mpVI 77-13-4]
  misc_feature (1)..(113): NCBI GI: 46128319 Blast Desc: FG08537.1 [Gibberella zeae PH-1]
  misc_feature (1)..(114): NCBI GI: 154277532 Blast Desc: synaptobrevin [Ajellomyces capsulatus NAm1] gi|150413192|gb|EDN08575.1| synaptobrevin [Ajellomyces capsulatus NAm1] gi|225561069|gb|EEH09350.1| synaptobrevin [Ajellomyces
  misc_feature (1)..(113): NCBI GI: 255950900 Blast Desc: Pc22g23260 [Penicillium chrysogenum Wisconsin 54-1255] gi|211593234|emb|CAP99614.1| Pc22g23260 [Penicillium chrysogenum Wisconsin 54-1255]
  misc_feature (1)..(93): NCBI GI: 119173090 Blast Desc: CIMG_10080 [Coccidioides immitis RS] gi|240111750|gb|EER29895.1| Synaptobrevin family protein [Coccidioides posadasii C735 delta SOWgp]
  misc_feature (1)..(113): NCBI GI: 225683812 Blast Desc: synaptobrevin [Paracoccidioides brasiliensis Pb03] gi|226277913|gb|EEH33479.1| conserved [Paracoccidioides brasiliensis Pb01] gi|226293191|gb|EEH48611.1| conserved Pb18]
  misc_feature (1)..(96): NCBI GI: 156055512 Blast Desc: SS1G_05108 [Sclerotinia sclerotiorum 1980] gi|154702892|gb|EDO02631.1| SS1G_05108 [Sclerotinia sclerotiorum 1980]
  misc_feature (1)..(114): NCBI GI: 261189123 Blast Desc: synaptobrevin [Ajellomyces dermatitidis SLH14081] gi|239591758|gb|EEQ74339.1| synaptobrevin [Ajellomyces dermatitidis SLH14081] gi|239614675|gb|EEQ91662.1| synaptobrevin
  misc_feature (5)..(113): NCBI GI: 164428431 Blast Desc: NCU00566 [Neurospora crassa OR74A] gi|157072145|gb|EAA35491.2| [Neurospora crassa OR74A]
MSNQDAPYDPYIPSGQQGAGAQQGGNARTQALQAQIDDTVGVMRENINKVSQRGERLDALQDKTDNLAVSAQGFRRGANRVRKQMWWKDMKMRMCLIAGIIILLVIIIVPSVIFGGK

SEQ ID NO: 39451 - DNA, 1229 bp, Muscodor strobelii
  misc_feature: SGI EST ID NO. CUFF.94948.0
  misc_feature: Variant of the nucleotide sequence at SEQ ID NO 39449
ggcgtcgctgccaactctttctttgatttgcacccacctgcaggcagcgccaaccctgcggaacccctgccaacggctacgtacctcatcaaaccttctgaccttccaaatagcacccgagccacctgcgccgacctctcctcagactcgtcgtttctgttttcaacccgtctccattccatcaaccatcaaccgaccaccccattatcgacgacgtcaacgccgccgcatcccaccatcgactctgcgactcaattatcaatcctcaacaccatcctacgcccacatctcgtctgcgaccgaccgtattgaccctccgactctaatccgcatcgtctaaaccgccatcatgtcgaaccaagacgccccctacgatccctacatccccagcggccagcagggcgccggtgctcagcagggcggcaatgccaggactcaggctctccaggctcaaatcgacgacactgttggtgtgatgcgcgagaacatcaataaggtttcccagcgtggcgagcgtctcgatgcccttcaggataagaccgacaaccttgccgtatccgcccagggcttccgtcgtggcgccaaccgtgtccgcaagcagatgtggtggaaggacatgaagatgaggatgtgcctcatcgctggtatcattattctccttgtcatcatcatcgtcccttcagtcatctttggcggcaaataaatctgcttccaccggcatcctttactagcagcctacgttgggtaacgagcagcatacagccttatgggattgcggatttggtttgattgcaacgaggaacgatttgtcattgtttttgcccgccttcgtcttggccccccttccgaattagagatacccacctttgtatcatcaaaaagctctagtcggaaagctcaggcagacgaggaggaaagagaccacacaagcacggcacagaggagtttctacatctttggaggagtttcgtttcgcggcacaggttcttttagtctcttcatgatgcgaagagctgctgcctccaaccaagagtacgtgactggagggctagggtagagcagagaagaaccgggtgacttgtatttatgacggcgaggtgctttacccccaccactaattgagatatgtcacgaccctgattttgatgttcatgcctttgttggtgttgtacaagtgagaggatgtgcttggcccattgtagatgacaaagcattttgctatgactgag

SEQ ID NO: 39452 - DNA, 750 bp, Muscodor strobelii
  misc_feature: SGI cDNA ID NO. 573726
  misc_feature: Encodes the peptide sequence at SEQ ID NO 39453
atgtctagccatgctgctgggaaaggtttaagctacttcgcagcgctaaaaaataaaaatatttatgactacctgtatccacaagtcaaggacgggacgtacacactaagtccggacgatatatgcaccggtgtgatgttgcagaccccattcttcaagctatacgagcttcagggaatgaccaggggtaaggccaacaaaaatccgttgatatcaggactacgggcaggattcgaaatacttgatgctgaggttgaggaactaggcgacgatgctagaagggagcggtacagagtgttcttacttgatccggtggacaagaatcttactggcaaagctgcgttgaaatccttcggcgatctaacgtatcaggaggccaagcgctactcgctcgctcatcgctggagaatggacatctcatcatataacaagaactacaccccagacagaaatttttatcacctagcgtatgacacgaatggtttcgaacacggaaccgataatcctgttgttataattgctgggattgacaatatgctcaatgacgagaccaaggatgactttgatgctctgatgcacctgctcaccgcggaactcgtacgcaggaagaacggtcggatagagatttacacccacaaagccactggccattccacatggctgagggaaaggatcctgaggtgggaagagttcgccttgcctgctccgaaatattttcttaacacatggcatggctcttctccgccctaa

SEQ ID NO: 39453 - protein, 249 aa, Muscodor strobelii
  misc_feature: SGI Peptide ID NO. 573726
MSSHAAGKGLSYFAALKNKNIYDYLYPQVKDGTYTLSPDDICTGVMLQTPFFKLYELQGMTRGKANKNPLISGLRAGFEILDAEVEELGDDARRERYRVFLLDPVDKNLTGKAALKSFGDLTYQEAKRYSLAHRWRMDISSYNKNYTPDRNFYHLAYDTNGFEHGTDNPVVIIAGIDNMLNDETKDDFDALMHLLTAELVRRKNGRIEIYTHKATGHSTWLRERILRWEEFALPAPKYFLNTWHGSSPP

SEQ ID NO: 39454 - DNA, 252 bp, Muscodor strobelii
  misc_feature: SGI EST ID NO. CUFF.94954.0
  misc_feature: Variant of the nucleotide sequence at SEQ ID NO 39452
ccaacaaaaatccgttgatatcaggactacgggcaggattcgaaatacttgatgctgaggttgaggaactaggcgacgatgctagaagggagcggtacagagtgttcttacttgatccggtggacaagaatcttactggcaaagctgcgttgaaatccttcggcgatctaacgtatcaggaggccaagcgctactcgctcgctcatcgctggagaatggacatctcatcatataacaagaactacaccccag

SEQ ID NO: 39455 - DNA, 726 bp, Muscodor strobelii
  misc_feature: SGI cDNA ID NO. 573727
  misc_feature: Encodes the peptide sequence at SEQ ID NO 39456
atgtcccaaataacgaggaagattgacagacacatcgtacctttaatgctcttatgttacttcctacagtttctcgacaaggtcttggtcaactacgccaacgtcatgggtttctcaaaatcgttgaaccttcaggccaatgacttcccttggctatccacttccctgttcatcgcatacgctatcagtgaattcttccagggctatctcatacagaactaccccgtcggaaaagtcctcggcatcaatgtgatactttggggcgtcacagtcaccacaatggccggtgttcagaactttgcgggtgcagttgctgtcaggactttgttgggcgtcttcgaggccgtcatatctccggcactagtcataatcacggcgcagtggtacactaagaagcaagctaccccacgaaccggcatctggtattccggactcgggcttgcacagattgtcgggggcttgatctcttttgcggcacagcacggccccacgaagccgccctttgagggctggaggatcatgttcacggctgtgggtatattcaacctaatcgtcggcgctgcggtcacagtttggatgccatccagcattcaggagtcgaaattcttagacgagtttgagaaagacgcgctgcgtctcgagctagcgaaggaccagagcggaactggattgaaaatgtttcgcattggcgggatgtgggaggctttttctgacgttcaggtttag

SEQ ID NO: 39456 - protein, 241 aa, Muscodor strobelii
  misc_feature: SGI Peptide ID NO. 573727
  misc_feature (16)..(233): Pfam Id: PF07690 Pfam Desc: Major Facilitator Superfamily
  misc_feature (1)..(241): NCBI GI: 46118668 Blast Desc: FG04723.1 [Gibberella zeae PH-1]
  misc_feature (6)..(240): NCBI GI: 115396720 Blast Desc: conserved [Aspergillus terreus NIH2624] gi|114193568|gb|EAU35268.1| conserved [Aspergillus terreus NIH2624]
  misc_feature (6)..(240): NCBI GI: 238507475 Blast Desc: allantoate permease, [Aspergillus flavus NRRL3357] gi|220689652|gb|EED46003.1| allantoate permease, [Aspergillus flavus NRRL3357]
  misc_feature (2)..(240): NCBI GI: 145234925 Blast Desc: An03g02120 [Aspergillus niger] gi|134057787|emb|CAK38182.1| protein product [Aspergillus niger]
  misc_feature (3)..(240): NCBI GI: 255940318 Blast Desc: Pc16g05910 [Penicillium chrysogenum Wisconsin 54-1255] gi|211585551|emb|CAP93261.1| Pc16g05910 [Penicillium chrysogenum Wisconsin 54-1255]
  misc_feature (32)..(240): NCBI GI: 169786463 Blast Desc: [Aspergillus oryzae RIB40] gi|83776440|dbj|BAE66559.1| protein product [Aspergillus oryzae]
  misc_feature (2)..(240): NCBI GI: 259486629 Blast Desc: TPA: conserved [Aspergillus nidulans FGSC A4]
  misc_feature (1)..(241): NCBI GI: 212544238 Blast Desc: MFS transporter, [Penicillium marneffei ATCC 18224] gi|210065242|gb|EEA19336.1| MFS transporter, [Penicillium marneffei ATCC 18224]
  misc_feature (1)..(241): NCBI GI: 242811844 Blast Desc: MFS transporter, [Talaromyces stipitatus ATCC 10500] gi|218714174|gb|EED13597.1| MFS transporter, [Talaromyces stipitatus ATCC 10500]
  misc_feature (1)..(241): NCBI GI: 70981422 Blast Desc: MFS transporter [Aspergillus fumigatus Af293] gi|66843862|gb|EAL84203.1| MFS transporter, [Aspergillus fumigatus Af293] gi|159122710|gb|EDP47831.1| MFS transporter,
MSQITRKIDRHIVPLMLLCYFLQFLDKVLVNYANVMGFSKSLNLQANDFPWLSTSLFIAYAISEFFQGYLIQNYPVGKVLGINVILWGVTVTTMAGVQNFAGAVAVRTLLGVFEAVISPALVIITAQWYTKKQATPRTGIWYSGLGLAQIVGGLISFAAQHGPTKPPFEGWRIMFTAVGIFNLIVGAAVTVWMPSSIQESKFLDEFEKDALRLELAKDQSGTGLKMFRIGGMWEAFSDVQV

SEQ ID NO: 39457 - DNA, 1805 bp, Muscodor strobelii
  misc_feature: SGI EST ID NO. CUFF.94969.0
  misc_feature: Variant of the nucleotide sequence at SEQ ID NO 39455
caacatcccaatagatcacatgcccatagtcatgcgcaatcatctttatcaagaaagagtattcccagttcccccaagttcaacactcgcaattcaatctgtggtaaaatggagaaaacagtcaatatgaaaggttcaccagcaagccactctttgtcgcatgatgaagtcgatcaaagtcaacatatcgcggcacccgggcaaatgtcccaaataacgaggaagattgacagacacatcgtacctttaatgctcttatgttacttcctacagtttctcgacaaggtcttggtcaactacgccaacgtcatgggtttctcaaaatcgttgaaccttcaggccaatgacttcccttggctatccacttccctgttcatcgcatacgctatcagtgaattcttccagggctatctcatacagaactaccccgtcggaaaagtcctcggcatcaatgtgatactttggggcgtcacagtcaccacaatggccggtgttcagaactttgcgggtgcagttgctgtcaggactttgttgggcgtcttcgaggccgtcatatctccggcactagtcataatcacggcgcagtggtacactaagaagcaagctaccccacgaaccggcatctggtattccggactcgggcttgcacagattgtcgggggcttgatctcttttgcggcacagcacggccccacgaagccgccctttgagggctggaggatcatgttcacggctgtgggtatattcaacctaatcgtcggcgctgcggtcacagtttggatgccatccagcattcaggagtcgaaattcttagacgagtttgagaaagacgcgctgcgtctcgagctagcgaaggaccagagcggaactggattgaaaatgtttcgcattggcgggatgtgggaggctttttctgacgttcaggtttagctgctcttccttgcggtaattctgatgaccattccctcagggattatcactacattttcggcaacccttatccgggaatttggctatgactccaaacaagcggcattattgaacatgccatcaggggttgtatcgatcctcgcgacactcctaagtacgttctccatcttgtacgacttccccaggtggcaagcaatctgcctgctaatggtgcccacactcatcggagctggactcatgtcattctactcctcgagccaggcaggctctctcgcgggtatatatctcatcaatttcgacgtcacgccagttgcacttgtttacgcacttgttggtgccaacacctacggatatacaaagaaagtaacggcaaatgccatgatcgcgatcggatttagcatcgccaatgtcattggcccgcaaacgtttcaagctggggacgcacccgagtatattccagcgaagatcactgtttttgtcgtggcaggtagcgtcgtagtgattagtatcgctatcaggttactatacggcgtaagaaataagaggaggagagtcgcgcgggaggtagaattgaaggcaattgagagaggacagatcagcgtagaagaggcagaaaaaaggcaggatctgacggataagacgcatcctgccttcatctacgtgtattgaagacagaaacgatgtctttgaacggagttgctgatgtccgctttggtacagttgaggatttccctaccgatcgattggttacttaaggaattcacgatcgcggtcttcgttataagtaaggtccctgaattttgactgagaaagccaagcagaaatcgcaagtgccaattgagacgtagactaattacaggtccttctcaataaag

SEQ ID NO: 39458 - DNA, 1254 bp, Muscodor strobelii
  misc_feature: SGI cDNA ID NO. 573728
  misc_feature: Reduced expression when VOC is produced
  misc_feature: Encodes the peptide sequence at SEQ ID NO 39459
atgcccgaaaggccggttctcatcatcggatgcggcgtggcaggcttggcgcttgccaacggcctgaagaaggagggtattttatttacactcttcgagcgcgatgctcatatatcttcccggaatcaaggttgggccattactctgcactggtgtctcccgttcttgcgctctctgctctccccatccgccatcgcgagtctcaaagcagcgcaggtagatcctgatgtagagagcaacagctttgtctttttgaatctcgacaccctcgaacccaagttccatatcccacctaatgcggagcgctggcgtatgaaccgcgagagatttcgacgagagctgctacgcgatgtcgaggatcgtgtgcaatggaataaaaagctcacgtctattgccgtggccaacgactctggcgtcaccagcagggaatctgattatgtgattgccactttcgccgacgggaccaaggtcgaaggcagtctcttagtgggcacagagggtagtaattcatacacaagggagttcttggcacgtggcgcacaccgcaacaatcagttgcccgtacaactgatgggtatgaccgtcaacttgacacgcgcgcaggtcacacccctgcgcgccatcgatccgctgcttttccaggggtgtcatccggacacgggggactttatatatgctagccttgtaggaacgccaggctccaacagtgtagaggggatgcatacagctgatggcatgtaccgcttccaggtcatgatgtcttggctcactgggacaaaagggaaaagtcaggaacacgatgatggacagagaccgacaatcgaggagcgcctggtagacctgaagcgccgtgcagcacattttcatcctgtacttcgcgacttaattcagggcgcgccgtcggcaaccgaagtcatcgaaatcatagtgcaagactggctaccgacctcctgggataatcatcacggaagggtaactttgatcggtgatgcggcccatgccatgacgatgtaccgcggcgaagcagggaatcacggaatcttggatgcctttcgggtatgcgaggtattgaaagatgtgtatagcgggaagaggacacaagttgaggtaattgacgagtatgagaaggagatgaggaatcgcacaagcgccgctgtgctttcgagtcgacaggcttgcttggatgcgcatgatcttgctaagctaaatgagaactcagcggtattgagacggagagccgtgccggatgtttag

SEQ ID NO: 39459 - protein, 417 aa, Muscodor strobelii
  misc_feature: SGI Peptide ID NO. 573728
  misc_feature (3)..(389): Pfam Id: PF01494 Pfam Desc: FAD binding domain
  misc_feature (4)..(417): NCBI GI: 46118629 Blast Desc: FG04720.1 [Gibberella zeae PH-1]
  misc_feature (5)..(414): NCBI GI: 238507469 Blast Desc: monooxygenase, [Aspergillus flavus NRRL3357] gi|220689649|gb|EED46000.1| monooxygenase, [Aspergillus flavus NRRL3357]
  misc_feature (5)..(414): NCBI GI: 145234919 Blast Desc: An03g02090 [Aspergillus niger] gi|134057784|emb|CAK38179.1| protein product [Aspergillus niger]
  misc_feature (5)..(414): NCBI GI: 255940324 Blast Desc: Pc16g05940 [Penicillium chrysogenum Wisconsin 54-1255] gi|211585554|emb|CAP93264.1| Pc16g05940 [Penicillium chrysogenum Wisconsin 54-1255]
  misc_feature (5)..(406): NCBI GI: 67903202 Blast Desc: AN8588.2 [Aspergillus nidulans FGSC A4] gi|40741432|gb|EAA60622.1| AN8588.2 [Aspergillus nidulans FGSC A4] gi|259483200|tpe|CBF78384.1| TPA: conserved [Aspergillus FGSC
  misc_feature (6)..(415): NCBI GI: 156039295 Blast Desc: SS1G_11784 [Sclerotinia sclerotiorum 1980] gi|154697521|gb|EDN97259.1| SS1G_11784 [Sclerotinia sclerotiorum 1980]
  misc_feature (2)..(413): NCBI GI: 242821880 Blast Desc: monooxygenase, [Talaromyces stipitatus ATCC 10500] gi|218712692|gb|EED12117.1| monooxygenase, [Talaromyces stipitatus ATCC 10500]
  misc_feature (110)..(414): NCBI GI: 169786457 Blast Desc: [Aspergillus oryzae RIB40] gi|83776437|dbj|BAE66556.1| protein product [Aspergillus oryzae]
  misc_feature (6)..(376): NCBI GI: 154309919 Blast Desc: BC1G_06880 [Botryotinia fuckeliana B05.10] gi|150851668|gb|EDN26861.1| BC1G_06880 [Botryotinia fuckeliana B05.10]
  misc_feature (2)..(350): NCBI GI: 67901820 Blast Desc: AN7897.2 [Aspergillus nidulans FGSC A4] gi|40740361|gb|EAA59551.1| AN7897.2 [Aspergillus nidulans FGSC A4] gi|259480646|tpe|CBF73480.1| TPA: FAD binding domain protein
  misc_feature: Useful for introducing or modulating the production of volatile compounds
MPERPVLIIGCGVAGLALANGLKKEGILFTLFERDAHISSRNQGWAITLHWCLPFLRSLLSPSAIASLKAAQVDPDVESNSFVFLNLDTLEPKFHIPPNAERWRMNRERFRRELLRDVEDRVQWNKKLTSIAVANDSGVTSRESDYVIATFADGTKVEGSLLVGTEGSNSYTREFLARGAHRNNQLPVQLMGMTVNLTRAQVTPLRAIDPLLFQGCHPDTGDFIYASLVGTPGSNSVEGMHTADGMYRFQVMMSWLTGTKGKSQEHDDGQRPTIEERLVDLKRRAAHFHPVLRDLIQGAPSATEVIEIIVQDWLPTSWDNHHGRVTLIGDAAHAMTMYRGEAGNHGILDAFRVCEVLKDVYSGKRTQVEVIDEYEKEMRNRTSAAVLSSRQACLDAHDLAKLNENSAVLRRRAVPDV

SEQ ID NO: 39460 - DNA, 2682 bp, Muscodor strobelii
  misc_feature: SGI cDNA ID NO. 573729
  misc_feature: Reduced expression when VOC is produced
  misc_feature: Encodes the peptide sequence at SEQ ID NO 39461
atgctccccgcacgcgttgcccgtgcggccatccgggctggcgtgcgccgcgtcacacccagggcgaggctgtaccgctcctcgccagccacggccatttccacttctcgacgatatactacccgctccaacgccgatgactcggccacccgtgccgctgtcgtccgggtgttgaacaatgtcggctcgaagcgagaggtccagcagtatctgcaacatttctcctccgtgtcctcgcagcagttcgccgtcatcaaggtcggcggcgccatcctgaccgagtacctcgacgagctgtgttcctcgctctccttcctctaccacatgggcctgttccccattattgtgcatggcgctggcccccagctcaacaagctgctccaagacgccggcgtcgagccccagttcgaagagggcatccggatcaccgacggcaagactctgggcattgcacggaagctcttcttggaggagaatatgaaattggtggagaggctgcaccagttgggcgtccgtgctcggcccatcacctccagcgtcttcactgctgactacctcgacaaggagaagtggaagtttgtcggcaagatcaccgaggtcaacaaggcccccatccagaccgccatcgagactggctacctgcccatcctcaccagcatggccttgacccccgagggccaactcctgaatgtcaatgctgacgtcgctgccggagagctcgcccgcaagctggagccgctgaaggtcgtctatctcagtgagaagggtgggctgtttgacggcgattcccagaagatctcagccatcaacctcgacgaggagtttgatcatctcatggcccagccttggtgtaaattcgggacgcgcctgaagatcaaggaaatcaaggagttgctcgacaacctcccccgctcctccagtgtggccatcatccacccggaagacctccagaaggaactgtttaccgactccggagccggcacactcatccgccggggagacaagctgatgaccgcctccagcgtgtctggcttcgccgatgtcgagaagctgaaggaggtcctggttcgggatcgcgaggttcgagatgctagatccaccgtcgaccgatacctagagtttctagcggagagaccgttcaaggctttctttgacgagcccatgaaggccttggctgttgttcttgagaagaccgatgagcagtcatactctacactcgctacgctcactatcaccaagaatggctggttgactaacgttgctgataatctctttgctgctatcaagaaagagtatcccagcctggtctggacagtcaagtccgacgatgagaacctgacttggttcttcgacaagtctgagggtagcctcgtttcgggcaacgatgtgatgttctggtatggtatcgaagctggggagcaacttggcaagcttaccagggaattcacgaccaagggacgtgctatgctcggcgactctaacctcgaagcccggctacaccgtgctgcccaggttgcatctgagaaccttcggtcccagttcgcttctagctctgccgccaaccaggcccgcggcttctccaccctcgcccgtcgtcccctgaccggagctgtccgcacaggcgcattgtcaccacgtgcttcccgaggatatgccaccaccacgaaccccaatcctccgtatgggaagaagcatgcttccaatgacgcaccttcacgcgttgctttgattggtgctcgcggttatactggtcaagccctgatcaacctgatcaacagccatcctcattttcagcttacgaacgtctcatcgcgagagctcgccgggaagaagctcgagggctatacaaagaaggagatcatctacgagaacttgagcgccgatgaggtaggccagatggaaaaggacggaaagattgatgtttgggtgatggcattgcccaataacgtctgcaagccatacgtcgaggctatttctgctgccaagaaatccgcacctcgtgaggatagcagcttgatcattgatctctctgctgattaccgatttgacaacacctgggcttacggtctccccgagcttgtgaagcgctccactattgcgcagtccacacagatctccaatcccggctgctacgccacagctgctcagcttggcattgctcctctcgtcgagcacctgggtggcgagcctaccgtgtttggtgtctctggctactctggtgccggcaccaaaccctcacccaagaacgacgtggagaacttggcaaacaatctgatcccgtatagcttgacggatcacatccacgaacgggagatgagcacacaactcggcatcaacgctggcttcataccccatgttgccgcctggttccaaggcatccaccatactattaacatccctctcaacaagactatgacgtcgagggatatccgccaactgtaccaggatagatacgcaggcgaaaagctagtgaaggtagttggcgaggctcctttggtcaaggccatctcaggcaaacatggcgttgagatcggtggatttgcagtccacagttccggaaagagagtcgttgtttgtgcaactatagataacttactaaagggagccagtacccagtgtctacaaaatatgaatctggcgcgtggttatgcggagtttgaaggaattccagaaatggactag

SEQ ID NO: 39461 - protein, 893 aa, Muscodor strobelii
  misc_feature: SGI Peptide ID NO. 573729
  misc_feature (81)..(312): Pfam Id: PF00696 Pfam Desc: Amino acid kinase family
  misc_feature (315)..(485): Pfam Id: PF04768 Pfam Desc: Domain of function (DUF619)
  misc_feature (573)..(702): Pfam Id: PF01118 Pfam Desc: Semialdehyde dehydrogenase, NAD binding domain
  misc_feature (20)..(890): NCBI GI: 154310519 Blast Desc: BC1G_07180 [Botryotinia fuckeliana B05.10] gi|150851511|gb|EDN26704.1| BC1G_07180 [Botryotinia fuckeliana B05.10]
  misc_feature (16)..(890): NCBI GI: 121703948 Blast Desc: acetylglutamate kinase, [Aspergillus clavatus NRRL 1] gi|119398382|gb|EAW08812.1| acetylglutamate kinase, [Aspergillus clavatus NRRL 1]
  misc_feature (22)..(890): NCBI GI: 145247116 Blast Desc: An12g07580 [Aspergillus niger] gi|134080535|emb|CAK46382.1| protein product [Aspergillus niger]
  misc_feature (7)..(890): NCBI GI: 212537361 Blast Desc: acetylglutamate kinase, [Penicillium marneffei ATCC 18224] gi|210068578|gb|EEA22669.1| acetylglutamate kinase, [Penicillium marneffei ATCC 18224]
  misc_feature (16)..(890): NCBI GI: 115386610 Blast Desc: protein arg-6, mitochondrial precursor [Aspergillus terreus NIH2624] gi|114190844|gb|EAU32544.1| protein arg-6, mitochondrial precursor [Aspergillus terreus NIH2624]
  misc_feature (16)..(890): NCBI GI: 119467352 Blast Desc: acetylglutamate kinase, [Neosartorya fischeri NRRL 181] gi|119405634|gb|EAW15585.1| acetylglutamate kinase, [Neosartorya fischeri NRRL 181]
  misc_feature (40)..(892): NCBI GI: 85114611 Blast Desc: arg-6 protein, mitochondrial precursor [Neurospora crassa OR74A] gi|28926520|gb|EAA35492.1| arg-6 protein, mitochondrial precursor [Neurospora crassa OR74A]
  misc_feature (40)..(892): NCBI GI: 1703361 Blast Desc: ARG56_NEUCR RecName: Full=Protein arg-6, mitochondrial; Contains: RecName: Full=N-acetyl-gamma-glutamyl-phosphate reductase; AltName: Flags:
  misc_feature (10)..(890): NCBI GI: 238488957 Blast Desc: acetylglutamate kinase, [Aspergillus flavus NRRL3357] gi|220698104|gb|EED54444.1| acetylglutamate kinase, [Aspergillus flavus NRRL3357]
  misc_feature (13)..(890): NCBI GI: 259483029 Blast Desc: TPA: acetylglutamate kinase (Eurofung) [Aspergillus nidulans FGSC A4]
  misc_feature (40)..(892): SWISSPROT Homolog: EC 1.2.1.38 N-acetyl-gamma-glutamyl-phosphate reductase
  misc_feature (40)..(892): SWISSPROT Homolog: EC 2.7.2.8 Acetylglutamate kinase
  misc_feature: Useful for introducing or modulating the production of volatile compounds
MLPARVARAAIRAGVRRVTPRARLYRSSPATAISTSRRYTTRSNADDSATRAAVVRVLNNVGSKREVQQYLQHFSSVSSQQFAVIKVGGAILTEYLDELCSSLSFLYHMGLFPIIVHGAGPQLNKLLQDAGVEPQFEEGIRITDGKTLGIARKLFLEENMKLVERLHQLGVRARPITSSVFTADYLDKEKWKFVGKITEVNKAPIQTAIETGYLPILTSMALTPEGQLLNVNADVAAGELARKLEPLKVVYLSEKGGLFDGDSQKISAINLDEEFDHLMAQPWCKFGTRLKIKEIKELLDNLPRSSSVAIIHPEDLQKELFTDSGAGTLIRRGDKLMTASSVSGFADVEKLKEVLVRDREVRDARSTVDRYLEFLAERPFKAFFDEPMKALAVVLEKTDEQSYSTLATLTITKNGWLTNVADNLFAAIKKEYPSLVWTVKSDDENLTWFFDKSEGSLVSGNDVMFWYGIEAGEQLGKLTREFTTKGRAMLGDSNLEARLHRAAQVASENLRSQFASSSAANQARGFSTLARRPLTGAVRTGALSPRASRGYATTTNPNPPYGKKHASNDAPSRVALIGARGYTGQALINLINSHPHFQLTNVSSRELAGKKLEGYTKKEIIYENLSADEVGQMEKDGKIDVWVMALPNNVCKPYVEAISAAKKSAPREDSSLIIDLSADYRFDNTWAYGLPELVKRSTIAQSTQISNPGCYATAAQLGIAPLVEHLGGEPTVFGVSGYSGAGTKPSPKNDVENLANNLIPYSLTDHIHEREMSTQLGINAGFIPHVAAWFQGIHHTINIPLNKTMTSRDIRQLYQDRYAGEKLVKVVGEAPLVKAISGKHGVEIGGFAVHSSGKRVVVCATIDNLLKGASTQCLQNMNLARGYAEFEGIPEMD

SEQ ID NO: 39462 - DNA, 2989 bp, Muscodor strobelii
  misc_feature: SGI EST ID NO. CUFF.95161.0
  misc_feature: Variant of the nucleotide sequence at SEQ ID NO 39460
ccggtcaccgcactattcgacttttttcatcatttggaggctcgggtgcgatgtgaaggtagctatttcgtcaatttgtagaacatcgtcgtcgcaggtaggcgcgaaagacccctctgctctgctctgctcgaggcctcacaccgcacaccgacacgttcgccctcccgtagacaatagacaatctcctctctcgaattcgataccatgctccccgcacgcgttgcccgtgcggccatccgggctggcgtgcgccgcgtcacacccagggcgaggctgtaccgctcctcgccagccacggccatttccacttctcgacgatatactacccgctccaacgccgatgactcggccacccgtgccgctgtcgtccgggtgttgaacaatgtcggctcgaagcgagaggtccagcagtatctgcaacatttctcctccgtgtcctcgcagcagttcgccgtcatcaaggtcggcggcgccatcctgaccgagtacctcgacgagctgtgttcctcgctctccttcctctaccacatgggcctgttccccattattgtgcatggcgctggcccccagctcaacaagctgctccaagacgccggcgtcgagccccagttcgaagagggcatccggatcaccgacggcaagactctgggcattgcacggaagctcttcttggaggagaatatgaaattggtggagaggctgcaccagttgggcgtccgtgctcggcccatcacctccagcgtcttcactgctgactacctcgacaaggagaagtggaagtttgtcggcaagatcaccgaggtcaacaaggcccccatccagaccgccatcgagactggctacctgcccatcctcaccagcatggccttgacccccgagggccaactcctgaatgtcaatgctgacgtcgctgccggagagctcgcccgcaagctggagccgctgaaggtcgtctatctcagtgagaagggtgggctgtttgacggcgattcccagaagatctcagccatcaacctcgacgaggagtttgatcatctcatggcccagccttggtgtaaattcgggacgcgcctgaagatcaaggaaatcaaggagttgctcgacaacctcccccgctcctccagtgtggccatcatccacccggaagacctccagaaggaactgtttaccgactccggagccggcacactcatccgccggggagacaagctgatgaccgcctccagcgtgtctggcttcgccgatgtcgagaagctgaaggaggtcctggttcgggatcgcgaggttcgagatgctagatccaccgtcgaccgatacctagagtttctagcggagagaccgttcaaggctttctttgacgagcccatgaaggccttggctgttgttcttgagaagaccgatgagcagtcatactctacactcgctacgctcactatcaccaagaatggctggttgactaacgttgctgataatctctttgctgctatcaagaaagagtatcccagcctggtctggacagtcaagtccgacgatgagaacctgacttggttcttcgacaagtctgagggtagcctcgtttcgggcaacgatgtgatgttctggtatggtatcgaagctggggagcaacttggcaagcttaccagggaattcacgaccaagggacgtgctatgctcggcgactctaacctcgaagcccggctacaccgtgctgcccaggttgcatctgagaaccttcggtcccagttcgcttctagctctgccgccaaccaggcccgcggcttctccaccctcgcccgtcgtcccctgaccggagctgtccgcacaggcgcattgtcaccacgtgcttcccgaggatatgccaccaccacgaaccccaatcctccgtatgggaagaagcatgcttccaatgacgcaccttcacgcgttgctttgattggtgctcgcggttatactggtcaagccctgatcaacctgatcaacagccatcctcattttcagcttacgaacgtctcatcgcgagagctcgccgggaagaagctcgagggctatacaaagaaggagatcatctacgagaacttgagcgccgatgaggtaggccagatggaaaaggacggaaagattgatgtttgggtgatggcattgcccaataacgtctgcaagccatacgtcgaggctatttctgctgccaagaaatccgcacctcgtgaggatagcagcttgatcattgatctctctgctgattaccgatttgacaacacctgggcttacggtctccccgagcttgtgaagcgctccactattgcgcagtccacacagatctccaatcccggctgctacgccacagctgctcagcttggcattgctcctctcgtcgagcacctgggtggcgagcctaccgtgtttggtgtctctggctactctggtgccggcaccaaaccctcacccaagaacgacgtggagaacttggcaaacaatctgatcccgtatagcttgacggatcacatccacgaacgggagatgagcacacaactcggcatcaacgctggcttcataccccatgttgccgcctggttccaaggcatccaccatactattaacatccctctcaacaagactatgacgtcgagggatatccgccaactgtaccaggatagatacgcaggcgaaaagctagtgaaggtagttggcgaggctcctttggtcaaggccatctcaggcaaacatggcgttgagatcggtggatttgcagtccacagttccggaaagagagtcgttgtttgtgcaactatagataacttactaaagggagccagtacccagtgtctacaaaatatgaatctggcgcgtggttatgcggagtttgaaggaattccagaaatggactagtgctgtagaattctaaataaataatgtgatatccttgactccatgtgactgtcaacttgactgatcaatctcgctgaggcgacagactggtgattgttaa

SEQ ID NO: 39463 - DNA, 756 bp, Muscodor strobelii
  misc_feature: SGI cDNA ID NO. 573730
  misc_feature: Encodes the peptide sequence at SEQ ID NO 39464
atggccgacgacgagacgaactcagtagatcaagattttgatttcaatggcacttcgggccccgcccgccgcgtggaggccagagagggagacaacatgttgcttgagggtggtctcttctccgacgtgaccgtgaagtgcggtacgcgtgaatggaagctgcattgcaacatacttgcctcccgaagccagtggtttatggctgcccttggtgggcagtttcaggcaagtatacgcgaggctaaagataaggaaatcaccatccacgagcaagatcctgacgccattgacatcgcgatgcactggatttataatcattatcaccccaccctgtatacgatgttcagcgacaacgagagagatctgccttcagttatgaagatgtggacagctgcagactacttacgccttcccagcctcgttgaagagatcgaatctcatttgcgtgtggcactgatcacgcatctaggcgagacaatgagccccttcgccaccgaagacaatgtcaaggagaacatcgcattgttcctgaatactgtcaagaaaatgtacagcttcaattctgcctctctgaagaaggttgcggtggatgccatggttgatccgctggaaatggagccgatgaagctcattccaaatatcgttgaggagattccagagtatgccaaggacctcatggccagcgtgcatccactcattagggagacaaagaactgggccaacgagtgtttcagcaagggcgagaagccattctag

SEQ ID NO: 39464 - protein, 251 aa, Muscodor strobelii
  misc_feature: SGI Peptide ID NO. 573730
  misc_feature (31)..(152): Pfam Id: PF00651 Pfam Desc: BTB/POZ domain
  misc_feature (32)..(104): Pfam Id: PF00651 Pfam Desc: BTB/POZ domain
  misc_feature (31)..(154): NCBI GI: 85079439 Blast Desc: NCU05044 [Neurospora crassa OR74A] gi|28917412|gb|EAA27116.1| [Neurospora crassa OR74A]
  misc_feature (30)..(105): NCBI GI: 171680598 Blast Desc: protein product [Podospora anserina] gi|170939926|emb|CAP65152.1| protein product [Podospora anserina]
  misc_feature (31)..(193): NCBI GI: 116179034 Blast Desc: CHGG_00145 [Chaetomium globosum CBS 148.51] gi|88184442|gb|EAQ91910.1| CHGG_00145 [Chaetomium globosum CBS 148.51]
  misc_feature (25)..(105): NCBI GI: 189192190 Blast Desc: PTRG_02101 [Pyrenophora tritici-repentis Pt-1C-BFP] gi|187974040|gb|EDU41539.1| PTRG_02101 [Pyrenophora tritici-repentis Pt-1C-BFP]
  misc_feature (34)..(104): NCBI GI: 116206172 Blast Desc: CHGG_02379 [Chaetomium globosum CBS 148.51] gi|88182976|gb|EAQ90444.1| CHGG_02379 [Chaetomium globosum CBS 148.51]
  misc_feature (40)..(244): NCBI GI: 242825079 Blast Desc: BTB/POZ domain protein [Talaromyces stipitatus ATCC 10500] gi|218712184|gb|EED11610.1| BTB/POZ domain protein [Talaromyces stipitatus ATCC 10500]
  misc_feature (40)..(244): NCBI GI: 242825084 Blast Desc: BTB/POZ domain protein [Talaromyces stipitatus ATCC 10500] gi|218712185|gb|EED11611.1| BTB/POZ domain protein [Talaromyces stipitatus ATCC 10500]
  misc_feature (34)..(200): NCBI GI: 116193259 Blast Desc: CHGG_06347 [Chaetomium globosum CBS 148.51] gi|88182260|gb|EAQ89728.1| CHGG_06347 [Chaetomium globosum CBS 148.51]
  misc_feature (28)..(104): NCBI GI: 226292908 Blast Desc: BTB/POZ domain-containing protein [Paracoccidioides brasiliensis Pb18]
  misc_feature (34)..(104): NCBI GI: 256727319 Blast Desc: NECHADRAFT_33838 [Nectria haematococca mpVI 77-13-4]
MADDETNSVDQDFDFNGTSGPARRVEAREGDNMLLEGGLFSDVTVKCGTREWKLHCNILASRSQWFMAALGGQFQASIREAKDKEITIHEQDPDAIDIAMHWIYNHYHPTLYTMFSDNERDLPSVMKMWTAADYLRLPSLVEEIESHLRVALITHLGETMSPFATEDNVKENIALFLNTVKKMYSFNSASLKKVAVDAMVDPLEMEPMKLIPNIVEEIPEYAKDLMASVHPLIRETKNWANECFSKGEKPF

SEQ ID NO: 39465 - DNA, 1788 bp, Muscodor strobelii
  misc_feature: SGI cDNA ID NO. 573731
  misc_feature: Encodes the peptide sequence at SEQ ID NO 39466
atgctccaggtacttgctggactactttgcgccgttacggtcgtcgaaggggccgccatcaagggcggtagagctggtcttcacggccgcgacgacgcagcatactcgttaccaccactgagcaacgtgaattccgcaagagctgaggctctccaagtcaagcgcgacggctggcagtatggtccatcgattgcgggcaacaccgctttctacccgattggtgatttagcggacccggaaacgacctctcagaccaacgctctcttcacgtttcaggacgcgcacgtcgccaatgttgccacggaccaaacgaacgctgtcaacgcagtgaatgcgtctggcggcattaaatcgcttgacgaatattctaagctctacgatcaccaatggaccttgactaccccagaaggtccatacacaggcatgctgtcgaattatacaagtgatctcctcttctctatggagcgtctgtcgacagcccctgccagcgttgctcgtgtaggcgcaacagacgcgttgctgtttgccgtggacaatgcgaaatccatcactggactatctgtcgaggaactgcaagctcaaggccgtctattcgcggtggactatctggatcagaaggatctgcctcgtagcagcgaagctaagtacggtgcggcgtgccaagcgtacttctatattcacccgaagtctggtgagttcttgcctctcgccatcaagccaaacgttgagggctctgatcttgtgtatacgcccgaggacacggaggaggactggacgcttgccaagctgatgtataacttgaatgatgtctggttcactcagtggttccatctggcggcttgtcacgagactgccgagatcgtgtatctggctgcaatccgcacgctgagtgaagatcacccactcatgcccatctttcatcgcatcatgaagcaggcctgggctatgcgtcacagtgccgcagagcgcctcatcaacgtgggcggccctgtcgatcgtctcttcccatgggctggctccgtcgctggcaactacactgacgcgctgtatcagtctggattggccagcaaatttcaggctaattaccttgagaccaacctgaagtcacgtggactgctcgatagttcttttggtcccgaactcaagaacttcccttatttcgaggacgcgagccttgtgctcggtgagatccgcacgttcatgcgctcgttcatctcgtcctactatgagtcggagggagacgtaagcgccgatttggagctccaggcgtgggttgccgaagccaaacctgctgagatcaaggacttccccactgcagtgacaactgtggagggtatagtagacatcatgacacacatgtgctacctagtcgccgtccagcacggagctctcaacaccaatgcccccgtcgcttcaacggcgtctctacctctccaccctcttgcgctctatgccccgctacctactgagaaaggagtgacagatgtgatgcagtacatgccacccctagctgcagcagcgggtcagatcacgcttcttgccgccttcaatcgccctgagttcttgaatacgaacgagacgttgtcgcatatgttcgacgacgccagtatcatgtcgcgaatgaacactgctacgcgaggtgccgagagtgtgttccgcgagaagatgtatgccttcagtgacgtcgtccgtggtcgcaagttcgatgcggatggtctgtcgcagggtatgccattcatctggaacaccctcgaccctaacagagcatcttactggattactatttga

SEQ ID NO: 39466 - protein, 595 aa, Muscodor strobelii
  misc_feature: SGI Peptide ID NO. 573731
  misc_feature (40)..(587): Pfam Id: PF00305 Pfam Desc: Lipoxygenase
  misc_feature (25)..(595): NCBI GI: 119487626 Blast Desc: lipoxygenase, [Neosartorya fischeri NRRL 181] gi|119410702|gb|EAW20648.1| lipoxygenase, [Neosartorya fischeri NRRL 181]
  misc_feature (11)..(595): NCBI GI: 70981869 Blast Desc: arachidonate 5-lipoxygenase [Aspergillus fumigatus Af293] gi|66844086|gb|EAL84425.1| arachidonate 5-lipoxygenase, [Aspergillus fumigatus Af293]
  misc_feature (11)..(595): NCBI GI: 159122314 Blast Desc: arachidonate 5-lipoxygenase, [Aspergillus fumigatus A1163]
  misc_feature (35)..(595): NCBI GI: 17861374 Blast Desc: manganese lipoxygenase [Gaeumannomyces graminis var. avenae]
  misc_feature (35)..(572): NCBI GI: 17861376 Blast Desc: manganese lipoxygenase [Gaeumannomyces graminis var. tritici]
  misc_feature (35)..(595): NCBI GI: 145604322 Blast Desc: MGG_08499 [Magnaporthe grisea 70-15] gi|145012339|gb|EDJ96995.1| MGG_08499 [Magnaporthe grisea 70-15]
  misc_feature (11)..(427): NCBI GI: 238495959 Blast Desc: conserved [Aspergillus flavus NRRL3357] gi|220694095|gb|EED50439.1| conserved [Aspergillus flavus NRRL3357]
  misc_feature (309)..(595): NCBI GI: 154300392 Blast Desc: BC1G_11385 [Botryotinia fuckeliana B05.10] gi|150856708|gb|EDN31900.1| BC1G_11385 [Botryotinia fuckeliana B05.10]
  misc_feature (27)..(310): NCBI GI: 186966745 Blast Desc: lipoxygenase [Aspergillus flavus]
  misc_feature (154)..(423): NCBI GI: 256719967 Blast Desc: NECHADRAFT_89463 [Nectria haematococca mpVI 77-13-4]
  misc_feature (153)..(465): SWISSPROT Homolog: EC 1.13.11.12 Lipoxygenase
MLQVLAGLLCAVTVVEGAAIKGGRAGLHGRDDAAYSLPPLSNVNSARAEALQVKRDGWQYGPSIAGNTAFYPIGDLADPETTSQTNALFTFQDAHVANVATDQTNAVNAVNASGGIKSLDEYSKLYDHQWTLTTPEGPYTGMLSNYTSDLLFSMERLSTAPASVARVGATDALLFAVDNAKSITGLSVEELQAQGRLFAVDYLDQKDLPRSSEAKYGAACQAYFYIHPKSGEFLPLAIKPNVEGSDLVYTPEDTEEDWTLAKLMYNLNDVWFTQWFHLAACHETAEIVYLAAIRTLSEDHPLMPIFHRIMKQAWAMRHSAAERLINVGGPVDRLFPWAGSVAGNYTDALYQSGLASKFQANYLETNLKSRGLLDSSFGPELKNFPYFEDASLVLGEIRTFMRSFISSYYESEGDVSADLELQAWVAEAKPAEIKDFPTAVTTVEGIVDIMTHMCYLVAVQHGALNTNAPVASTASLPLHPLALYAPLPTEKGVTDVMQYMPPLAAAAGQITLLAAFNRPEFLNTNETLSHMFDDASIMSRMNTATRGAESVFREKMYAFSDVVRGRKFDADGLSQGMPFIWNTLDPNRASYWITI

SEQ ID NO: 39467 - DNA, 847 bp, Muscodor strobelii
  misc_feature: SGI EST ID NO. CUFF.94988.0
  misc_feature: Variant of the nucleotide sequence at SEQ ID NO 39465
gtggactatctggatcagaaggatctgcctcgtagcagcgaagctaagtacggtgcggcgtgccaagcgtacttctatattcacccgaagtctggtgagttcttgcctctcgccatcaagccaaacgttgagggctctgatcttgtgtatacgcccgaggacacggaggaggactggacgcttgccaagctgatgtataacttgaatgatgtctggttcactcagtggttccatctggcggcttgtcacgagactgccgagatcgtgtatctggctgcaatccgcacgctgagtgaagatcacccactcatgcccatctttcatcgcatcatgaagcaggcctgggctatgcgtcacagtgccgcagagcgcctcatcaacgtgggcggccctgtcgatcgtctcttcccatgggctggctccgtcgctggcaactacactgacgcgctgtatcagtctggattggccagcaaatttcaggctaattaccttgagaccaacctgaagtcacgtggactgctcgatagttcttttggtcccgaactcaagaacttcccttatttcgaggacgcgagccttgtgctcggtgagatccgcacgttcatgcgctcgttcatctcgtcctactatgagtcggagggagacgtaagcgccgatttggagctccaggcgtgggttgccgaagccaaacctgctgagatcaaggacttccccactgcagtgacaactgtggagggtatagtagacatcatgacacacatgtgctacctagtcgccgtccagcacggagctctcaacaccaatgcccccgtcgcttcaacggcgtctctacctctccaccctcttg

SEQ ID NO: 39468 - DNA, 1470 bp, Muscodor strobelii
  misc_feature: SGI cDNA ID NO. 573732
  misc_feature: Encodes the peptide sequence at SEQ ID NO 39469
atgaacgacatcccttcttccacattttcgcatttggacaacccctccgtttgccaaataactatgtcaagccatcaggggcaagataaagcgatcgaagcgcacactacttcagaagagccaggagtcataacagacatcgtcgttgacgctcagacctcagagcgcggtggagaggagacaaaacgcaagaaaagcgttcacgactatctcagcatcgtcggtctcttcctcgtctactttataacattgggccaagttgcttcgttcagcacttaccaagactactatgaggtggaactgctctccagttattcggcgtccgctatctcatggatcggaacatcgcaggtctttctactaggcatagttggtctgctgtccggcgcaatgtacgacagaggttatgtccacgaggctctgtttccaggcttcgtgttcgtcattcttgggttgcttttgcttagcttttcgcatttattctggcatatccttctctcacaaggattcctgataggaatcggcggtgcgttggtctacatacccgcaatctcaattgtgtcaaacaatttcccgtcaggtccggctttgccattgggtatagctgccagcggatcagctgttggcggcataatctggcccattgtgtttcgaaagctgctgccagtggttggttttgcgtgggtgaatcgtgtcttcactctgctcggtttgatcatatcggttgtgtcatactacacgttgataagcggtgagaaatttgccagctcctggcccgaccgatgtaagaggccctactttttccaaacaccaccttggcgagaaaagagagaagcaacagaagaaagcatttcccaagaactcgagctcccaccatccgacaagctcaacacgcttttgtctgctttcgacggctgggcatacaagtttttgtgcgttggtgtattttttgcacttcttggatactgggtacctctgttctatcttgtcccttttgcctcgcgctcgctcgggacatcttcatcgtacgcatcttatttactctcgattgtgaatgcggccagtctctttggccggatcattccagccgcagcgggccggaagcttgactccgttgcgggcataacgatctggtccatcttcctgggattcactgcaggcagtgtgataacaatcccgaatgccgtcgcatcgcgtctttctcagccctccaacaccggactccggataggtacgatgtgggccgtcggtgcatttgccgagctcattggtccaccaatagcgggggctttacttgtcgagcgtggtggcaagacgagctacttgggctgtcagctatttggtggcctcgctgtattgatcggcgctttatttttgatatacccagcgcggtggatattgacagacaacagagccaagaaacatggtgcacaagatgatacggaagataatacggagaacagtgcgtga
